United States Patent Application Publication US 2007/0054278 A1 - sequence listing, part 31

SEQ ID NO: 94138 - DNA, 103848 bp, Homo sapiens
atcaaacctgcacgttgtgcacatgtaccctagaacgtaaagtgtaatagaaaagtaagaaaaaagaaaatgggtctctaaaaagtgaccaacgtagaaacatgttgagttcagttacagaaaatagcatgataaaacgtgtttttgaaaagtgatcaatgacaaattatggctgggtgcagtagctcagatctgtaatcccagcactttgggaggccaaggtggcagatcacttgaggccaggagttcgagaccagcctggccaacatgataaaaccccatctctactaaaaatacaaaaaattatctgggcataatggcgcacacctgtaatcccagctacttgggaggctgagacacaagaaatcacctgaaccctggaggcagaggttgcagtgatctgaaatcatgcgtctacactccaggctgggccaaagagcaaaactctgtctccaaaaaaaaaaaaaaacaaagccacaggggacaaacacacacacacacacacacacacacacacacacacacagagagagagcatgagagcaagagctggcagggaagcacatgcctatagtccagctacttgggaggctgaagggggaggactgcttatgcccaggagtttgagtccagcctgagcaacacagcaagactccatctctgaaaaaagaattttaaacaaaaaacacagaaaggccttctcttatcttaggacaacttagtaacactgtgagttaagtacagaagagaggaacacaattaactcacttgtaagatggttatggttttcttcttttgaatcctttttttccacaggtgcttcttgataccgtgcaacagaaaataaattaggagaagcactttttgaagttaagacaaaatctccatgggcagttctacagaagttgctttgcttatgggataaaatgtaggaagtgtatgtttcttcctgagttaggtccaggtagacgtatgataggaagcagcgtgtggctctctatccagtggtggcatttcctggagacctgtgcttctggctctgatcatcaggcaggaaactcaaaccttgcaattaagaaaagcaacaaagctgatgacttccttcaacattttctcttttatccccagtagtgactccaccccacaaaggcttctccacagtgacaaaagtattttttccctttattaggaagtgatgtttaacaaaatcatgaaatatttatttatttctttatttattcatttatttatctttttaagacagagtcttgctgtcgccgaggctggagtgcagtggtgcaatctcagctcactgcaacctccacctctcgggttcaagctattctcatgcctcagcctcccgagtagctgggattaaaggcatgcaccaccatgcccaggtaattttttgtatttttagtagagatgcagtttcaccatgttgcccagggtggtcttgaactcctgagcccaggcaatctgcccgcctcggcctcccgaagtgttaggattacaggcatgagccaccatgcccggccaaaatcatgaaattttttaaattccaaagtgaccttcacatagatttaagtaacagtatatttagatgctgcttctgtgcagacagtgtgggcacggcagagctgcagctgcctaactcctattccacgtgtgagaacatgcaggagtcaactctgcagccctgcaatcagcacattagacctggagcacccacacagacagtgatgcgaatgatctgagctgttccctagttatcaaaacccgccctttagattatccttaaaattttggtatcattggttgatggaatacaggctgacttttccttctggcatgatctcagctcactgcaaccaccacctccccagttcaagtgattctcctgcctcagccacctgaatagctgggactacagatgtgcgccaccatgcccagctaatttttgtatttttagtagagatggggttttaccatgttggctaggctggtgtcaaactcctgacctccagtgatccaccgcctcagcctcccaaagtgctgggattacaagcatgagccaccacacccagccaagagttcacaacttttcattgttggtctgatggtagcaagtgtccactctgtccagagaggacatgtcaggtgcagtggcttacacctgtaatcccagcactttgaaacactgaagtggatcattcgcgcccagaagtttgaatgttagccaggcatggtggcatgcacctgtagccctagctacttgggaggctcaggcaggaggatcacttgagcccaggagtttaaggttatgatcacaccactagactgcagcctgggcgacagagtgaaacccccaactcttaaaaagaaaaaagagagaacataagtgctagcctggccaagggatgatccccaagcccatgtcttccaggccagaaaggggaattctaacaggttgggaagatgcactgagagatgcatgtgtctggcctctaggcaaacccaagaaaacccacatcctgcttcacctgcaggaagagtgaaggagttcttcaccaaggcctgaaacctcagatttccagaattacttctggaaagtttctaacaacaaccttgggtgctgagagacattttttaaatcttggcagtttgatataggtaaatctattgctggtgcattggacttacaacaaaacatcctggaaacctaatgagtctatacagcaaagggattatcacatccactacattctagaatgcctgaccgatgatgaatgaagttgaatagatagtaaaggatttctagcttgaatctttgttgtaataagagcagaacaataccataatagttgtcacacctgtatttttgctttcttcaaaaatagcaataattatatagtagttggatggttcttcaagcattctataggtttttattacacattttttttagatgggatgactctatcacccaggctggagggcagtggcacaattacaactcactgtagcctcaacctccaggtctcaagtgttcctcctgcctcagcctcctaggtagctgagatgacaggcacatgccaccatacctggctaatttttgcattttttgtagagatgggttttcaccatgttgcccaggctggtcttgaactcctgggctcaagcaatccacctgcctcagcctcccaaagtgccaggattacaggcatgagtcaccgtgcctggcctatcatttcttggaggagagttttaacagatatagaattcatggttgccggtttgtttgttttctttcagcactttatatcatcccactgccttctggctcccatggtaatagattggctgttaatcttatgcaagttcctttgtatgtagtgatcatttctgtctagctgcttttaagcttctctctgtctttggctttcaacagtttgattattaatataactctattgtggactttttgagtttatcatacttgaagttcatggagcttctctgaagtgttacattatgtattttaacaaattggggactttggagccactgtttcttcagatactcttcctgccaccttcaccctcatctttctttctgggaccccctttatgcatatgctgatacacttgatggtgtccacaaatcttttggactttgatcttcattcttctactttctgctcctcagagttaataatttcaacagttttatcttcgagtttgctcattccttctcttacctgctcaaatctactctggagcatcacttgtgtatttttcatttaagttattgtatttttttctttttcttttcttcttcttttttttttttttgagacaagatattgctctgtcacccaggctggagtgcaggagtgtgatcttagctcactgcagccatgaacttcttggctcaagtgatcctcctgccttagcctcctgagtagctagggccacaggcatgcaccaccatgcccggttaattttgtaatttttttgtagagaggggatctccctatgttgccaaggcaaactcttggtctcaagcgatcctcccgccttggcctcccaagacactaggattacaggcatgaaccaccatgcctggtcctattgtactttttaactacacaatttctttttggttcttttcagttccaaaatgtgtttggttccttttataatttctatctctttattaatattccttatttgttttttaaataatttcaacttttattttagattcagagggtacatgtgcaggcttgttacctacatataattcgtggtgctgaggtttggggtatgactgagcccctcacccggggactgagcatagtacccaatagtttttcaacccttgcccctccccctccctccctgtctagttgtccccagtgtctattgttgccatctttatatccatgagtacccagtgtttagctcccacttacaaattagaacatgtggtatttggttttctgttccttcattaattcacttacgacaatggcctccagttgcagtcacgttgctgtgaaggacatgattccattcattctttttatggcttcgtagtattccatggtgcaaatgtaccacattttctttatccagtccattgtcgatgagcacctaagttcattccatgtctttcctattgtgaagcgtgctgtgacgaacatactagtgcatgtgtctttttggtagaatgagttctcttgttttgaatatgtacccagtaatgggatagctgggttgaatagcagttctgttttcagcactttgagaaatcttcaaactggtttccacagtggttcaactaatttacattcccactgacagtgtataagcatttccttttcaataaagccttgccagcatctgttgttccttgactttttaataataaccattctgacyggtgtaagatggtatctcattgcagttttaatttgcacttttctgataattagttatgctgggctttttttcatgcttgttgaccatttgcacatcttctattgcatattctctatttattgagactttgttctcctggttgtttctttcagttatttttctatgtttcctttcactttttgtccatgtttaagacagtttatttgaagtatttgtctaataattcctatgtctgtgcttcctcagctcagggacaatttctgttcatttcttttttcctttgaattggccattttttcgcctttttttttgcatgcctcataattttttgttgaagattggacattttgagcattacgatgtggtaactctaggaatcagtctctctcctcccccagaatctcttgttgtttcttagacaaccctatagagtaggttgtaatgatgaaacttggtaaattaccttgtccccagcccccttggtaataaattgtggagtcaggattcaaccccataccctttccactgtattctctactctatcctttctattctcattttattcagtatcctaaaaatctgaatcttccccattgctttattcccatttcagtgaatctcagatctgtatctccagccccctgcctctcttgaatggcagataaatatatttccaactagttacactgtcacgaatttcaaacgcaggaaggcttaaagtaaatttattatctcactctcctgtttccacgaactttcccgaaattttcttctttcccggccttgtgaatcccttccatttctcagttaaaggacagcaccatccacccacctctctcaaagccgagctttgtattaatcctcattgacaaaatccctcctgaaatatgaaactgaaagccctgaaccctccggctgatcttggaagagaaaccccgccagaggccggggacccgctccccacctggcggacccgattccgggcgcgttccggctatcgtccctgcttgggacgctgcgcccgcctgrtgcggggcggggttccggcgcagtggcgcccgcccagccccgggggcagggagagcctagattacggaagtaccgcgagcaaggagcgcggaatcggggagcgtccggagctagctggatcctctaggcaggtgcgtgggcgctgcggggtggggggctgcaaaggtccctgtagtcctagccaggaagtggcccgcgtactactttcccgccagtggctgcacccttgccctgcgcggcgttggcgctgtgggcctgacggcgctgctaggctcgggagtggactagctagtgcagccagcgccctcggggagggrtattgcggtcgttccgctctgccccgcggcgcagccctggtgacgagaaaccgggtgcggtggggggcgcccaccggagccgacagtcacaccaagtctccgcaccccgtgcggtgcggttcgcagtagmaygcgttgtttcttgtttccagtatgccaaacggccttctttcctaaagttaggtttcgaattgtgcaaaaagtaaggtggtttggtgagtaatcaggaagtactatctgacctcgtgagtcattgggaacaccgtgatagaaacaatgtgtttgttgaggtccaaagttgaaaacctctaactcagttaagtaattcctgctaggagggccgaatggttcacccagggatcgagttggtagatcacaggttctagaaaactaaggcgctgctaaatattcaagcccaagcactttcaattctggactgctggatgacaacaattatatgacaatatccaagcatagtgctatgataaaggggaagttcgctctgagatgtgcgtgttgcagactcattacatctgactttatcatttattaagtaaacattaggtcttgtttgtgtgcgtagagctactgtatatcatgtaggagtgaaataaaagtagtacctttgttgtttaagggtttaataaacccattagggaggtgcattactgatgccatttgagtccaaaatgcaaatagtgtcagaaggcttttctgtaatcctgggctttaatggatacgtgagagtttttagtaagcaagcttttattgaatgcccactgtatatcaaaagtgatcttagcgtgtgctgactcacacacttcggaaggcggaggctgtagaatcaagactgcccagaaagggactcctcagggttttccgagaggaggaaatgccagtggtaaagacgaagacctgtgaagcaggaagccacttgattccacctacaccaatggtttatggagcagccaagagtttgtgaggaggcgcgctgagggtttcttaggaatcggggctgttccctgctgtctttgggtggaagacactctgtgaatgttatttggggaagaagctgggaagggggacaggctggagtgactgtgcagatttgccttagagaataaccagcccctagcccagtgtccgccacatctcatatgtacgtaatcagcgctgatgaaaacatgaactaactctgtgtttagagaacactttgaaacaaggaagaactagtggcgcatgtcggttaggcgctgttaacccagaagagggctggcattttacagagactagagatgaatctgtggaaagagagaagtcaagacctgacttgagatttcacgaaacccaaagtgcgcctttccatacctcccacgcagccgcaggtgctaagaacagaccgcagatttatgtttaaaatgtttttactctgggccgggcgtggcagctcacacctgtaaccccagcactctgggaggctgaggcaggaggatggcttgagcccaggagtttgtgaccagccttggcaacatagtaagaaccctgtctctaccaaaattagctgggcatggtggtgcaggcctgtggtcccagctactaagtaggccgggtgaaaggattgctgggagggaggtcgaggttgcagtgagctgtgacagtgaccacaccactgcactccagcttgggagacagagccagaccctgtctcaaataaaataaaatgtttatactttgatttcacaactatgtgtatgtacttaatgccactgaactgtacacacagttttaaaaactgtaccacaatttttaaaaggctaaaaaatgtttatactccttgattcagtaattccatttctggccatcaactctagggaaactatgacagagatgtggcaaaaaaatatatgtacaagcattttaattaaagtgtatttctaatagtgaacacttttttttttttttttttgagacggagtctcgctctgtcgcccaggctggagtgcagtggcgggatctccgctcactgcaagctccgcctcccgggttcacgccattcccctgcctcagcctcccaagtagctgggactacaggcacccgccactacgcccggctaattttttgtatttttagtagagacggggtttcaccgttttagccgggatggcctcgatctcctgacctcgtgatccgcccgcctcggcctcccaaaatgctgggattacaggygtgagccaccgcgcccggccaatagtgaacacttttaagtaaccaagtatctgatgacttggggaaggatgaaataaacgcaaagcttatgtaaccactaaaaacaccttcaaakaatatttagtgacatggggaggatatcactaaaagctaaataagctgtgaaagtgaaagtcctatttaaaaagtaaagagcaactggctataacattaaatatagaatattaataatttagaaaatacaatgatacaagaaataataacaccaaaaaaattaaaatatcaacagtgggggctaggtgtggtggctcatgcctgtaatcctagcactttgggaggcagaggtgggcagatcacttgagctcaggaattcgagaccagcctggccaacatggtgaaaccccgtctctactaaaaatacaaaaattagctgggcgtggtggtgcgtgcctgtagtcccagctacttggaggctgaggcacgagaattacttgaacctgggaggcagaaggttgcagtgagctgagatcatgccactgcactccagcctgggtgacagagcgagactggctcaaaaaacaaacaaataaaaatcaacagtggggttatttctggatggagggatcaggtgcttttttaaaaataactttattgacccataatatgtatgtaactattatgtatccaaaaaatactatttaaaaaatgtattggggtacaatttacatacattaaattcattcattttaattgtacaatttagtaatttttctctctttttttttttttgagatagggtctcttgtcacccaggctggagtgcagtggcatgatcacagctcactgcagccttgacctcccaggctcaagtgatcctcccacctaagtctcctgagtagctgggaccataggcatgtaccaccttgcccagctaagttttgtattttttgtagagatgaagtttcgccatgttggccaggctgctctcaaactcctgggctcaagcgatttgctccacttggtctcccaaagtgctagggttacaggcatgagccacattgcctggcctaattcaataatttttaataatttaccaagttgtgcaccatcactgcagtctagttttgagcatttccatcattttaggtgctttttattttttcttcttagtgattaacttttaacacaaaaaaattgttcaaactttgattcagtagttctagttgagtattattttctaagatgattgttggagatggaaacaaggatttgcacataaggatgttcatcatagctttttatgataccaaaaatcagaaatgatttaattttccaacaataattcatttatggtccatatctgatagtctctattaaaaatgttttccaataatatttaatgacaaaatgctaaagatgctgactgataacagcgggataggtagtgtgatgtcaattttgataaaaaatacagtctgtggctgggygcrgtgactcatgcctgtaatcccagcacttagggaggccaaggtgtgcagatcacttaaggttgggagttcgagaccagcctggccaacatggtgaaaccccgtctctactaaaaatacaaaaagtagccaggcatggtggcaggcacctataatcccagctactcgggaggctgatgcaggagaatcgtttgaacccgggaggcrgagggtgccgtgagccgaggtctcaccactgcacttccgcctaagtgacaaaagcgagactgtctcaaaaaacaaagtgttataatagacctagaaaaaagcccagaagaaaaatgcaaaacaagatgctaacatagccctaggttttgagatttttttgttttgttctttttttttctgttatacaattctgtatttttcaaattttcaacagtgaccatgagtcacttttccaggaaacacgttttaaacaggtcagaggatttaacacatccaggacccatctgaaggtggacttgagcagccactccatgtcagccaaccttggtcagcataagtgggggtgcaattatcacatagaggctgtcctggaaattattaaagagtcattaaaggcttttagtgtttttttttgtgtgttgtttttaattgtcagagattacgactagcatagattaacctaaatagtgtggtgtaatctcttttatggtacccctcatttcatccctcctatctatgcacagatgctaattgaatgtgagaggcagtcaacaaatgaaacttttccatgctaatgttatggaaaggcagaattacatcaagagacttcagtttaaccggacctcaaaagaaagattaaaaaatatgaatccctaatgtgttcattcattgtgtcctggatgggggatacagcatggggtgaggaagggctgggggtcccagagataagaactataatatataacagcatgtgtcaagacttggaggaccaagctgtgggtttcttcctcctttagaaaaagccagtgtggccaggagggaatgagatagctgttggccttgaaccatgataagcaatttgtattttatttgaaatgtaatttaaaaacaacaagtttcctgaagctgcagtgtggagaagagattgaacacaggcgcaacaggagtgggagccagtcaggatgcgagggcatgggccagggtggcagcaggagggacaagttctatacattggggctatatcaggggctgtgatggaagagatacagctggcagaaggagatgggggtgcagggagtcaagaatagcacccagtggttgtctccagccaagggggagagggaggcctaggctggggacgtcgcacctctgtggtgccaaggagacccagaggtgaggtgtcagggaggcastggcattgtgtcctcaattgagagcccagggaatgggtaccaccatccaacacacacagggcaaaggtactgaaaggtgacagcgtgctggcagcccttgcagccctcgctggctctcggcgcccactctggctacgcttgaggagcccttcagcccgccgctgcactgtgggagcccctttctgagctggcgaggccggagccggctccttcagcttgcaggcgcaggacggaaccggggctgtgcgcggcgcttgcgggccagcgcaagttccggttgggcgtgggctgggcggtccccgcactctgagcagcccgctggccccgccggccccggacagtgaggggcttagcgcccgggccagcagcagcggagggtgtgccgggtaccccagcagtgccggcccaccagcgctgtgctagatttctcgtggagccttagctgcctccccgcggggcagggctcgggacctgcagcccgccatgtctgagctctcccgcctcagttggctcctgcgcagcacgagcgtcccgcaggagcgcggccggcgcccggtcccatcgaccacccaagggctgaggagtgcgggtgcaaggcatgggactggcaggcagctccacctgcggccctggcatgggatccactgggtgaagccagctgggctcctgagtctagtggggacttggagaactttatgtctagctaagggattgtcaatacaccagtcagcactctgtgtctagctcaaggtttgtaaacacaccaatcaacaccctgtgtctagctcaaggtttgtaaatgcaccaatcagtgctctgtgtctagctaatctagtggggacctggagaacttgtgtctagctcagggattgtaaacaccaatcagcaccctgtcaaagcagtccaatcagcgctctataaaatgaaccaatcagcaggatgtgggtggggccacataagggaataaaagcaggctgcccgagctagcagtggcaacctgctggggtcctcttccacgctgtggaagctttgtttttcactccttgcagtaaattttgttgctgctcactgtttgggtccgcactgcctttaaatcgcggaggtctgcagcttcactcctgaagccagcgacaccacgaacccaccggtaggagtaaacaactccggacaaactctggatgcgccgccttaaagaactgtaacgctcactgcgagggtctgcggcttcatacttgatgtcagtgagaccaaggaaggaacaaacttcggacgcgccgcctttaagaactgtagcactcaccacgagggtccaggcagcttcgtttttgaagtcagtgagaccaagaacccacaaattccagacacagcactaggtagggtggggcctctggcctgtaggagtgggaggtgaaagggcaggcaaaggggaaatggcggagcccaatcgcggtgcagggcggtgggctttcagcaactcagcttagtcccaagacgcgtgggccgcggcagagaacctgacctgcctgcccaagctaacacaggacccggaaccgcgatcctcaaactaatacaggacttggaaactgctgtcgccaaatggcagcttactttgcggggagcctgttagacgtgactccttgtttttaaaaattgacaaataccagtctgggcaacatagcgaaaccctgtctttactaaaaatgaaaaatattagccgggcgtggtggcgcgggcctgtaatcccagctactcgggaggctgaggcaggagaattgcttgaacccagcgttagcacaaactgcaacattttgtaagctgcccgctattttgcagactttgggcaaagtgaaacatttctggggggtttaggcggtgagaaacatccttcctaaccacttgaccgcaaggccaacagaggcttatctgaagaaacttccctctcatgacttcttgggcaaacgtccaaggaacaccatgatgacatccacctgaataagggccagaacccttattgtacaaatcaatacaaatcatgggaacatcttatcgatatcttgcagggcaacaagccatgctgcccagacccctcccgcccatacctataagtacccttagcctgtaagacttagcagtgggctgtggcattaggctggtcccctacttctgtaggttttgtgctgcacataaagccgcatttgctgtcaagctcgcgctctctagctctgtctcctctctctttctttctcctctgtgtgtgtgtgtgtgtctttctttaaccctcaccttctcttcccggaaggcagagattgcagtgggcagagattacagtgagctgagatctgctactgcactccagcctgggtgacagagtgagaccctgactcaaaaaaaaaaaaaaaaaagcgggggtgtgccaggtgcggtggctcatgcctgtaatcccacaattttgggaggccaaggtgggcagatcacttgaggtcaggagttcaagaccagcctggccaacatggtaaaacccccgactctactaaaaatacaaaagttagccaggtgtcatggtgggcgcctgtaatctcagctacttgggagaccgaggcaggagaatcaattgaatccaggaggtggaggttgcagtaagccaaaattgcaatagtgcactccagcgtgggtgacagagcaagattgtctcaaaaaaaaaattttacaaaatggaaattaaacacaatttttcaccatgtattaatttattgttaaatacacatttcgatgcaaaattgagaatgtgttgtacagtaaattaattaaattaacccaggctgggtgtggtggctcacacctgtaatcacagcactttgggaggctgggtttgagcccagcctggtcaacatggtgaaacctttgtctctactaaaaatataaaaagtagccacgtgtggtggtgcgcgcatgtagtcccagctactcgggaggctgaggcaggggaatcgcttgaaccagggaggcggaggttgcagtgagctgagatcgcaccactgcactccagcttgggtgacagagtgagattccgtctscaaaaaaaaaaaaaaaaaaaaaaagaacctaaatgcagaatatatatgtgtatacacacacatacatattccatttaaacatagttgtatatttttattatcagctgttcagtttttccccagaatggcctaatagaagtccacataaagagtctttttgaatgcatagaattatatattaaagaaacccatggtttcactatcaaataatgttaatttctaatttaraaataaatggttccatgttctggagtcacacacttgatctgtaacttaaatctstcatgtttttattaagatgtatatcatgagcctgtacaaagggatttttggtggtgtaatatcaaccataaaagctagaaacgattcttaaaccaacacacatattgcaagctasgatattattcaatttttgcaatgttctattgataacatgattgcaatatctttcttaagataatgcccaattttcccacagtttgcttgtataataattctaaattcactgtcatattgacttaagagagggtccttaaaaactttktttcctacaggatggtgatgggaatctttgcaaattgtatcttctgtttgaaagtgaagtacttacctcagcagcagaagaaaaagctacaaactgacattaaggaamatggcggaaagttttccttttcgttaaatcctcaggtatttccaagtgtcataaactacagtgtgataaaacattgcgcattcagggaacagggtcatggttagaagaggaagcagagattagcagcaggagagagtgagtgagctactcgaagttcatcaggagagactgacatggcccattgggaggctgggctcctagaggcagargtggcccagccctgtcccctccctgttccctgaactgcaggacaatcctacatgtcctgtgaagcaggatattactagagcacagccaaatatgaaaatagaatttcagaccagccatatctattcttgaaggagaaaagtcatagtgcacaggatttgcaaaaagcgcactgtcgtcactcaccagtatgtcaaygctggggtgatatactggtaagccaggttcctgggtgtagaaagaaatacatgcagtgcagactcatcttcgcagtgtagcttgtgctgtttgttttgttcatttaaaggctgcaggaatttaccttctgcctcttgaacttgtaagcctggcagttcagaataataggattttacagctggatgaaatcttagaaataattcagtttaacctcctcttttttaaaccacctcactgtaaaaatagaaatccaaaggctctaggtgccaggctggcctgcccctgtcctctgctgttccctctgttgacgaattgatgagctgactcaccctgcccctccctggacctcagccctggggcttggccattgtgagcctcatctgttctgtgaagcgtgttcaactccagctgaataccagaaatgcaatgtccctgtttacttccaattcaggtagaattgtatatacttcccttatacagcttcccacactgagctgtctcaccatctctggacagatgagtaattcgtgcctgctctcccttctcagtttgtcttctgtgtgaactgccaacatggtctctcctttttagaaagtcacatactgtgagtgcaactttgtggaagtcaatgtacataaacatgtgaaatgtgcatcccagctactgtagataatgaggcagctgtatatgtaatgttgaggaacaatcaccaagataatttcagtggaaaagccagcacggaagaggctgaggagcacgctgccatgtatctacgcatagtgtagctctagcaggattcgcgaggagcaagtgacagcaggtgcctctgcagagaggaactggggacaacagtggggatgaagttaatacgtcgtcattattttattttttagatattctrcaatgtgaatttactatttattaaaaaataaataaaattataagcgggcatgttggctcatgcctgtaaactcagctgagatgggagaatcrcttgaggctgagagttcaagaccagcctggtcaacatagcaagaccctatctctacaaaaaaaacaagattttctaaaattacaaatcaaaataaataataacctttgaacctccctttccactactaagaaaataattgaacaagtgcacaaggatgtgtacatgaggatagtcatcacagcgttgtttacaataatgaaaatttagaaataacctctagggttaatcaattatggtgcattcgtagccatatyctttaaaaacagttgatttttaaaatgtttatgtaactagaaactgtgatatttatagaggtttttcgaaatttgagaaagattatcacaaactaccttaatactttctaagggtgaaaattacagatacaaatatcttatttaaatgttgtttttcttgatgcataatggattgactctttttttccttagtgcacacatataatcttagataatgctgatgttctgagtcagtaccaactgaattctatccaaaagaaccacgttcatattgcaaacccagattttatatggaaatctatcagrgaaaagagactcttggatgtaaagaattatgatccttataagcccctggacatcacaccacctcctgatcagaaggcgagcagttctggtaggtatttcatagcaagcatttaacgtatcataggtgccatagtacacrcttgggtttgtcaaagataccataggcagagaattgtccagaaatactaaaaaaaaattagacttattacctcagaaaatggacagaaaaataacaaargacaaaagactactttagcactagaaacagatttcttgatatctagcctagtagggtcagactcaaaatggccacaaaacactgatcatctcagaaaacctgattgtgcttttaactagggggaggggaaagcctttgtgttaaacagtgattactacaacctaatgactggaaatttgatgaccagcattttgctgaagaaattctttccaaacaaaagattgtctccccaaaagaaacatattttctttataagccaagattttattttggaaactggccaagaagaaagcctttggacatgaaaaatgcactcttcctgagtcatatcaaaaatcacacagttctgataaatactaactcacagtaagcacacggtatgtgttagataccgtactgacttggcagggtggagcctccttagacaatagtccagaaatgctgctgcagtcccagcacatgtcccagcaaatgatagttacaacagaaataaaatagtagactcatttcacattgaaaacatactgtatgacagccagcataatttattcagattccaaattactacaaatacactgatgatccttggaatcttgacagtataattaaaactggaaagaagtcctcacattgagttattcctgtatatcacaatgctctagatagtgttactgtttctctgtacagaaagtatgaagcaaaagctcatgcagagcccttgactttccctcctctaagctagaacatctccagctccttcgctcgtgatgtgccgactctcaggaactcattctgatcctgtgcactttgtactcttcaagaagaaagtgccaattgaaaattgtatggctatcaatgagtttcaaataataacagatgagaatcctcctgatatgcttattaaaatagaattagagtatrttctccctattttataaggttataccttcctcttttcccactgggttatcctttgatcaccaaaattataactaatttaaggatatatttatgaatcttaacaattccagcacttaggttaactaattatagtaagtctttgggcagtaaacaagtgtgctgtttgcttttaattctagaagtgaaaacagaaggtctatgcccggacagtgccacagaggaggaagacactgtggaactcactgagtaatttacttctttctgattcctgggactctacagagtttgtaaaatcttgtgtaaacctcaagcacagtattaaaattctatttgtagactttttcttattttaatttattttgcatatctaactcaagtgattttttatttgagtctttttcttcaactagtatagtgatcattattttaaattctcagtattaaatgagattgggtgyaattattgaattgatttttaaaaagaaaaccagtgggttttttttttaattcttttaaaaaaaaacctattttcatcctattattttcctgagcagcctttagagtaaagacagtttgttacttttgcctgatgttttcaaaaatggaaataacaacagccttcctcaaatggagtatgggagtctaaagttctatatggtttcttaaagcatacccaaaacatcgggttaattaggcatcacattcaatcttgttgtatttgttaataatagtgtttaaagagaagaaaatccaaaatgaaaagtacagattatgagaagtctgactcctttattttagagaggaatggactgtggtctggagaggagtgacatagcttctaagagtcagatccaaagcaaacacaagtagcccatccccagagtgtgcggcccacttctttctgcctctgccgygtggagaccatcttccagtgcagacgctacagtgctgggtatctgagctggagattatgcagaggaggcatccagctcatttccaatgatcttttaacaatttctgraagagctaaggaggccttagggacttaccatgtggacttaccatgtgttttgtaaggaatctatcatgtattttgtaaagatgtacaagaaaaaatttatgaaattctgtttagcctaaaatccatttaatgttaaaattttaattatacactacaaatttcaggtttggtatgcagaatgttgaaattcctcatcttcctcaagattttgaagttgcaaaatataacaccttggagaaagtaagaatctgatttctagttagcaaaaaaaaaaaaaaacacacctgtttgaatgtcttctgggtgtttttcctattcggtcattttctcattgttttgaaaaattatgcatatcctgaatatcatatagtccttaaaatatgagttaattttatttatatatttatttttgtggagacagaatctcactattttgctggtctcgaactcctgggctcaagccatcctccctccttagcctcccaaagtgctgggattacaagcatgagccactgcacccagacctgatttttaacagtcaagaaaatgtttatgtttagaatttaaagtttaaatttttagtgtttatattataaaagtaatgcatgctcatagcaaaaattttaaacagtataaaatatcaatatggcattaaacataaaagtgctcttccctgttactaacagtttcttgtatttggaaaaggaaggtttgacactaagtatttacactatgttgcgtttccattccttttgcattagaaagaaaaacaaaatcctttttttttttccccacaaatgaaaatcaacactagtgtctgatgtggcatcacttgcctatagtcccagctacttagggggctaaggcaggtggatctcttgagctcaggagtttgaggccaccctgggcaatgtggcaagacctgtctctaaaatatatatatagatataaatcgacactagccttcaaagtgatgttccatttgtattttgagatatgttaataaaatgtaacttgaaaataacatttccctctttgataaggaaaacatgaaaagtggtatggtataaacacacagatctatttatgggatggtaaaaatacaggagggaaacataccaaaatattaatagtgatcgtattgctctcgggattttaggagattttaattttcttyttgatacttttctatattttctaaattatatctctaaatgaacatattttataattrtaatcaacattttcaaatggcacatgtagtttgatgtttcccgagtgcagcttctgaaagcacatcctgttttccaggtgggaatggagggaggccaggaagctgtggtggtggagcttcagtgttcgcgggactccagggactgtcctttcctgatatcctcacacttcctcctggatgatggcatggaggtaatgctgtttatattgattcctatgtgtttactgacctctgttcataactcrtttcaatgaatcagccgacctcccaacctttttcttcttacctgttgtcttagctcaggctgctattaataaatgcaacaggctagggagcttaaacaacatttatttctcacagtgcaaaaagctggaagtccaaggtcaaagtacagcagggttgatttcttctgaagtgaggcctctctctttggcttacagacagctgccttcttgctgtgtcctcacatggtcttccacctgtgggcatctgtgtcctcatctctacacatgaggatagcagtcatattggatcagggcccacccttatgatctcacttaattaatcaattacctcttgaaaggctctgtctccaaacacaatcccgttgttgaggtcctgggagttaggacttcagcatatgcattttgtaggggtacagttcagccataacacctggtaaataattttgcaaaggggaaatgtgttctcttttggagtgtgggaggtgaggacctcaccccctgagtagatcagcacagggtcccgctagaagggaatgtttactgggtgcagggtgtatagcatttctgcccttgttccacatcacttttgggatattttcctaatatttacacctctgaaagcattccactgatatacttcattaagcacctgctgtgtaccaagcaatcgactagggctgacactcaaagataaaaatagcttcacaccctggcgtcagagatcactgtctagaaagaaataacactcatcattacaatccactgtgacatttccaatcctgaatatatatatggggtattgagggctcaaggtcacagagccctgggaacaacaaaggaggctttgcagaggccatacctttgccctaggtcagtatcaggtcaagagcacagttccaatctaaaacaatcatgaaacaaaaataaatttagaattaatgcctgaagttcaaataaaatgctgcaacacccaccaggatgccttctcaagtagacattcagagttacagatctatctttttttttcttctttttccccgagacagagtctcactctgttgcccatgctggagtgcagtggtgcgatctcggctcactgcaacctctgcctcccaggttcaagcgattcttgtgcctcagcctcctgagtagctgggattacaggcatgcgctgccacgcctggctaatttttgtatttttagtagagacggggtttcaccatgttggccaggctggtctcgaactcctgacctcatgatctgcttgccttggcctcccaaagtgctgggattacaggcatgagccactgcgtcctgcctacagctctgtcttgggccaggaaacagtcacttctccgtgagagtggccctcacagaggcccacacaggctccaggagcttttccctttgttcccactctgagtgtcagctcaggtacaagagaaagagactcacgtcaggtggatgtgagatccacttggcttggaagccctaccccacaagagcccatagctcttgtagcattgtctcgggttccagatgccctcaagggacatacccaattatatgagtcactgctctctgacaagcccaaagcttgggtttcccaccattgagcccccagtatcaatgcaatttatcaatgagaggccacaattacataagcaattttgcctactattacagctgacatgccatctttatcagatttccatgggaacagagctagaaagctaatccatggtcaaatgtgtccaagaaggagaaagggttttgttacccttgtaccctgaaatgcatactggattttgtggaggatatagttgtttrggtaagaagtaagtaaaaaygaaggtgaaaaacatgatagaatgtgttattgttttcttcattgagaaagaaaaccatagcatcgtttaggccaggacatccctcagggtgccttcctcccttagcaagcccgagtctgtagagatgatagaatgtgtcgttgttttcttcattgagaaagaaaaccgtagcatcgtgtaggccaggacatccctcagggtgccttcctcccttagcgagcccgagtctgtgtagagcacccctgggtgagcctggtttgctgagcagagaagcctgtccaccttgatagcagtgagcctcagtccaccgttctgctgaagaggattttccagcctgcccttctgcttaataaaaccattttgatgggaatcttccaaaattatgttaaactctaccgtcttaaatggagtgacttcaacaggcactcctattttccaagtttcagaggcatcctgcggcccccctatctgggagggcggcttatgggtatcctgagtagtgtggcttcccaggggtccacacccccaagccaggggctcaaccaacacctacaaggacaccatggctttgagctggggcaggttcttccagattttcctggggttaatgttaggatcactgcctactacagrggcaggagttgcccagaagagcagaaagtgccgcctccacaggcagtttgggatgagggaggagctggagcctttaacatgtgcatgacctaataactttcctgcctgtctactggctgtgatttcattttcgctgtgtgcccgtctctaacagttcttcctttctgaagtatttttcttttcttccccttcccctccagattttttttttctcatttccaaaaagctggaaaaccagatttacaagctagttagactggtttgtaaggagtctgtagacttggaaggaagctttgagtaactctccagtgaaacaaatgatcttttctgtctgctgtgcattctcaagctttttcccctctacctccaggttttaggctattaagagtttaaaattttggtaattctggccaggcatggtggcttacgcctgtaatcctagccctttgggaggccgaggtgggtggatttcttgaggtcaagagttattcaagccaacatggttgaaaccccatctctaccaaaaaaatacaaaaaaaattagccaggtgtggtggcacatgcctgtggtcccagctactcaggaggctgaggcagaagaatcgcttgaacccaggaggtggaggttgcagtgagttgagattgtgctactgcactccagtctgggcgacagagcaagaccctgtctcaaaaaaaaaagaaaaagaaaagaaaaagaatttaaaatttaagtaattctttgaaaaaaactaatttctaagcttcttcatgtcaaggacctaatgctttatttaygttcaataaagctagatatgtaaataatgactgtacttttgctatacaccataattcacagactagaagacagtttgctataaagaaaacctctgaagatgcaagtgaatactwtgaaaattacattgaagaactgaagaaacaaggatttctactaagagaacatttcacacctgaagcaacccaattagcatctgaacaattgcaagcagtgagattgatttataatttttttgttgttgattgaatatttttaatagaaatgttttctctattacaaataaaagactgggccaggcttsgtggctcatgcctgtatcccagcagtttgggaggccaaggcaggaggatcacttgaggccaggagttcaagacyagccttggcaacatagagagacccatttctacgtaaactgaaaaacattacccaggaatggtggtgtacctgtagtcttagctactcatgaggctgaggcaggaggaccacttgaattcagcagttcgaggttacagtgagctatgatcatgccactgcaccccaacctgggcaatacagcaagaccctgtctcaagtaaataaataaatgtcaggagggaagaggaggagttcagaaaaggaaatctgaactcatagaaaggcatggaagttgagtggggaatgtgttttagaacaagmcaggagatgtattgcttatttcagcagcagaccctcccagcttttgggagatgtctttacaacctaggccatgagtcaagggtccttaatcctgacttcgtgtgttgactactactgacaggcctagagcttacagggtgaaggaaaaaaatagaacaggaagaaaagcgggtaggagggaatcagagaagagagaatggaggaagacagagggaggatctagtagagaaaggatttagttacctggctggggatgactctcctgggctctaatcaattatttctcctcacacctctgttcgttggcccatgtaagttttacacaaactcacacatgatgactttttggtggcatttctattttattattgtagttgcttttggaggaagtcatgaattcaagcactctgagccaagaggtgagcgatttagtagagatgatttgggcagaggccctgggccacctggaacacatgcttctcaagccagtgaacaggattagcctcaacgatgtaagttggtgtgtcgctgaaacagaatgtgaaaaatctgcctcctggttgattggcttcagcaataacacgtgtgtttgcatgctggcctgactgctctggaattcattcctaaatgttctttccttgtaccggtactgaagaaagagaccactaacagcactaaggagaaaagcttctgagaaaactagacatccctgtctgtaaaatgtcagcctcaagagctgatcgaaggcaggcttctggtgctggccaattaggaggcctgatcctctgtgccaagaggcttgcaggaagctggagggttatgggtggtcttggtccccagtcagatgccytaaccgcagtccatttcctagtgactccacagtctygcaccttctgtcttaggaaaggcaggcatgcctccagaccacyagaaaatgttcttcccttcttgattaagcataattgcaatgaaaagagcagacaaaagaagataccccaatggtacaacttgtgcaactgcattgttgtattgaaataatatggtcaattttcctctgtggaattaaactaatttatctcaaggagaaaatggctaactgggataaagcccatgaagtacttgtgtaattagaaacacattcaggaggtttttatccctggtctgattctgacagctttctaaatttctcatgtgaaaagcaagtctatcacagttgcattagtgtttctctctctgtgtataggtatgtagatgtgtccacatatgtatagaaatataagactctggttctttcttctagtaaaactgagcctagttttgcaacaatcctcatggcatctttgccacaactgagatacgtctccaataaagatcagcatttgctttgtgaaggctctccagtagaaaatggatagtcttgacatgtctaacaattatttatatagttttgtgcatgctccttaatttctgtattgagatttcattgtaataagcatatrtgatctgttgaaaggtgagcaaggcagaggggattctccttctagtaaaggcagcactgaaaaatggagaaacagcagagcaattgcaaaagatgatgacagagttttacagactgatacctcacaaaggcacaatgcccaaagaagtgaacctgggactattggctaagaaagcagacctctgccaggtaaacctctgaaatatagaattctatttattataaaatatgttgagggtgggggtctttagaaatctgatgaatgaggtaacactgartcatgaaattgtctccagagttgtactagaaaataaattgttgaaccattttagaaagccctggatccttatgaaagttaaaccatattttcaaatgtgaatatgttggcacagtgacataagtgcagaaataggtttaaaattgctatcttgtaaaataacttttcagactctggaatgagttcggatcctctgcaggagaaaggggaaactgcagctgacttaaacgataaggacatttacgttctcagacaataagaagtccagctgtgggctgcctgctggcccaggtcaccccgagactcagtgtgtcagtgttatcagggtcccagcctccttccgtccctctgtacttcctgtagagtgacggctctgctcttagcctggcttcctcgtgatctgcagatggctgcagtagttcatggcatcccatctgtaatagttctttttgtgtcacatagaggaagcccctggcagactcatatttctctggtcagaatgaagtcatgtgcacaatctcaaaccagtcactggtgaggagattggagccactgtggctgctcagaaatgggccatctcctctgagctgccaggagagaagcaggcttagtgagtagaggaaggcagccacagcagccaaccctgccttagactaggctgaagtcactctcttggtccgtgttccctcatctgtgcatgcagggatttggccaagatcagagatttgtgtcctagacttcagaggagtttatagatgtgaaattttgcatgtttgggaaataatcgctttcaacagattcccagaggaatcagtaatccaaaataaggaaagaactggtcaatgagaaaatataagacccttccaaatttaaaattctatgatttacctaacatcaaacataaagagtctgtcagtcgggtgtggtggctcacgcctgtaagcccagcactttgggaggccaaggcagatggatcaccagtcaggagtttgagaccagcctggccaacatggtgaaaccccatctctattaaaaatacaagaagttagctaggcatggtggcatgcacctgtaatcccagttacttaggaggctgaggcaggagaatcgcttgaacccaggaggcagagattgcagtgagtcaagatcatgccactgcactccagcctggtcaacaagagcaaaactccatctaaaaaaaaaaaaaaaatgtcartcatgagtgttgctaagagggaacgtatagtgcccattcaaatacaattctggaggctaaggtaggaggatctmttgaactcagraggttgaggctgcaatgagctatggtcatgccactacactccagcgtgggtgagagcaagacccatctcaaaaataaataaagtaaaacaagctttgggggaaaatggacttttcctatctttttgagaaagtgttaatgtgatataaatattaattttgayatgtggtgattctgacatctgtgtattatttccacctacagctaataagagacatggttaatgtctgtgaaactaatttgtccaaacccaacccaccatccctggccaaataccgagctttgaggtgcaaaattgagcatgttgaacagaatactgaagaatttctcagggttagaaaagaggttttgcagaatcatcacaggtaagcataaaggaaatatctcaggatctgttataatataatgctctttgagactccrttaaagagctaattacagtaattacctagataatcttcagcaacaagccacagtagcggtggtgtgatgacacattactttcttctctgttcagaacggtgcctggggcagttttctgtgcttgaaaacaccctctatattccactscgatttcaaggttacctaatcttgttgagggttaaatttaaaaattttaaaacgtgtttgagtttgtattttgtaggttattacagagaaaaagccacttaaactgatttaaatgtgcaggaatatgggtatggcgtctctaaygtggcctctctgtggcatgaaaaactgcccctgaaaacctggaaaacacgttcctaaataccagttacacttgggccctcattcactgtgcatacccagggtcctgcgctgaggggcattctccagtaacaacaaacatgatggaccacctgctcagatgagcccttgctgggtgtcagcacccctgagggtcaccgtggctgagtctgtgcccagcttctcagtttggaaaccccattgcatgcttgttctcaagcatgggactgactcttttgacctggtggttcattccattgcagcagttcctcttcgtcagcttggcacagcccttagaacaaatggtggtgagttgtagccgcacacaccagcttatgagagccagttgtcaacatttaagagatttggtgagctggttgttaaaccatgggtagcttgaaattggacacggggaggatttgcgccatggaaatcagcaaatgctgcaaatcagggctgtgcgggggcgttgctgctgttgtttagagagctggttttccagagccccactaaaaccacacccagccactcttaccttatggcctgactcagacccatctaaaattatgttctactttcctttatcattctcaaaatccattcccaaaaccacttcacatttactaagatggctatgatttcttttgtttttttattttattttttatttttttgagacggagtctcgctctgtcgcccaggctggagtgcagtgacgcgatctmggctcactgcaagctctgcctcccaggttcacgccattctcctgcctcagccacccccctcagctgggactatagacgcacgccaccacgcctggctaatttttgtatttttagtagagacggggtttcactgctttagccaggatggtcttgatctcctgaccttgtgatctgccagcctcggcctcccaaagtgctgggattacaggcatgagccaccacgcccagccatatgatttctttttaatggaaaattataagtgttggtgaggatatagagagactgaaagcatcacacattgctgatgggagggaaaaatgatgcagcctgcgttagatgattcctcaacaaattaaacttgattacgataagacccagcaattccactcctagttctatactcaaaggaattgaaagcaagtactcaaataggtacttgtacatgaatattcatagcaacactattcacaacagccaaaaggtggttaaataacccaaatgttcatcaacagggaagtggataaacaaaacgtgataaatatatgtaatagaatattattcggccatgaaaaagtaatgaagcactgacacatactacaaatgggtgaacctcaaaaatattacgctgagtgaaagaagccacatattgtacgattctgtttatatgaaatatctagaatagataaatccacggagacagcaaattgtgtggtgccattagagggagggttggggactgacagccaaaaggtacggggttttcttttgggcaaataaaaattttggaactagaggtggtgattacatgacattttgaatgttctgtactaaatactaccaaattgtacacttaatggttaattttatctttttggaatttcactttaatttttaaaaagtccgggccgggcatggtggctcatgcctgtaattccagcactttgggaggccgaggtgggcagatcacttgaggtcaggagtttgagaccagcctgggcaacatggtgaaaccctgtctcaactaaaaatacaaaaattagccgggcatggtggcacacgtttgtggttccagttactccaggggctgaggcacaagaatcgcttgaacccgggaggtggaggttgcagtgagccaggattgcaccactgcactccagcctgggagacagaacaggactctgtctcaaaaacattcattcccacaggccttctccagattttgtttttatatgtaatcaaattcttttggtttgacttttgaccctcccctaggtgtccgctgagatctgtactaagagtccggtgacatggaaggtagaatcrggagggcaataagctttctccaggaagacaggaagagccacgtcaagccccgggagtggcagctgcagttcagccctccagggctacctgagcaagcccttggcgagccaccccaccccctaagtacaaaagcagtcacacagctaaagtgggcttcttcctagggaaagatcctgctgctgtgaaaagttagatttccttcatttcactaatcatgatttctttatattacttttttctagttataaaactcatgttcttttctaaaagcttagaaaatatctaaaaatatgaagaaaattaaaaatcactcaaaatctcaccacccaaagacaaccctgagataatataaccactgttaacatttgggtgtagaacataacccagcctgaatcaccccgatgctgctcacccgggggtgtgctggtaagccagctctgtgaaggaaaagtcctggtctggaatatttgctgagttctgggaagcaaatactcccaccacagctaatgtcaaggtgctgacctgaggccactggacatggggttgggaagatgtgcccttcctcccaccacagctgccctcagccgtacccccgtctcccccaacaactgccccatcttagctacccactcagagccagtgtggggtctctctgtccctcatccccacataaccatgttctgtcaattctgccttcaaagtgtccttcatctgttggctacttccattcactctgccgccatctttaatccagatcctgttatcctgtctacagtgtccttccagatgctcccctctactcctgccccatccaacccatcacaaccagtgaggtcttaaaatagacattttatggtgccacattccaataaatgtcacctcccaagagagtactttcttgacaaccctctctccaaacctgcttggtttcctaaacagcacttaaggtatttgatcactttttttttttttttttgacggagccttgctctgtggccaggctggagtgcaatggcgtgatcttggctcactgcaacctctgcctcccggcttcaagcgattctcctgcctcagcctcctgagtagctgggactacaggtgtgcaccaccatgccctgctaatttttgtatttttagtagggacgaggtttcaccatgttggctaggatggtcttgatctcctgacctcatgatccgcccaccacagcctcccaaagtgctggggttacaggggtgagccaccatgcccggccgataactttcttttctttgagacagagtctcgttctgtcgcccagtctggagtgcagtggcgcgatctcggctcattgcaacctctacaccaccccccgccccgggttcaagtgattctcctgcctcagcctcctgagtagctgagactacaggtgtgcaccaccatgccctgctaatttttgtatttttaggagagacggggtttcaccatgttgcccaggctggtctcaaacttctgggctccagtgatctaactgccttggcctcccagagtgctgggattacaggcctgagccattgcgcccagccagaagttgcattcttttttattgttgttgaaagacatggtcttgctctgttgcccagagcaagaattatatattccatatactattgtttatttgacaaaattgggataatactatgtataaagttttgtaatcttttaaattttatattttactgtatactttactacatatccttatttttgttaaataatatggttattttaatacctacataatacttccaagatatgctgtgctgtgactcattgaatcagtttcctgataatggacatttggactcttttgggatttcttctgctataatgactttttgttttgtttccaattatgtaatctaaaggcttttcttctaattcttacagtaagagcccagtggatgtcttgcagatatttagagttggcagagtgaatgaaaccacagagtttttgagcaaacttggtaatgtgaggcccttgttgcatggttctcctgtacaaaacatcgtgggaatcttgtgtcggtaagagtagccatctttatttttcaaaaatttcaggctcacaaatgtgaagtgttttacttctttttttcctacttttttctatattacgtgagtcttttcagttaaaatcagctagcttactgcattctggagaaaattacacactttataattaagtgtgtaatttaaattacatatttatggccaggcatggtgggtcacacctgtaatcctaatactttgggaggctgaggcagaaggatcacttgaggccaggggttcaagaccagcctggaaaacctagcaagaccttatctctattttgaaaaattatgtatttattatttttaaagtgtagtatataggtatgaattgcttcttgaagactgtatcgtatgaagaaaagtgattctatattcatgagtcttccatgtgtatctaatctagggatagcccaatatttaaagagaagagtccagaaattagagtgtgcatcagacaacatgagttgtttatttgaaacataactctaagattctgtttgctttgaattactacttaatattagggctgaaactgaagtcacaggagcaggagaaaatattgttaaatgtagatccattaattactcagaagaaacttaaaaagaaacatacaagatccacctggggaaaagaaagaaaaaaccaaaaaaccattaaactgctactgagggacccaaaagacaacttgcatgaatcagaaggatgccagtttttcttggattagtctatagatttagtgcaatcatgataaaattaccaataagatttttttaaagaagtgaaaagctgattctacaacatattttttttatattttgaaattaccagaataattctggaaaagaagcacaatgagggtgacattaatattaaacacaaatgaacccaaaaacacagaagatttaggatatgatacaagtagatcttatctctgtggaagaaagacaagttcttcaatactatctatagagataaatgggtaaccacaaggaaaaaatayaaagttggacctttacctcatttctcatactttaactccagacagagcaaatatttaaatatttaaaatcaaaccataaaagtatactaaatgaaaaatgggagaatcttcttaaaataatctttaagtagggatgagctttctaagtaggaccaaaacccaaaagctattttacaaaattcattcaatctcctaatgtgaaattcaaacaatagatgtttatmtaataaaaggcagaaatttcccttgtgtttccrgaaacaaccatggcttcaccctgattgcagagttctctgaatgccagaagttcagtaggaacctgccaaaattctgagcaaggaagagatgcagtcagtgttgggcttacaccttatcctgcccttctcttttcagagggttgcttttacccaaagtagtggaagatygtggtgtgcaaagaacagacgtcggaaaccttggaagtgggatttatttcagtgattcgctcaggtatgttcgatccttaatcacagaatcgttactgaatacttgctgtgtattttcttctgtctttccttggtgagggagtttctcaaccaaaacacagatttatctattatatatgacctcaatgtggctggaatactatttcatcttcagcatccttgataatgtttaaatctgcccttatgccagacatggtggctcgtgcctgtactcccagctcttttggaggccagggtgggaggatcacttgagcccaggagtttaagaccagcctatgcagcatagcaagaccctatctctacaaaaaaattaaaaaattagccgtgcatggtggcgctaatagaacctatagttctagctactggggaggctgaggcaggaggatcacttgagtccaggaattcaaggctggagtgagctatgattatgtcactgcagtccagcttgggcaacacagtgagaagaaccccatgtacatcatctgccaacctcataattggtattgtgacatcatttaatgcaaggaaacagactcagggaggtcagggaacttgcctaaggttgcagagctaattaaaggatggagactgagttcaggcccaggacaaaggataatgatccaagatatttaaagagttcctacaaatcaataaggaaaagataaacaaccctataagcagatgtgcaaaagacttaaatagaaacctaatagcaaagaagacgagctggggccaggcgcagtagctcatgcctgtaatcccagcactttgggaggccaaggcaggtagatcacttgaggccaggagttcgagaccagcctggccaatgtggcgaaaccccatctctaataaaaatacaaaaattagctgggcgtggtggtgtgcacctgtagtcccagctactcaagagggtgaggcaggagactggcttgaacctaggaggcagagattgcagtgagctgagatggtgccactgcactccagcctgggtgacaagagcaagattctgtctcaaaaaatgagctgagtgcagtggcacacacctgtagtcccagctactcaggagtttgaggcagaaagattgcttgagtccaggaggttgagattagcctaggcaacacaacaagaccccatctctaaaaaaaactttttttttttttttttgagacggagtctcgctctgtcgcccaggccggactgcggactgcagtggcacaatctcggctcactgcaagctccgcttcccgggttcacgccattctcctgcctcagcctcccgagtagctgggattacaggtgcccaccaccgcgcctggctaattttttgtatttttagtagagacggggtttcaccttgttagccaggatggtctcgatctcctgacctcatgatccacccgcctcggcctcccaaagtgctgggattacaggcgtgagccaccgcgcccggccaaaaaaaactttttaaaattagccaggcattgtgtcacacacctgtaatcaaagctactcaggaggctgaggcaggaggactgcttgagcccagcagtccaaggccacagtgaggtatgactgaaccactacatccagcttgggagacaaagcgagacccaatctcttaaaaaaaaaaaagaaaagaagaaaaaaagagcactgtagtaacagaacactggaaatcatgcagatgtccatcgacagtggaatggatccgtacattttggtggagtcctacatgaagtcctgtccttcagttgaaacaagtggactgtggctacacatgtcaaatggatgagccttaggaccttagtggatgaaaagttattagatgattccttatacaggcataccttggagatattgagggtttggttccacactactgcaatatagcaaatactgcaataaagtgagtcacacacatttttggtttcccaatgagtataagaggtttacactctagtctattaaagtgtgcaatagcattgtgtttaaaaaaaaacaatgtacataaccttaattttaacttactttattactaaaaatcctaacgatcatctaagccttcagtgagccattgtctttttgccggtggaaggtctcgtgtcaatgtctatggctgctgactgattagggtggtggttgctgaaagttgaggtggctgtggcaatttcttaaaataagacaacaatgaagtttgcctcagcaattgactcttcctttcatgaaagatttatctgtagtatgagatgctatttgatagcatttacctaaagtagaacttccttgaaaattggagtcaattatctcaaacactgctgctgctttgtccactaagtttatgtgatattcaaaatcctttgttgtcagttcaacagtgttcacaacatcttcaccaggaatggattccatctcaagaaaccactttcttcactcataagaagcaactcctcattctttcaagtttgatcatgagattgcagcaattcagtcccatcttcaggctccaattgtaattctagttctcctgctgcttctgccacatctacagtgactttcttcactgaagtttgaacccctcaaagtcacccaagatagttagagtaaacttcttccaaacccctgttaatactgataggctgacctcctcccataattcatcaaatgctcttaagggcaaggagaatagcaaatcctttccagaaggttttcaatttacttcgtccagatccatcagaggaatcactgtctatggcagctatagccttacaaaatgtatttttttctttttagagttggggtcttgatccattattgcccaggtgagagtacagtaagatgcaaccatagccatagctccctggaacctcaaactgctgaactcaagtgatcatcccacctcagactcctgggattacaggcatacctggccaaaatgtatttctttctttctttttttcttttttgagatggagtttgctcttgttgcccaggctggagtgcaatggtgtgatcttggctcactgcaacctccgcctcctgggttcaagcgattcttctgtctcagcctcttgagtagctgggattacaggcgcatgccaccacgcctggctaatttttgtatttttagtagagatagggtttcatcatattgggcaggctggtctcgaactcctgacctcaggtgatctgcctgccttggcctcccaaagtgctgggattataggcatgagccaccacgcccagcccaaaatgtatttcttaaataataagacttgaaagctgaaattactccttgatccatggctgcagattgtaagttgtgttagcaggcatgaaaacaacaaattccttgtacctctccatcagagctcctggatggctaggcgctttgccagtgagcagtcatattttgaaaagaaccttttttgttgagcagtagatctatacattgggcttaaaattcagtaaaccattctgtaaacagatgtgctgtcatccaggttttgtcgttccatttgtagagcacagaaagagtagatttagcgcaattcttaagggccctaggatttttggaatggtaagtgagcactggcttcagcttatagtcaccagctgcattagcccctgacaagagtcagcctgtcgtctgaagctttgcagccagccattgacttctctccggctgtggaagtcctagatggcattttcttccaatagaaggctgttttgtctacatggaaaatctgttgtgtggtgaagccacctgcatcaatgatcttagctagatcttctggagaacttgctgcagcttctacatcagcactggctggttcatcttccattgttacgttatagagatggcttctttccttaaacctcagccaacctctgctagcttcaggccttctttctgcagtttcctcacctctctgagccttcatagaattgaacagagttggggccttgctctggattaggctttggcttaagagaatgctgtggctggtttgatcttctatccagaccattaacattttcttcatatcagcaataaggctgttttgctttgttatcattcctatgttcactggagcagcacttttaatttccttcaaaaattgtttctttacattcaccacttggataactgccacaagaggcctagctttcagcctgtcttggttttcaacatgccttcctcaccaagcctaatcatttctagcttttaatttaaagtgaaagatgtacaaccctttctttcacttgaacacttagaggccgctgtagggttattattaattggcctaatttcaatattgttgtatctcagggaatagggaggccagagaaggaggagagagatgagggaaccactggtcagtggagcagtcagaacacacaaaacatttgccaagcccaccaccttgtatgggcacagattgttgcagcccaaaacaattgcaatagtaatgcatccagaattggtgggttcttggtctcactgacttcaagaatgaagccgcggaccctcgcggtgagtgttacagttcctaaaggcggcgtgtccagagtttgttccttctgatgttcagatgtgttcggagtttcttccttctggtgggttcgtggtctcgctggctcaggagtgaagctgcagaccttcgcagtgagtgttacagctcttaaggcggcgcatctggagttgttcgttcctcccattgggctcgtggtctcgcgggcttcaggagtgaagctgcagaccttcgtggtgagtgttacagctcatagaggcagtgtggacccaaagagtgagcagtagcaagatttattgcaaagagcgaaagaacaaagcttccacagtgcggaagaggaccagagcgggttgccactgctggctggggcagcctgcttttattctcttatctggcaccacccacatcctgctgattggtagagtagggtggtctgttttgacagggcgctgattggtgcgtttacaatccctgagctagacacaaaggttctccacctccccaccagattagctagacacagagtgtccacacaaaggttctccaaggccccaccagagtagctagatacagagtgtcgattggtgcactcacaaaccctgagctagacacagggtgctgattggtgtgtttacaatccctgagctagacataaaggttctccacgtccccaccagactcaggagcccagctgggccccctttgccagaacgtggtgagataggaaggaatagagagagctccagggagaagtccagagtggggtttaatgagaaggaagaaagcatgcttgtaagttgcaggaaaagagccctccaaaggggagaggattttagaaggaatgggggaactgattttttttttcagtaggtgaaacaaagaagggtcgtctggccatacttcggcattttgaacttaatctttaaaaaatagagatgcgtctccaaaatgttgtgtccaaaggtgtgtcctagtctgtgctcctaatagcaagagttgccttattaaagctgctgattcccaaagaaagataaaacaacatttctcatttggatataatttgaaatgtttgtttttcctttcaggaggctttgtgagagcttgtctttccctttgaccagttcttactcacttggtacccacggttcttattcctttctgagctttagtgcagagaattaaatctactttttcctaattaataaggtggtgatttttccttctctttaccaccctggtatttatgatagtaaaatgtgtatattttagtagctaacaragatttaggagaacagtagaattcatttctctctggaaacaaagtgctttgagcactgcctagcacaacataagggcagtatacatatttgtcacatagaaatgcgaaataggccaggcatggttgctcatgcctgtaatcccagcactttgggaggctgaggagggaggatcacttgagcccaggagttcgagaccagcctgggaaacatagtgagaccccatcttagcagaaaattttaaaagttagctaggtgtggtgcacatctatagtcccagctactcaggaggctgaggcaggaggatcagttgagcccaggagttggagactgcaataagctatgatcatgccactgcacyctagcctgagtaacagagcaaaattctgtctaaaaaaaaagaagaaatattaaataaataagtgcataataaagttctaaattgagtctttggagatatttcaataataggaaaatttagaacagtttaccaggaaagtcttttcaatagtatgttattgacaagtcactctaagctgtaaatatgtgtttatttcctttcgcatgtagtacaagtatcaagtactcacaccygggagagacagatggcaccagactcctgctcatttgtgacgtagccctcggaaagtgtatggacttacatgagaaggacttttccttaactgaagcaccaccaggctacgacagtgtgcatggagtttcrcaaacagcctctgtcaccacagactttgaggtatttttatttcaaggaagaagcaaagagggtcttgaatgctcaaagaaaggccttagttttttgctcctattttcattaaatatgcttaagtttaaataattgttatatatttactgcatgaattaattcaacattttctaaattagcaaacatgcttttatgaaaacatctgccaatacaggttttttgttgcttctgttgttaatcacctactgatttctgtttgctctaggatgatgaatttgttgtctataaaaccaatcaggttaaaatgaaatatattattaaattttccatgcctggagatcagataaaggactttcatcctagtgatcatactgaattagaggaatacagacctgagttttcaaatttttcaaaggttgaaggtaggacaattttcttgaatgctgttttatgttattatatttatagacctcaaatgttatattttcaatggaatgtatatttgcatttgttatatctatgacctcatccataagtatttcgtttcctttcaatctcaaaattgtttcccacaaatttctctcagtgttaacatcagtcaaacccctctgcctagtatcaaaataaagcacttaattttaaaatatatatatttcttttttttttgagacagggtctcactctgtcccccaggctggagtacagtgtgtgatcaaagtgcactgcagcctcaaactcctgggtttcaaatgatcctcctgactcagcctcctgagtagctaggactaccatccgtgacttttttttttagagacaaattctcactatgttgcctaggctggcctgaaattcctggcattaagcgatcctcctgccttggtatcccaaaatgctgggattacagatatgagccaccatggccagcctcatttccttttttatcttgcgtacataacaactaggatgattgagaaattccatgtgacttcattaacacactgaagttgagcttattcgcttcaggaatagccaaggctaaaacctgtggaaccttgctaagatgtcatggtgcagaaagtgtaatggggtggggagagcagacagcagagccgctgtagagccaggaagcccagggtttgagtgtcgccctgccaccttgcagttttgaaactgcatgaccttttgcgctccaccttctctccgatgggaatgagagcagtacccgcatgacagaattgctgtaagggctgaaggggaaattgaaggcactgagtaaattgccatgtgtggtgcgtgtgttagccatagtagtgcgagcatacaagaggatattcacttctcagagtatcatgaggccaaacaattacagtattaattagtaggactgtaagaacacattaacatttttgaccatgctcaaattattttttgtcagaaacgcatgagttcatgtgtgttcaggggtgactccagttttttctctgggagtcattaagtgaaatatctggcaagacaatatgtatttatatttcctaaccttatctgtatgtttgtgccacttagaataggatgtgtacatttttcaatatgctgccataggagttgattcagtcttccttggattgaaaatctacgttgtttgatgccatcccaaaatgcttgtgtggcaccataaataatagtgaccgagcccttccacactataagccagggaatgcagacacctggattcaggcttcagccacacttcagacagtctgaagacctctgtgtatttgtgtgtatgtttaaatgtatgtcaagtaatgctgtgttttcaggaggacaccccacagtctctacattaaaaaggcagaagagcacatgtctgtagtcgcagctactcgagaggctaaggcaggaggattacttgagcacaggagttcaaaaccagcctgggcaacatagtgaaactccaatctctaccaaagaaaaaaaaaagaaaagaagaaaaaaaaatttaagctgaagggtctttaaaaaacaaaaaaaaaggcaggccaggtgtagtgtctcacgcccatagtcccagcactttgggaggtcaaggcaggtagatcccttgagtccaggagttcaagaccagcctggacaacatggctaaacctcatctctacaaaaaataccaaaaaattagctgggcattgtggtgcatgcctatagtcccagctactcgggaggctgagacaggaggatcacctgagccagagaggaggggtctactgtgagcagagattgtgccactgcactcccacttgggtgacagagtgacatgctatctcaaaaaaaaaaaggcagaaggcacctctcatttttctcatgtgggttcacttgcttttcagaattggctattgaaaatcataaaatgctatttgcccattttccctaaaataaaatgcatgaaggcttgaagaaggaataaagatcaagataacaaaaatagacagggatggttttgaaagctaatagtaacatttttaacgtttagattaccagttaccagatgccaaaacttccagcagcaccaaggccggcctccaggatgcctctgggaacttggttcctctggaggatgtccacatcaaagggagaatcatagacactgtagcccaggtatgttgtctgtggctttatgacacttaaactacatggatgtaaaccatacatgagaatttgattgcagttgcatgaactgaagggaatagatagatttctaaaatgtattttattcaagagatattcactgagcactccaygccagggactagctaggctctgagcatccagcagtgcacaatacaaaagctctgcccttgtggagcacacactgtgtgggggagtaggcaataatcatgatgaaagagtgaaacacataacatgtyaggtggtgacaggtgctaaagagaaaaaggaaagcaggaggagctgctttcacagataggagctgtgaaagacaggggctttgaacctgtaaacagaatggccatggaggcctccctgagaaggtgacatctgcatacagacctgaaggaagtgggggctaaactgtgtggacgtcaggggatgcttattccaggcagcgggaacatcacatgccaaggctcagaggtaggaaggaggctgatctggcccaggcgcgccaaggagatgcactgtggctgcagtggggtggaaaggggagagtgcatggggactgagtcagagaggtgaggggctctcacatcagcacacaggtcatgctgtccttgactctgagtgaaatggaagcttctagatgtttggcagaggaatgacatgaacagacctgttttaaccagctcactctggccaccatgttgggaacagtaggaagaggcccagtgggagaaatgttaggtcaagttccctagaaagcagactctggatggaatttgttttcaggaagcctgtgggactgtgcctgcrggagccgcacctgtgagggagtgagggaggcaggacgtggccgaggagacaacagagtcctcagatgatcttgggggaagctctgggccagagtggtccttgagagaaggtctgaatcaaggcaagggggccgggctttgtagccccactggggccagtcctgggatgtgggctgctccrgggaggggtcagaaccttggctaaggcagtttgtctttggctgaggayggttcctggggaggcgccccacaggtgacactcctagcagtctcagccctgaaggggacacagcrggcccaacgtcacatcacatagaggagacgattgacaattcagttaagggacctggtgatgtggagaagaaggtttgcagtgggggtgtaggaagtgatggagtccgccaaggcctgagagcagagccaatcagatttgctggtggggacgggacacaagagaaagacagcggcccaggaagacagcagagtgtttgccctgaataactagaaggatcatgtttgcacttactagaatggtcaaagtcacaggagggcaggttrggggccatcaggagtttatctttggccacgtaggtcttgtgactacataggaccagggaggagacccmagttggacttataagtggggagtcagcagcattcacatagtgtttaaagtcatgagcccagattaaacacccagagaatcagtagagcacagaggccaacgtggagacgtaggggaggaggctgagtcagccacagagaccaggagggagcggctgtggagacacacgaggacagctgaacagggaggggaggctggtgggtctcatgaataacaacccagccctgatcactggatttagcaatgagattgttggtgacctttgccttttgatggtgtggtgggggtgaaaggctgatcagagtgagttcaagagggaatgggaggaagaactgggagacagaggagagaagatgagacagcagctgaagagaagtggggttgagtattttctttctcattttaagatgcaagaaacaacagcatgtgtgggagtcagcgcaggagggaaacctggcgacctgggagaggggaattgctggaactgcttccttctctatacccttctctatgttttattgcataaataggaaacattgttgaaaagactttcckggtaaactgttctgaattttacgtttatcgaaatatctccaaagactcaatttagaactttmttatgcccttatttatttaacatttctwtgtaacaaacatgtatattgcccttatgttgtgccaggcagtgctcaaagcactttcttcccagagagagatgaattctactgttctcccaaacctttgttagctactaaaatatacacattttgctatcataaataccagggtggtggccggtgcggtggttcatgcctgtaatcccaggacgttgggagggaggctgaggyaggaggattgcttcagctcaggagttccagaccagcctggggaacatggagaaaccccatctctacaaaaattggctgagcgcagtggcgtacacctgtagtcccatctacttgggaggtcgagatgggaggatggcttgccattactagaatgggcaaagtcacaggagggcaggttggaggaggcagaggttgcaatgagccaagatcgcaccactgcactccaacctgggtgatagagtgagaccctgtctcaaaaaaaaaaaaaaaaaaaaaactcagggtgttgaaagagaaggagaaaatcccaccttattaaattatctgcactgaagctcagaaagagcattaaataccaagtgagtaagaactggtcaaagcaaaagacaagcatcacaggagggttatctaatgcrggtgctggggccgcagccaggagctcgcagcaggttcatcatccacagtcacaggatggaaggcagcgtttcaggggtgccaagtggccagatgcagtggtagagcttggaaagttaagtttttggttttctaaaattgaattggtttgctaagatttggcctcatgatcagcttctgactctgaagattgcattgaacaaccataaaggcctttkaggagattaagaaygttcaagtacagtgccatgatgttctgatccctgtagaggaaaattagttccatttcagtgatcaccttaatctggggagacggggcgttgggtgagaagagcagtttggatatagctgacctccacccctgggcccactctgacccatacrcacatcctcaaggcagctcagagcaamgtcatagactttgaaaagacccagctgtgggctcatgggacatgttccatttccaccaatccctttggcaccacttaggatctgtaaacataatggttaccatttcctaagagtcaggccctcagccgagttttccacatgcagtacttaattctctcagactccatgccaagtgctataattatgcccattgtttggaagaagaagctgaggcccagagacaaacaatatgataaagcccaaatttgaactcagatcattctgattccagcgtccagattcttaaccagtacaccatagtgcagcatggtagatcatacaaagcaaaggatccrgagtttgtaaggcttagctttgaattcttgtttattctttctagtgctgtgagtttgggaaagttacttaactcttttgcctcgttttcctcatgtgtaaaatggaaataataatatctgcccatcagtgtagtggctattcaatctaataaatataaaggacttagggcattgtttttgtgtgcamaacaaattatgacgaggttacagggagaggcgtgtgtcctccatgccttacttgggattagatgacttgtaccatttgatatttcaaacccgaagaggcctgttccctggggaagtttgccccaaaataactcgatttagcagtgaatttctcactcattttwtgatgaaacagccagactgtagatttagcttgagtatccaagcagaggctggggtgtagattcttatatgtgcatggctcatacattttgacccttcttggaataaattgatgatgttaagcttagttacatcatggttttatctaatggaagaaaattaagatgtcaaaatttgttacattrtattagtttctgttctaaggcctggtaaaaatacttttattrtcgttatctaaaattattgacctttgtgagtgcccagccacacagtgtgatatgmaaagagagtgcagctgccacmggcctgatgtctggggactcctgcgcaaaggcgggcctgctaactagaacaggcaggaaggctactgagtaggaagaaacattagtctacaccaagtacaattagatagtgatcctgatcatcaaactcagggcaagcatacatgcctttgagggtttcgtaaaactgaggaaatccaagacaggatgagaaggagttccgtgcacrgtcaaggggacagtgtctgacgtccccccagtcagtactaggtgggccccagtcctggtgcctcctcaccaggcacactctaagcagtcaytgcaggcagcatagcccagatcgctgagaaactccaggaygcacgtttgcctcctcttgggtggctggccagaccgggattccaggaatcctacccactggccagcaaggtgttcatttgcaggatggcaagagattctgtctcyaggacggtgctgacctgctgatttggggagactcaaattgctcatattaacaaggactccttgaaaaattttgcctggcaccctacacaccctaggggcagccaagcttgcagcaaatccaggtgtggacaatgttttcaaataagttagattttttttttaaatttttcattttggtgtcttccctggattattgattacagatcattaaatatttttgccttattattgtcacatgtttaaaatcttactgtttattgtatgtctgaggagttttttcttaattttcaaatatttaaagcctcccgccttttcctgagtgagggagtgatgaaaacagtctgttggaaagattaattagataatagagacaacagagagtagtggagaagacttgattctggaagaaccaacgcacacagagatgaggagctagatgagggctgtgtagagagggggaaagccacagagaggtccccaggaggaaaggccaagtcctgagagctgataggatagaaggactattctggaatcrtttccagccaacatggcacgaaggaggcatcaaagcccacaaaacgaaaggggcaattttccagctgtcttaacaagagctatattgcgtctgctaagtcagtgttggtaagacttcaggtggcttctattccagtcagacatgaatgaaccacctaaccgtgggactggtgcattttatcacatgacatgggctctccattgcagaagtgaagccagggttgggaatttgagggacgtgatacaaattcaaggaaattcaaataaatatgcaaaatcattttcgttcgtccttgttcctgcaaatgtagtccatgtggtctcatcaattgtatggattttttttcttcttcaggtcattgtttttcagacatacacaaataaaagtcacgtgcccattgaggcaaaatatatctttcctttggatgacaaggcygctgtgtgtggcttcgaagccttcatcaatgggaagcacatagttggagaggtaaggcaagaagatgcatcgtgcccgctctcggctttcaaagtcagcttccatttcccagaacctttgtttttggagtccccatggctacaaggttgagtagcagccttatcataaaacgagaatattctttgargaatcagttcttgcrcagtgagcctccctcaagcatccctccgtgatgaagggtttctacccccatctgtccagtcttcatcttcagtgtcttgcacattctttgccttggcaccgtaagagtgatttcagtatgaaaagttaaagagggccgggtgcagtggctcatccctgtaatcccagcacttcaggaggctgaggcaggtggatcacttgaggtcaggggttcgagctgaaatgaaagctattgtaactttctaaaaaaaaagaaaagaaacaacagttgattaattctttgtttattgtaaggattagtccacagttacaattagaaactacaatttcccaaatttaaagtaattattatgttttgttccacataaactcccaaccagaaaaatttttttcactattgattctgaaatattttgatcccaactgaaagagacttctctttagttggccttttctggttcaagttcttatcagataagtatatttcgatgatcacttyatttaagtttccattcaycttagactcagtttttagtttttgcctgggttttagtaaacattgatgttgttttcttcattaaagcctgaagtcactcttcatgtaaggaatgatttaaaactcatcttttccagattaaagagaaggaagaagcccagcaagagtacctagaagccgtgacccagggccatggcgcttacctgatgagtcaggatgctccggtatggcttggtgtgcatgccgcatgcatacwggagagggaaagagagttagaacaagatatgaaatacgaatttcatgctagaggctaagataatttgcactgttgtaggccccagagttccacttgstctragtaaggggaagccacgccagtcagacccatttgacttaacaaaggaggaaacagyrtcagtagttccagacaaacaagaagagctaggcctgtcattgggaactgagtttcccagaaggaatgacagacaaaaagataacatttgaggtatataactttcatcttctgataagagtgtgatatactggctgggcgcaatgrcttatgcctgtaatcccagcactttgggaggctgaggtgggcakatcacctgaggtcaggaatttgagaccagcctggccaacatggtgaaaccccctcttactaaaagtacaaaaattagctgggcatggtggcaggtacctgtaatcccagctactggagaggctgcagcaggagaatcgcttgaacctggggggcagaggttgcagtgagccaaaattgtgccattgcactccagcctgggcaacaagagcgaaactccatctcaaaaaaaaaaaaaaaaaaaaaggagtgtgatatatttacaattttcctgaagtaagctcacctagcagatggtccaatcataaagcagggaggcatttctgccgggtcctccttgggccagctcctgtgcttttaggtgattagctttagcagggacgtgacgtggacagcgtggaagagggaatagctggcaggtccactagactactttccttaaataccaggtgttttcacgaggcctctggcaggtgctagattgtgtgtagtcagcgtctaactctagtgcaggtattttagttattcttgcagatggggccatatgtttgagtatcgcctctgagggtgacacrtggccatggtgttttgaaaatttaatgtttgctggggctaggggcacattcaagattaatatagatcaaaggggtaaattattgctcttgacatctaagatatccacctgyaggatgggaataagtaatgaagaggtgattattgaacagttaagaatgctggctctatrtatggccaaactgtatgtatagaagcctggggttcatttgagaggctgccacttaatattatcaggttatcctcctacgtgtgttggtaaatgtttcctccttaatacytacatatttccctaggaatakggtccacaagaaaacagccttcacaraaggtattacctatgggtaaagtctgatcagaactattgctaacccaagccttcaggtctcccagaatgtattgacatcttgtgactataatgttctcatatcataatatatggtattcatgcgttgttatataaatgccatatataccaggtgcagtggctcatacctgtaatcccagcacttttggaggccaaggcgggaggatcacttgagcccaggagttcgaggctgcagtgagctctgataataccactacacaccaacctgggcaacagagcaagattctgtctctaaacaaacaaacaagtcttagcttaggaatccctccatctaagcttttcctgccttcccccggaaagacccatggcttcattttcccatggcaacctggacatatttgtcttataactcttaatatactgtttgtaaagatagaggtctagctcgtaatccccaatatttaagtgtggaagtaacagaaaaggatagttagtggtacaataaagagaaaattgtggtgccgaaaccaaggatgaagacagtgcccagcctaggaygacttatgtcctcctcattgccagattaaatggcagtgtttccaagacttcaatttatgtgaccatttgatggttttctccttttcaaaacatctagactgactgacttgtcactataaccctatactacttagatagcrtactgttgaattttgctgctttatccaatctgkgagtttctgcactttgtattgtttaggtcatttttatttaatacaattactgatctggtcagatttatatctaccatcttgctagttgttttctatttgtaccatttgttctttgttcctttccctcgcttttcctgctttctcttgtattgttttttaaatgattccattgtatctccattattggcttattaattttatcttttttttttttttttttgagacagagtctcactgttgcccaggctggagtgcagtggcgtgattttggctcactgcaacctaacctctgcctcccagtttgagcgattctcctgccccagcctcccaagtagctaggactaaaggcacataccaccacacccagctaatttttgtatttttagtagagatggggtttcaccatgttggccaggctggtctcaaaccgctaacctcaagtgattctcctgcctctgcctcccaaagtgctgagattacagacgtgagccactgcgcccagccagttctctctctcttaaaaagttttgattgttggccaggtgtggtagctcatacctgtaatcctaacactttgggaggctgagatagatggatcacctgagcccaggagttcaagaccccttgggcaacatggtgaaaccccagatctacaaaaaatacaaawattagctgggtgtggtgatgcatgcctgtagtcccrgctacttgaggggctgagttgggaggatcacttgagcctgagaggtggaggctgcaatgagccataatggcgccactgcacagcctgggcaacaaagcgagaccctgtctcaaaaaataaaaaaattaagttttgattgttgctctaaagccacatgttaaatatgtgttaaatatggtagccactaattacatgtgtatatttacatttaaatataaaataaaatgttttatgtggccagtggctatcttattacttagtgcatatgtagagcatttttatcatcatagaaagttacattggtcmrcactgctttagggtttactactayatacatctgtaacttaccacatacagcctacaatattatactacttcatatgtaagaaccttacaaccagaatacattacattacaaccagtatacgttcgtttcttttttcccatatcctttgtgatattgttgtcgtgtgttttatttcttcatatattataaattctacaatgtgttgttatatattcaactatctttttttttttaaagttctgggatacatgtgcaagacatgcaggtttgttacataggcaaatgtgtgccatggtggtttgctgcacctatcaacccatcacccagatattaagccccacatgcattagctatttatcctgatgctctccctctccctgcctccgctacaggccccagtgtatgttgtttccctccctgtgtccatgtgttctcattgttcagctcccacstgtaagtaagaacatcctgtgttcagttttctgttcctgtgttagtttgtgaggataatggcttccagcttcattcatgtccctgcaaaggacatggtctkcatggtattccatggtacatatgtaccacattttctttatccagtctatcattgatgggcatttggattgattccatgtctttgctattgtgaatagtgctgcaaygaacatacacatgcatgtatctttataatggaatgatttatattcctttgggtatatacccagtaatgggattggtgggtcaaatggtatttctggttctaggtctttgaggragacccacactgtcttccacaatggttgaactaatttacactcccaccaacagagtaaaagcattcctatttctccacagccttgccagaatctgttgtttcttgattttttaacyatcgccattctgactggcatgagatggtgtctcatcgtggttttgatttgcatttctctaatratcggtgatgtttagctttttttcatatttttttgccacataaatgtcttcttttgagaagtgtctgttcatgtcctttgcccactttttaatggggtttttttttcttgtaaatttgtttaagttccttgtagattctggatattagaccttcatcagatggatagattgcaaaaattttctctcattctctaggttgtctggtcgctctgctgatagtttcttttgctgtgcagaagctctttagtttaattagatcccatttgtcaatttttgcttttgctgcaatttttgatgttttcctcataaaatctttgacygtgcctatgtcctgaatggtattgcctagattttcttctagagtttttatagtttttggttttatatttaagtctttagtccgtatcgagttattttttgtgtaagtttaaggaaggggtccagttttaattttctgcatatggctagccagttttcccagcaccattcattaaatagggaatcttttccccattgcttgtttttgtcaggtttgttgaagatcagacagttgtagatgtgtggtgttacttctgagatctctattctgttccattggtctatgtgtctatttttgtaccagtaccatgctgttttgattactgtagccttgtagtayagtgtgaagtctggtagtgtgatgcctccagctttgttctttttgcttaggattgtcttggctctacaggctcttttttggttccatatgaattttaacctagttttttctaattctgtgaagaatgtcaatggtagtttaataggagtagcattgaagctatacattactttgggcagtatgggcattttcacgatattgattcttcctatccatgagcatggaatgtttttccatttgttcgtgtcctctctgatttccttgagcagtggtttatagttctccttgaagaggtccttcamttcccttgctagctgtattcctatgtattttattctctttgtagcaattgtgaatgggagttcattcatgatttggctctctgcttgtctgttgttggtgtataggaatgcttgtgacttttgcacatttattttgtatcctgagattttgctgaagtagcttatcagcttaagaggcttttgggctgagacgatggggttttctagatataggatcttgtcatctgcaaacagaggtagtttgacttcctctcttcctattcaaataacctttatttctttatcttgactgagtgccctggccggaacttccaatactatattgaataggagtggtgagagagggcatccttgtcttgtgctggttttcaaggggaatgcttccagcttttgcccattcagtatgatattggatgtgggtttgtcattaatggctcttattattttgaaatatgttccatcaataactagtttactgagagtttttaacataaagcaatgttgaattgtattaaaggccttttctgtgtctattgagataatcatgtggcttttgtctttagttctgtttatgtgatgatcaactatattttaaagcaattaaaaataaggggaaatgtctctacatttattcacatttttaccgtttctggtgctcttcatttctttctatagatacaaagaaatcttccttctgcttgaagagttttctttattttctttttctagcrcaagtgtgctagcaargagtgcattcctcttttatctaacaaagtctttcaccttcatttttgaaagatattttttgctgagtatgggattctaggtgacagtttatttgttttcctttcagcattttaaatatgttaactkcattgtcttctggcttatatggtttctgagcagaagtcagctctaattcttgtgttgttcatctatatgtgaaggtgtctttttttgtcaagctatcttcaagattctctttatctttggttttcagtggtttgactatgatgtgtttatgttattttttaaatttattgcttattttgcttggagttctctgagtttggattgtctcacattcattttgggacagtcttgatctttatctattgaaatatttcttctccctcattctctctctttctccttctgagacttcaatacatatacattagaccgtatttgatattgcagcacagcttttggagctctatgttttcactttcatttcttgttgcattttattttggataatttctattgacctagcttcaagttcattcattcttttctcagctattgtcagtcagctgataggcttgtcaaattcttcaactttgataatgtgtttgtttctagcatttttgacacttaaaatataattcagtctctctaatgaaaggttccatctattcatatgtattcctcaccttttctgtatgtcttttcatatattaatcatagtcctgtctgttgcagtgtcatggtcatctctgaatctgcctgttaattgctttatcttgacattgggtcattttttccttgctttttaaaaatgtgtatattttggaatttgtgattraatgttggacattgtgtgtaaaagaagaagagagactgaaataaatgacatttatgcccagaagtggcaactcctgttctttcaggttagtgtaggggttgaagagttgagtttgagttctgctgttgttatcattactctctgttgttattattactctccgtctcaaattcctccagtggtggactgccactacctgtgcctcttgggttctggatccggaacaattctcactgaggttcattctctgcccccagctttcagcagactctgcacactgtccgacagaggtgattacagcaactcttcccctcccgcagtgctaggctgctgttgcttgatgtgctgtactaggctcctggtggggcaggggcattcttctggttcagcctcagtcttaggcagggcctgcagtcctggaccttaggatgggaactaattagcacttctgttcattgtcctatcttrgtggcagccaaattctgccttgtgtctgttaagagttgtttgggagatggtttcctgcctttcctccagttgtagyaacccctgctttgtactagtgcaggatcctgggcctaggagggtgtcatcccctgccccatggggaggtggctgtttctctctaaagcagtggagctttacctgggcacagggctagaaaggaaggcttctgatccctggtttacttctgccccttccccgcagctctggaagtgagagttwgctgcccttcccccagcagctggaggcttttgcttcatgtggggaaaggatccagggaagtggccccagcacctcccacacacctgctccackgagaggtgctccycttggtctcctgccctgctcagcctttccagtgggcccagtggaaggctgtggggatatggggaaacgcctgcragagaatgcaaactccccttgggtcaggagctcccaattcttctaaaccagtaagcttacccactctcagccgggaggagttcacacagatcctgtgtcccatctgtcccctctttggaattcagttcgcttgrttgatgagttcaaaacaagttatgattttgtagattgcctggtgtgttataacagaagtgacattttctgcatccacctatatcctacccagaaacagaactgcaatcccactctattaagtggcagtgtctcaaatgaaccccaggtgtttatacatacatttcttttaagggctagcactattaagtatttaataatcatctctttattgtctgtttccatcctgtaaatggatgtctttgatgtcaaaagtaataatttaacctttaagcctaaattaatcctaatctaaatatacaaaattttcatgatggggtggtcaactagaatggtgaacatagttggggatgttgagaggatctctgcrtagttatcagaaaaaaatgtatctagcctcttttttctgccctagctagtcatggggttgccaccttatatagctattatcaacatccctttaaaagaaagctaaagactttttagtaaaaaaataacatgataggctgggtgtggtagctcacacctgtaatcccagcactttgggagcagaaggtggaagagtcacttgaggcctggagtttgagaccagcctgggcaaccccatctgtacaaaaatatttaaaaatmagccaggcatggtggtgcgtgcctgtagtcccatctacttaagaggatggcttagacctggggtttcaaggctacattaagctgtgactgcaccactgccctccagcctggatgacggagcaagatcctatctctaaataatgaataaataaaaataaaaataacatgagaaattaccatagggtaaaataattaagcaagggccaagcttagaaaaaactgccctggttctacagctgctggcaaaagtggtgttgggtgccatggaggtcagggagggtcttcaagaaagggctttgtggaggccatctgtgcagcagagcccacccatgcagcagagcccacccgtgcagcagagcccacccatgcagcagagcccacgtgtgcagagagctcacacatgagagccccctggggcagagtccatgagtgcctcttcccagttccgctgccaagggggcccctctccatctgcctgccacggacatcaccctgttcccaccactggtgaatggctccaggattctccgttagccccaccaatgtgtcttttaggttttattactgttttctgagraagaatttggcaggttgtcattcargttgcttaagaagtacgtggagttagctggcatataatgggtatgytttcaagttggaagctaagtcatatgtttctgtttcaggacgtttttactgtaagtgttggaaacttaccccctaaggctaaggttcttataaaaattacctacatcacagaactcagcatcctgggcactgttggtgtctttttcatgcccgccaccgtagcaccctggcaacaggacaaggctttgaatgaaaaccttcaggtttgtacgcataagatttgaagaagcattttggcagcagtggagggggagtggtggagggctgtggaggaatttatgcctggggagaaaaacatgtaaaataatcttttaggcataaagttaattttactgacatgyrtttagatacattatgtgtataaaatgaaaagaataaaagttacagatatgatcaataagsatatttttattctgcttaatcactcaaaaaatgttatatctgtagtgcaagttcatcatgaagaactagataagcatagagaatacaaataagccaaaataagaaaattaaaaccatcctttatcccattgcccagagttaatggttaatacttcggtatatccctccaaacttcctactttgtatgtacagcacatgtataaaatgtgtgtgtgtgtgtgtgtgygtgtgtgtgtatacacacagacatatgtagagtttaaaatctctgtcaaaatggtgagttgtattttagaagttcctgtcattccatgagcaaactttctgtgtttcactgcttgaaagtgaaaccagctgtcttgctgacagttgtggccttgccaarattacattcactttagtctcattgtgaaacttaatatatgcttagttatacraatgtatttttcttttaacaggatacagtagagaagatttgtataaaagaaataggaacaaagcaaaggttagtacstaaaatataaaacctgtcarttcaatggatattggttttctggtttaaatttccatttagaattgtttgaaataatttcagatagaaatttaagatcgtagastaagacaactttctcttcatttttgctagcttctctttgactatgtctattgagatgccgtaygtgattgaattcattttcagtgatacwcatgaactgaaacaaaaggttagtgcatctttgatttcttaagagctgttattttaacactacttttatcttatcaaagcaatgtatgcacgtggttgaaaagtgaaataatgctgacaaaacttctaacaagaagcactactcctgcccctgattctccccagaccagtttccagagacagtgaatcatttggactatttgagctgtttctttgattttgcctccaatttttaaatattaatttttaatgctttttcttgatttcgcctgtttcagaaattatcttttgacttcctgttttggaagttggacgtgtagctcttgccccctccacccacctaactcactacttttcctctccccttcattccaaaagacctgtttcacaatagtcagtgattatcatgtaaatgatgtttaccactgagccaagaaatgtataatattatgatgagttttttttgtttgttttgttttattttttgagacagggtcttgctctgtcacccagactagagtacagtggtgcagtcatggctcacttcatccttgacctccttggatcaaacaaccctcctgcttcaggctcctgagtagctagggctacaggcctgtgccagcacacctggctaattaaaaaaaaaaaaaacttggctgagtgcggtggctcatgcctgtaatcccagcactttgggaggctgaggtgggtggatcacgaggtcaggagatcgagaccatcctggctaacatggtgaaacctcgtctccactaaaaatacaaaaaattagccgggtgtggtggtgggcacctgtggtcccagctactcgggaggctgaggcaggagaatggcgtgaacccaggaggcggagcttgcagtgagctgagattgcgccactgcactccagcctgggcgtcagagcgagactccatctcaaaaaaaaaaaaaaaaaattgtagagacagggtctcaccatgttgcccaggcttttctcaaactcttgggttcaagggatcctttttgctctggcttcccgaagtgctagaatgacaggtgtgagctaccacacccagcctattttcctttttagaattctgcaggaacttcagaccttctctttatctctggtattctgaaatttcataacagtatgattttcattcattgtatgtaactggtggtctttagttctgagaaattttattgtattaaaaaaaagttcctctcttgtgcctttctgcagtgcctttctttttttcttttttcttttttttttttttttgagacagagtcttactctgtttcccaggttggagtgcagtggtgggatcatggcccactgcaaactccacctcctgggttcaaacgattctcatgcctcagcctcctgagtagctggaactacaggtgcctgccaccacgcccagctaaattttctatttttagtagagacggggtttcccatgttggccaggctggtctcaaactcctgacctcaggtgatctgcctgccttggcctcccaaagtgttgggattacaggcgtgagccactacatagtggtggaggagtcctcagtagcaacaagagagtgccaggcccgttgcatggacacttttcacgcccctgcttgtatctcatctgccaacatatcattggccacagcaagtcctttggccaactccagtttcaagggtggaaatatagctgctgcctcgtggcaggaggaacttcaaaagtcacattgcaaaggrgcacgcagacaggagtggagagactttgtggtcatgtgacactctagcacatgcctttgcctttgttgttgtaaagcttatttacattttcaacagcttttttatattcatgaaaatataatatacaaataagttatgattctaagatttctgttgaattttctattttagtcttctcggttttaattatctgatgtgccgtctgctatacccagataagtctaactgaatgggtagatctataatctttggatccagggtttgagactgtctcacacttatttgaccgtgtgaatcaaccttaggattgcagaagggtgactgatatgctcatggtcttctaaaacctacattttgttattttgttttttttgttttgttttgttttgtttttgttttgagacagagtttccctgttgttacccaggctggagtgcagtggcgcgatcttggctcactgcaacctttacctcctgggttcaagcgattctcctgcctcagcctcctgactagctgggagtacaggtgcccaccattacgcccagctaattttttgtatttttagtagagacagggtttcaccatgttggccaggctggcctcaaactccacccacctcggcgtctcaaagtgctgagattacaggtgtgagccactgcacccggcctacatttcattattttggaatttaccactactttgttgattcttaatagagttatgtaagctatgcaagggtttgctccatgacaggtaagtgcagactgctaatatggtgttactccattactcaccttgttgtygcrgtgtttgttttgcagcgcacagactgcaaagctgtcattagcaccatggaaggcagctccttagacagcagtggattttctctccacatcggtttgtctgctgcctatctcccaagaatgtgggttgaaaaacatccagaaaaagaaagcgaggtatactcctttttacttagacataggagacrctattgaaaaaatgtttcagaataagctgrttaaacttgcaaattattgattgtcctgaaaaactagcattacaaaatgaactctcacatctcaagattctgcaactaaaaatatttatgatatcaagcatgccaaacttctgacgtttcatccaaaacccttatgtggatgatttgcctgtacaaattcgcatttttaccttaagctccaccaaaagaacatgtgccatcagacattacattgggtattctctataacttgttatagttttaaaatactgatactggaaaaacaaataagcagttatttgtggttggtaataagatcattttgtgtggctgtgacaaagagtctcttcttaagttaaaataaaaatagaaacttaggctgggtgtggtggctcacacctgtaatcccagcactttgagaggccaaggcagatggattgcttgagctcaggagtttgaaaccagcctgggaaacatagtgagacctcgtctctgtaaaaaattaagaaaaaaaattagccaggtgtggtcatrcacacctgtggtttcagcttctcaggaggctaagacagggcgatcacttgagtccaggaggttgaggttgaactgagctgtgatcgtgccactgcataccagcctggacaacagagggagaccctgtctcaaaaaaaaaaaaaaaaaaaaaggaaacttacatgatagtagttaaatattggttaattaatagaacaaaaggtatgtgtgtgtattttagtaatcacaatggcatgtatattcctcttagaatagtgtgatatatatatatatatatatatatatttgttccataatgttgatgctatatgatttttcagatactaattcttgacctctcagaagtttatgtcagaagttggaaactcccagttctaacattctacttttgactggaactcctagtaggccatcttgttgttaattacatcttattctttctgtttttatagcattagtttacctcactagaaagttttggagttttctaagtagaccttttscagttgaagtgacaagaagctccagtccagcacyttctttctcctttcaggcttgcatgcttgtctttcaacccgatctcgatgtcgacctccctgacctagccartgagagcgaagtgattatttgtcttgactgctccagttccatggagggtgtgacattcttgcaagccaagcaaatcrccttgcatgcgctgtccttggtgggtgagaagcagaaagtaaatattatccagttcggcacaggtgagtgcgctttggccctggtcctgygtgtgcttcccctayatgtgaatcacattctgtagagctgacaaytgtgggtacccgaccctgcctgtgtggtgaggggcagcctagtatgaaattgaagaacaagagctctggagctggaccccctagrtcccggttccagctgtaccactcacaggttctgtgtgtcaccttgggcgcactacttgaacttctggtgcctccgtttcctcatctgcgatctgaggataattgtccctaactcacagtgttgctgtgaggaggattgagctaatgtatgtaaaggatttttaaactgtgcctgttcacagtaagtgagatataaatgctactgttgtcattagcaactgaaccaaatrcaaaacccytggtctgttgagtaggaggtcccaagtctaaggacaaaacatttgccctcagcgcagtcatagaaaatctataaggaatggtctcaggaagtatcgggccagcactgctagaagggaggtagtaccaccctccagatggggcccagggacgtctcagccaccagaaggcagcacctcagggatgagaggtgcgtggagtggagtgaggggacagtcttatcctattgattctcatcctctgtgcaatccagcagaagacccagccccttttccccagaggtacagtctgctgttgctgggacagaggtcggataagcatggggagtgcaaagggcgtgagcagagactggccttccaggggccaagctgctcaggccattgcaatgccctgcacatttgcacaagtgatctgcatgtgcacatggaatttgactcaacattttgcatagtaaagcaccacggtttgaatgctctatgatgtatcatttagaaaaatagtgtggtgaattttttttttttttttttgagacagagtctcgctttgttgcccaggctggagtgcggtggtgcgatctcagctcactgcaacctctgcctcccggccttagcctccccagtggctgagattacagtgctcaccaccacacccagctaatttttgtatttttagcagagacagggtttcaccctgttgaccagagctggtcttgaactcctgacctcaggtgatacacccacctcggcctcccaaagtgctgggattacaggcatgagccaccgtgcctggcctgtggacaatcttttgtatgttaaaattatcaaacagttttctaaaaagaaaggtacacacataaatatataatatcctttacaacagccgtgatggtatgaaataacattattgtttgttagtgctcaagcaagtgaacgtgtggaagcagcacctcatgctgatcttattacacaggttacaaggagctattttcgtatcctaagcatatcacaagcaataccryggcagcagagttcatcatggtgagtgcaagaggcttcctgtatctcytgggtcttttcctaccatgctttaaggggacctccagggcttaggccactcaagccaccatcagagcacccctactcctgtggtttttgtatattggtgggctctttatttcattaattaaaatgataactcattaaggaaaaattggaaattaaaaagaatagaaaaaaaaaatcacccatgtcccaacaccctaatgcaactagcattaacagctttgagaagttttcttctgtcctttgttttttttctcttaaaatgcagccagctttatctaaaagggttgaggtttaaaaaaaaaaaagaaagaaagaaaaaagaaatgctgggtgtggtgtctcacacctgtaatctcagcactttgggaggccagggcgggtggatcacctgaggtcaggaattcgagaccaacctggccaacatggtgaaaccccatctctacttaaaatacaaaaaattagccaggcgtagtgacggacacctgtaatcccagccacttggaaggctgaggcaggagaatcgcttgaacacaggaggtagaagttgcagtgagccgagattgtgccactgcactccagcctgggcaatggagcgagactccatctcaaagaaaaaawaaataaataaaatgaaataataataaaattgagcaagctgagactgaccagctgcctcagccaggctggcaaatccagggctgattggatgggacatttcttcctgtagatgtcatagtcctctggaaactgtaaaaaatcaaataagcgtgaggtgataatrttatagttactgtgtgacatgaaataaactaaaaggacataagtttagttgtttcacaaattagggaaagaaaatattttcggtgtcaccatatccctacactgtccttagatgtgtcaatgatgacagcaaatggtgactgcatccaacaaggagawcataatctttcacttcatttcctccagtctgccacacctaccatggggaacacagacttctggaaaacactccgatatcttagcttattgtaccctgctcgagggtcacggaacatcctcctggtgtctgatgggcacctccaggatgagagcctgacattacagctcgtgargaggagccgcccgcacaccaggttattcgcctgcggtatcgggtgagtctcagagagctggtcayatagtccagacccayggggaggtcgtcttgttgccctgcaggggactttggcaagcttggaagttgacactagaatacagaagccttacagcatagagggatggggctccgggctcccagccagactgcctgagtctcagaacctgggttggccactcattagcttagccgtgaccttgagcaagttccttaacctctcatctgtaaaaccaaggtgataatgaaaatacctacctcctaggattgctgaggaataaatgagctcatacatagaaagcactcagaacagaactgaaccaaaagcaccaaatcagttagatgttattatttagcataagaatccaaatctccgcttgtcccgaagggcctgggtaaacctcctcactggctgtgctggactcgtgctgggggcatgtgacctccaggcagaccccgccaggctgctttgctccttcgcatctcttttctggccattatgagcacttgcattttcaaaccctgtggtgtgcatagaagctttccatgagaggctaacacccctacattgttggaattgccccttccccattaaaagttagttcttttggatggcactaaggtatgcggtgtatgtgtaaggaaaacatcgaacagagggggccacttggtgtctgcataggacttgcccatcctgcctgcctctgtggcccctggactcctacctgtggccaccacctcagcaagtggtcaccagctatctggtggcagtgcatggagcagatcctcagcttcttcatggggcagaatgggggcctctttgctgtccttgcccctgagccttgacctggactcgccctgagctccaggagccagcacccccaatgcccctctgtggccccgatgcccctccatggcccccagtgtccctctgtggcctccgacacccctagctgctatactcaagccagctctgcctgccttgagggctttcttctctttgtcctccactgtcacagctcctggctctgttctctgtaatctaaggcctagcccagcatcacaggccaatgaagaaatatatccagcctgagcagctccaccaggagttgttcctgatgggacttcacctgctgagctcacagctgcgctcagggcagcctgtgcaccgtctcctggtctcagcagcccctccctgccccctgctcccaggtcagggctcagacaccacagggcagaggtactggcacctattcatgccttcctcagtgagggcctattctgggacgaacatcgggccccgactctggggctgggagatgggattttcccatgtgccagggaggaaatcaagggagtgtgatgaggtcaggctcagaggctcactcctgtggtcccagcactttgggaggccaaagcaggaggatcgctccagcccaggaggtcaaggctgtagtgagccatggtcaggcagttgcactccagcttgagtgactgagcaagaccccatctttaaaaataaaaaaaaaattgaaaaatgtaaggcatgtgacggggagtctgggtgtgcagtgggggagcctgctccaagaggagactctgccagttagcaccgcccatgcctggagggggtggtatccattctgcttttctgtcgagtttttgggatctttctaagtgtttctccctcatcttccaagcatgtgtttgcaattacaaactctagtaaagtgagcttcccaggggtagagaccatcagccctcctccttggcgtgagtcctggtcctctgagagccgccctgaaggagcacaggaagactccagcctgcctcgctaacagacagaagctgtaactaccaataacccatgttagggatcttctagtcaatgttatgatcatcaccaattaatatggagggtaaagacaaatccatctttatccataggttgaaaaacatcttggaaattattttcataagctctttttctgaaaaataattgatgttttctttaatatttcaggaggaattcctctaagcaaggagttcttgatagttgtagaattattgtagagagaaaagtaatagggcacttgtcatttaaatgtcagagatgctctttgctagagtgagagttgcttctttatgccttttgctatgttgatgtgtatcagatttcaagaggtagactttattcactctttgccagctctaggcctttgggatcagattcaggtaatattgttatttatggaaattaagttgatatctttgtcagcattctgataccttatagggttgtttttagagtcatctactccctccctcaggaactgaaagtcaagaatttcaacttttttctatttgaaggataagtcagtcctctgatagatgggagcttaaattagccaaactttcagatgtttccttctattatcactttctctgtttaacctcagcgacacacgagtacattcttccccacgtcatgtctctcctattgagttgtgagctttytcaacactgttaacatgtacttcaaaaatatttctaatgtcttcaaaattaaaacatgtgaaatgtgatcagttctacagcaaatcgtcacrtcttaaggattttgtcccagtgtggtgccggagtatttgaatattttaatgcaaaatccaagcatagttggagaaaacaggtatgttttttaaacatctggttttatatttatgtttggaaatctcttattcttccgagastaagaaataggaatatctgtgtttccttgaatgagaggggagccktaaagaggcaagcactgccgcaggtgtgagccctgcctcaggactgcaccagcgggaacacaggtgttcttcatcaggtcattctcccagcttatggtttgatttctgccttaaaaatcatggactgattttttttaaagtgaattattaaatatgttttgctgaaattgtttccttattatgataaaatttagcattttaattttttttttttttttttttgagacagagtcttgctctgtcgcccaggctggagtgcmgtggcgccatctcggctcactgcaagctctgcctcccrggttcacgccattcttctgcctcagcctcccaactagctggkactacaggcaccagccaccatgcctggctaattgtttgtatttttagtagagatggggtttcactgtgttagccaggatggtcttgatctcctgacctcatgatctgcccacsttggcctcccaaagtgctgggattacaggcgtgagccaccgcgcctggccattttaaccatttttaggtgtacaatttagtggtattagctacattcacaatgctgtgcaaccatcaccatcttcaaactgtttcatcagcccaaacagaaactacgtactcattaagcagtaactccacattccctcctacacccagcgcctgctaaccatgactctactttctgtctttatgactttgccttttctgagtatctcatataagtggagtcataggacattgtccctttatgtctggcttatttcacttagcatgatgtttttaatgtccatctatgttgaagcatgtgtcagaatttcccttctttttaaagctaaataatattccattgcatggatggaccacgttttgcttatccattcatctatcggtggacacttgggttgtttctgtcctttggctattgtgaataatgctgctatgagcattggtatacaagtgtctgtttgagtctgctttcaattctggatatatgtgcagcgtgggattgctggatcatatgctcattttatgtttagtttttttgggaattgccatgctgtcttccatagcagctgcatcattttacattcccaccaccagtgcaccaggattccagtttttccacatcctcaccaacactcatcattctttttttttttccttattgattgaaatcaatcagcttttctttggtttgttttggtttttgagacacagtgttgctcggtcatctaggctggagtacagtggtacaatcatagctcaccacagcctcaactttctgagcccaagcaatcctcccacctcagcctccagagtagctgggactacaggcgtatgccaccactttttttcttattgttttttgtttgtttggttggtttttgtttgtcgttggtgttttttgagacagagtatcactttttcacccaggctggaattcagtggtgcaagcttggctcactgcagccctgacatcctggtctcaagccatcttcctccctcatcccccaagtaggtgggacaacaggcccataccaccacacccacaccaccacacccagctaattttttgtagagacagtgtttcgccatgggcccaggctggtctcaaattccaagctcaagcartctgcctgccttgacctcccaaagtgctgggattacaggcataagccactctgcccagccaccacttgttttttaataacagccatcccactgggtgtgaaatgggatctcaccgtggttctgatttgcacttccctaatgactaatgacatcaagcatctttgcatgcacttgctggcttttgtgtatcttctttggagaaatatctattcaagtactggaatctactcataccaaggctgcatattagtaattagctaaaggcataatttcaggatgctttgtaaatgaaaaggatatgatcatgctattatttaaaattctagctgggcgtggtggctcatgcctataaccccagcactttgggaggctgaggcagatggctcacctgaggtcaggagttcragaccagcctgggcaacatggtgaaaccccatctctactaaatatacaaaaattagctgggtgtggtggtgtacgcctgtagtcccagctacttgggaggctgaggcaggaaaatcacttgaacctgggagggggaggttgcagtgagccaagattgtgccactgcactcccgcctgggcgacagagcaaaactccatctcaaaataaaataaataaaataaaataaaattctgtttaaactattttcgggaaagtaccctgtagcaggaaggagagaaaataccaaagagttataaaattcccaaaggatagaatgtrtactttattttaaatgtgaagtaactattttctggatggagcrttgaaagagaaataattcctcttttataaatagatagaagaccaaatgaccaggctatgttctccgagttgccactctgtctccgtcaaatggcagcaactcaatccagatgygcccgaggccctgcaggccccagcccaggtgccrtccttgtttckcaatgatcgactccttgtctatggattcattcctcactgcacacargtaagaagacgcagagtttgttattctatgggaagaccaatatattttgctaattttttttctgtcttcttccctcccyttctcaccagcagattttcttcttctgggaacacagctggtggttagccagggctttggggaggcttctagtttttattgaaaggggagagaaaatcaccaaaagaatttctgttaaaccaagacactgcagagtggaaaggctaatgaggaatttattttttttcccatttcaggcaactctgtgtgcactaattcaagagaaagaattttgtacaatggtgtcgactactgagcttcagaagacaactggaactgtaagattcaaaacctaaactatcaacccattgtttcaaagttatgattttatatttccatgtataatgctctatgtcaagcttgtccaacccacggcccagggcagctttgaatgcagcccaatacaaattcgtaaactttcttaaaacattatgaaattttttttcaagtttttgttttcagctcatcggctatcgttagtgttagtgtattttatgtgtcacacaagacagttcttcctcttccactgtggcccagggaagccaaaagattggatacccctgctgtctgtactttgttgttttcctgtgttgaaatttcattacacaatatggagatggactatatgtacaaatgagtatactttccttcagtttctaatgcagcacttcttcatctggggtagtttggtctaggtatgtctatatgggcatcagtgggtggcaataactgcaattaagtatggcatttatgcatggaaattttgctagagaggttctcaaagatgttcataactcaataaaggtacatgccactggcctactgatgctatttagaaatactagttataataatactggactaagagtagatcatatcgtatattgaggatgtgggtttatttccttttttgattaaaagcaaatgaattatgaaagaaaaaattcctgtttcccaaatacaccatttctggtttccagatatgtgtttttcccaaccaattctctgacaccagttgcatgtcctacaatttaattcaattctgacactggccrcctggggttggcacagacctcacagagttgagggctcagtcccacaagactgattccaactccagacaccggtagcaagtagcaggtccccaggttacccacacttctggtcagctccaagtcagtgttcccacaaccctttctcacagaaatttctcaaatttcttacagtaatttgctgtaacagctcacagaactcaggaaaagtttaccttagtattactgatttattgtaaagaatattataaaggatacgaatgaacagccagatgaagaggtatacagggtaaggcccagaatagtcccaagcacaggagcttctgtctaacatacagttggggtgcaccatcctcctggcacatgagtgctgacccagaagctccctgaacccctttaggtggggtttttaatgcaggtttcattacaaaggcctggttgattaaatcattggccattggtgattaactctcccctccctggaggttggggagtggggttgaagtcccagccctctaatcatatggttggttccccagcaaccagccctcattctagggactttctaaaagtcacctcattaacataaactcaggtgtggttgaagggtcctgttaggaataacaaatacatacatttcttatgtctgtagggaagttcagactttccctctgaagtttccatgtttggtctataaaataatccaacgatagattaacaggggaaaagacatgcagatgtcgttacgtgtgcacgagccacgtgagactcaaagaagggccagatgagcgaagtttcataccgtacagaggcgggtaggattgtggggctcctgggggaggtggggacaggttgtgggagggtgaggggaagaaacacgtggtgagcaaaggctttcttgtgatgcagatgaagtctggcaggcagcagccctgagagaatagaagcacctctggtaacggtttctctatcatccctttaaagtatcagactttagcctcctcttcctgggagttcatctttcctaaatctggataaggcagataagggggtctcagagaaagcctgtttgcatctgctgtttccttcactgacatacgattcctctgcagatgcaaatattccctgcaaaaggactgcttttcagagctactcctatgtctgctgtccctctgaatagcatctcaaaatatgccaaagaagtctcttttggggtggcctattttagctttttgcatatcacaatatcacaaattattaccaagaagtttgtaatatttgcactggtactgaatccactgtagtttagccttgaaagttcctagcctatatatgctatttatgtagtttttttattcaaaggagtatcagtataaccagataaatcatttcccagacattgctgggtttttttctcaaaagtgcacagcttacttttcagcactaaatcggtatcattgacttactagttgccagtgacttatgtatagaacttaagctcaatattgctttaaaaattagatctttgtgggtactgataagggagaataaattaaaagtatatttttaaaaattagatctaagggggaaagaaggtaaaataattttacctgggaagaggtcgttttccataaagtcacagcaagttgtacttcctctgtgagaagcagccttatcaatgacaaattacaagagttggaatgaagggaagttccatctctcagttgttggagaggaagcacctggtggtgcacattgtgcagtcttcacccttcagagtgcagaccatgttcacggacgggcatcccagggccaaggtggctcttcccatggtagaaaagaagttttcaattttttaaataaaatgaattagcaaaatggccttttatagaaaaagcaaaactctagggacagaaagcagatgaggagctgccagggcttgaggaagctacacgggcacacaggaacttttcagggaaaagagaatgttctgtgtcttcacttcaacagtagtcacacaactgtatacatcccttaagactcatcaaactgtgtatttaagaggagtgcattttactgtatgcagattatacctccrtttttaaaatgatgttctttgcaagtcttatattagaagccatgtgaatattttttttcctttgctgcttaaacacagatgatccacaagctggcagcccgagctctaatcagagattatgaagatggcattcttcacgaaaatgaaaccagtcatgaggtttgttcttttcattgtaaaaatgattagacattcttcttgagcattcttacattgattttatctgtggaaatggaaagtgaggtcagctgcgtggagaaggagactggtgtcagggcattcatcactgtatctgtgacactgtgcctgggatgtggggtgtgtggtaaatgtttgttgaatgaattaacaaaaggatggatgtcagtggtttccagaaaattctgtaatgttttacttatcagaagaagcccgaggagggctcagagaacactcgctgagtgcctgtagtggacgtcacctcagatctctcgtgtggtagcgttagtattcccatcttactgatgagaggcctgagagcgaaatgctgagtgacctgccaaagcccacctgactccccccatgctgtgcagaccagggcctcagcagaggggcccctcagccaggccaccgggactgcccagctgttctctgagggatgagatcttcaacaaggctgtgaacgttagtcctcaatgccatccccacaagaaggtgacagcaggccctggagaccctcacagtcagttctagtgacagatggtcacctggtggtctccctattctcctcagatgcygctgggttggcagcctctgtgtgctgttttgtttaaggcccttttatcctgaacaagtcattccatctttccaattcctcagctttaaattgggagccacagactgtgaaagaatgagaaagcccactgcccgggagagctctctgaactagagggagctgaataatgaagagcgacaytttctatgactaagtcagttcatctcattttaaagggaatattgagccaccgatttagatgggacctgcaattcaatatttagtctgaaatacgaatcttaaaatgatttactgacatagckaaatagaaataaaacaggacatgatttatgttttattctatcctagatgaaaaaacaaaccttgaaatctctgattattaaactcagtaaagaaaactctctcataacacaatttacaagctttgtggcagttgagaaaagggtatgtattattggtaattcraggttaaattattttatttrtatttccacrttaagaaagtcacccttgctttgatggttaatgacgacatccacrccctgggcctgkgaagtgtgggttgcagacaggycagcaggccccaygagtcccagcctcccattcatggggggcttcggtgttgggacttagggtgatctttctaaatgagttgagtatgttatcatttttaatgttattattaayaattggctaatgtgtayttttcggttatactataattttgttacagttttggcrtttattgtcttttattaatccaagaccctcaaaaaatagaaaaggccgaaaaggcctgggttccctgagagcccttccccttcataagtttaaggggraaattcacgtaacrtgcccagcacagtggccagcacctgccagtgctccgtaaagaggaaagccactccacctccccacttcccctcacgcttgtggcccacagcacaagctccagtcccacacaccagcatatcccaaaccaacaccccataggctttagaatgtgtagtcatcatttaattggataacatctgtttgatttaatctatttgtgattcaatataggatgagaatgagtcgccttttcctgatattccaaaagtttctgaacttattgccaaagaagatgtagacttcctgccctacatgagctggcagggggagccccaagaagccgtcaggaaccaggtaaatgctgattaccgaataagttgatattgagctttcgttttttcatgaagatgaagggaaccctttgctaaaatagctcccttcttacctgtacatgaagaagttgtatccctgatgatggaaaatattcatgcatttataaaatgttgaattacatcatgttgcattacagagacttcacaatgtgtgaatggagctgtatagtacaaaaagagaacacctctggctgtgcttctatcatgggcaaatagattgtcatccaggaagctaaagtcatttaggtagtataataggtttgtcatgaaattatcaatagaagtgctatctaataatctaaattcaccaccaatatttcttaaagtttatagtgctttataccgtggcccttataaccagaaacataatagaaatggaaaaatgtggcttaaataaaaattggaagaaaaattcaaaaacaaaggaacaacacagtgctgacaaccctcttaggtctctaggttaaaaaactaaaatttccagaatttaaaaatttaaaatctgatccggcaccgtggttcacgcctgtaatcccagcactttgggaagctgaggtgggaaaaatcacttcagccaggagtttgagaccagcctgggcaacaaagcgagacctcatctctacaaaaagtcttttagggcgggcacagtggctcatacttgtaattccagcactatgggaggctgaggcagcagacgacttgagcccacaagttcaagaccagcctgggcaacatggtgaaaccctgtcgctacaaaaaaatacaaaaattagctgggcgtggtggtgcttgcctgtagtcccagctactcaagaggctgtggcaggaggatgcttgcacctaggaagcagaggttgcagtgagccaaaatggcacccctacactccagccttagtgacagagtgaggatttgatcataaataagaaaataatataygaaagatgtgcaaccttgtttctaaaagaagttaaaatgtaaactgccatgagattcctttttattttttaactctgtcaggttggcaaagatcacaaaaggtagatgattgaaagtcagtaaacacagtggttaagatcacaggtgctgtggccgaatgctcaggtctgaaccccagcccgcgcttcactctctgggacttgacctycccagtgccccagtcctaatgccctagtggggagagcagtaaaatccacctcaggtggttgtgaagagttctaagaccattccaacacgtctagctcctggatatttgataaatattagctgtagttattaattctcaaaggtgtctgaaacgggcactgttgcccaaacagatggggcagaaagctgaaaagtggccttgggtttggagggatacttgatttcttttttttttttttttttaattttaattttttttttttttgagatagagtctcgctctgtcgcccagggttgagtgcagtggcatgatctcaattcactgcaacctctacctcctgggttcaagcaattctcgtkcctcagtctcctgagttgctgagattacaggtacgcgccaccacactcagctaatttttgtatttttagtagagatggggtttcaccatgttggccaggctagtctcgaactcctgattcacccgcctcggcctcccaaagtgctgggatttcaggcatgggccactgtccccagccttgctttcttacagtgcacccttttgtatattttgaattttgaaccatgggcatggattgcccatgaaagaaaaataatactttaagcaaacacaaagagtttggggagtcaggagtagtaggaggtgcattcagccaggctcaggtggccccgtaggctcacccacaggcagggcagatgttggcaacatcgtgggctcccacactggtccggacttccaggtcagccaaagaatgggactcagggctgcttgaaggaaagcgaggggctaagctgaggggctgtgacctgtggcctctctctgactgcacaggggcccttggagtgcattgttttggggaaaaaaaaattctgatgtacaattaagaatcaactgtttgtccttgagacttactgttaaaatgggccctggaaaatatatacttatcttatatgtgcttcaaaagggcacacccagaagcagctctgaaaatggagatggtcatggttgcacaacagtgtgaatgtacctcgtgccactaaactctaaaaatgactaacatagcaaacattgttatatacatttttcccacaataaaaattaaattaacaaaaataagagatacgcccctacactctgctacatacgttaagtgttttgttcacagaaaaggtctggagggatataggccatagatcagataagacattctgtatggcttttattttcttctttgtgtctgtctacttgtgtctacttgtattttctaattttctcatagtgcacatgtgttgtttttagatttttttttttttttgagacagggtcttactctgttgcccaggctggagtgcagtggcaccatcatagttcaccgcagcctcgacctcctgggctctagagatcctcctacctcagactcccaagtagctgggattacaggagcgagccaccatgcctggcctgtttatagaaatttttgaaattattttcaaaattggttctaaattaatttaggttttaatacagtgtgatgataaattatttcatactaaatttgcaaatacgttggatcttaatacttccagatccaaacatatcagatgaaaaatattatccattagcttgatgacttgaaagtttatgttagctgcaataagttgtttgaacggaccatgtaatttagcaaaaatgtcaagcctctgttactcttcctcgatatctgttttaccaaaatgtggcacctgccgcattctacacggagtcattccactgaattcagtaacacgccagccgcaatagagcccggacatccaggtctgtttggtccttcccgactcgctgaagcttggggcatttccttatttgatacatcttcattgtgaaatgagaccctccagggagcgcaacaccttttctgctgggacgtgctcaggaaggacagcgctcagtgctgtgtgctcttgtcctcccacagccacgcctgggcttaggcgcagtgtcttctgcaccaaccccaaatccacttcgttccctcccgctcatgaaagcacattgagaacaagcgagaggcagagatttttaaaacatacctcctaatccaagtttttaaagtaaatcatttgtaaaattcagtgctataactcttagcaagaaattgagggcactgaagctgagggtccagagcccacgctgttccttaaatcaggggtccccaacccccagtccctggcctgttaggaaccaggctgcacagcaggaggtgaggggcagtgagggagcattaccgcctgagctcgcctcctgtcacgtcagcagcggcagtagattctcatgggagccccgaacctgttgtgaactgtgcatatggaacatgtggaatactttcatcccaaaaccatctgccccacccctgtccatggaaaaattgccttccatgaaaccagtccccactgccataaaggttggggaccacaccttaggtgatcaagatgtgagtatgtggttaagcaaaataagcaattgtgaacttgaagggaaagaggaagcaagtgagtgattttgacaaatagaagaatcataatgaggccaggcacggtggctcatacctgtaatccccacactttgggaggccaaggtgggtggatcacctgagatcaggagttcaagaccagcctggccaacatggtgaaaccctgtctctactaaaaaatacaaaaatactattcaagaaggagttttataaaataaacaaaaatgacccgtatttctcagtatgattcttttttttttttgagatggagtctyactctgtcacccaggctggggtgcagtgactattcacaggctctatcacagagcactacagctttgaactccyggcctccagcgatcctctcacctcagcctcctgagtagctgggatgctccacaatacctgacttaatcaattttttgatctttgcatatcttacaggtgaaaaatgtattggtgacatttaagtttttgtttctttatgaatgaagaggagcatgttttatattcttacagccctaygtatcacttcctgggtgttatctgttcacatcttttatttttttaattgagattttagtcatttttttatttatcttaggtaaactttttatgttagggaaattagccctttgtgatatgagttgtgaaaatttgtttcccggtattccacrtgttattttgatgttgcttattatcttttggtcatgcagattttttaatgcagtcaaatttttaatctttgtgtttcttctttttgtttagtgttgttttgcttttcatcatgcttagaaatacctttcctagtcagagattatacttttaaaatttttccctttatttttaaaatagttttatgttttcatgtttacattcaatttttcatctgattgaaatttatcctagcataggataagagatatggaaccaactttattcttttccagatggctcctccttttcctcttattgacttgaaatgccaccttcataatctagtaattctcagatttaggagctattgctggacttacctactctgttccattgattcgtctactataattattataattttataagagactttaatatctgatagttctagtccatcactattgattggttttttccagtttgcttctctaatttttaaaaatttaacctctggttagcattattttaaaatatgtcttttcatatgttctataatattaattattcaggtataaacttgaaatttgactgagttgggaaaggactactccttttttaaatcattcatattcacaggtaaaattacaggctaattatttcaaaaatatcaaggacttgacatgcatataaaactggattttatacatgcaactttttaaggaacactctttacatttagattgaaacaatagtagtaatatagcatccctcaaaatttgttttacatacatattgttcatgttctagtataattatatgttcatttaattacttgaaagcttttggctggacacagtgtctcacacctgtaatcctagcactttgaggggccaagctgagaggatcacttgagcccaggagttcaaaaccagtctggtcaacataatgagaccacatctctacaaaagaataatttaaaaattagctgggtatggtgtcacatgctcatagtcccagctactrgggagtctgaggcgagaggatcrcttgagcccaggagttcaaggctatagtgagttgtgattgtgccattgcactccagccccaggcaacagagcaagaccctgtctcaaaaaatgagtaagtaaaaataaataaagcttttgagactgtttttccattttgatctcattttcttaatattgctgtaaagcagtataaaaactgcaataattgacttcaaatgactgtcttattttaggcctaagtacaccctgtgatactgctcattgtaaaatcttgggcaagtcacttctgtgctcctcagttccctcatgtgtaaaatgaggggtgtttaaaattccgcaattctaagaactaagaactaagagagaaggtctttcaatatattgattrctgatattctctccaggtctcagcttccatgtctagaaatagacagccttgtactgaaatgatcttgaatgtctctggtggcattattttctttctttcttttttttttttttttttttgagacagaatattgccctctcacrcaggctggagagcagtagtgcaaatctgttctcatagctgcctcagcctctcaggctcaagcactcctcctgcctcagcctcccaggtggctgggactacagtcatgagccactacacctgtctaattttttattttttgtaaagatggagcctcgctgtgtcacctaagctgttctcaaactcctagccttgagcgatccttcctcctcggcctcccaaagtgctgagatgacacgcgtgagcygctgcacgcagcactggtgttattttcaacatcccagctcacattgatgatcctgattctggatgagcaactgcctgatgggtgggaagtcaagtgctaggaagaatgtttgcttgattgttctttttattctgtgttttccccttacgttaataattctgtcttctgggcagtctcttttagcatcctctgagtggccagaattacgtttatccaaacgaaaacataggaaaattccattttccaaaagaaaaatggaattatctcagccagaagtttctgawgattttgaagaggatgscttaggtgtactaccagctttcacatcaaatttggaacgtggasgtgtggaaaagctattggatttaagttggacagagtcatgtaaaccaacagcaactgaaccactatttaagaaagtcagtccatgggaaacatctacttctagcttttttcctattttggctccggccgttggttcctatcttmccccgactrcccgcgctcacagtcctgcttccttgtcttttgcctcatatcgtcaggtagctagtttcggttcagctgctcctcccagacagtttgatgmatctcaattcagccaaggccctgtgcctggcacttgtgctgactggatcccacagtcggcgtcttgtcccacaggacctccccagaacccaccttctkcaccctattgtggcattgttttttcagggagctcattaagctctgcacagtctgctccactgcaacatcctggaggctttactaccaggccttctgctggcaccttccctgagctggattctccccagcttcatttctctcttcctacagaccctgatcccatcagaggttttgggtcttatcatccctctgcttmctctccttttcattttcaaccttccgcagsctctttgactgccaaccttaggctgccaatggcctctgctttacctgaggctctttgcagtcagtcccggactaccccagtagatctctgtcttctagaagaatcagtaggcagtctcgaaggaagtcgatgtcctgtctttgcttttcaaagttctgacacagaaagtgatgagctatcagaagtacttcaagacagctgctttttacaaataaaatgtgatacaaaagatgacagtatccygtgctttctggaagtaaaagaagaggatgaaatagtgtgcayacaacactggcaggatgctgtgccttggacagaactcctcagtctacagacagaggtatgtgtcttatttctccttaaatctgtggttggctggcttcatagtttagaacggggctcctcaaagcagctggtcaaggaaccgtctatcatcagtctgtagtgaaggaaggggttgtacactggggtataaatcatactgcttccttcaytgaggaactcttgctacaaaacaaaacagacagctgaacaaaacagtgtgcttgatgctggctggtgtttctctacaaacattagaccagaacctcatgctggkgaatgttactattcctcacrtgaaaatgaacatctctgaacagatgatggggtgagatcttaatttcctagattctagaactaatggattgtaatccacataaatttcccactgtgaagtagagcacaagcacttgyacctgtactctaaatattttcacataggtcatgggaatacagatattattcaacatgtatattgtgttagagcttatcactccatttgttaagctgataaacaccctgtagatttggccccatcgctggtactaagacccagtcctgcatctgtgattacttgttttggtgtcaagtagtttagtgaaacggaaagggcttgatgtagtataaaagtaagcctgagtcccagcccactttgtgattggggcaagtcaggtaacctgtctgagcctcagcttcctcatccatatagtggagataatgatagtgtctacttcacagagtgggtttgaggtttaaacaggataatcacagctgcccagtttccctacttgagacagtgcacccaaaagcctgccaggagcatactgcagatggtcaggagtgtggatcccacggccactcctggctctgctgcttgttagctgtgagactttagacaaattgctttacctttctgtgcctccatgttctcatctccagtgtgggtgtgataatagttgttggggtgatcagacccaacaccaggtcatgggggtgacaaagtccagtggagtcaaaggattgagaaaaagacagtttgagagagaaaggtgggacacyagtatgccatcactatggtggaggctgcgaaggccccgagctctgggagcccacggtatttattgataatccaacaaagaaacagatggtgagaatgtggaggtcaaaaggacacgttgcattaagtacatgatttacagctgcgatggtttagcatttatatggaacatattctgctacttgagataatgggaacaggagcctaggaaggctagaagcaaggagccagcaagtctagacacattccagaggacgttacgcaagccctgcctcagtttccctcccaacactcagytttttcccaacaatagtactccacaggaagtggctaaacatatcaaagaacagcacctggtaccasttctctatgggttggtacatattatcactgcggtcatttttcaaggtattgccatagattcttcaacctgtgcacctgcctaggaccacaccctgctttctactccctgtgttggtttccctagggtcttgattctgtctccgttgaggttaatatccccaagctcaggcttagcacattctcctgtgcatgtgatggggcaggcagatgatgggggatgcagggaaggtagttttaaagtgcatgtttaatataacaattttatgcttagaaaaaactgtcattttcatgtttcagactacatcagggtacatttttatgttaaaccaaaggaatcatgctggagatctactgtacaatacagggcctatgattgacaatccgatgtggtatactgaagcatttgctaagaggtctatcttatgttaagtactctttccacaaaagggaacaaaacaaagcaaaaggggtggaaggaaagttctgggagtggtggctaagttcatggcattgataagtgatggtttgatggtttcacaggtgtatatttaactccaaacacatcaagttgtatacgttaaatgttggtgactttttgtatgtcaatcatatttcaataaagtgggttttttttaaagagggaatcatgcatgacatatactttaaaagcttgagaaataccggttcaatgctcattgctagttgacaacccagtagggtgactatcgttaacaatacattgtatatgtcaaaatagctagaagaaaatatttgaaatgttgccgacacaaagacatgataaatgttcaagctgatggagatcctaaacaccccgacctgattatttacattctatgcatgtatcaaaatatcatgcgtatgtcaaaatacatacaagtattatgtatcaataaaaaatgaaataaagcattgctagaaggaaaaaagtaccatttaaaaaaatctcggccgggtatggtggctcacgcctgtaatcccagcattttgggaggccgaggcgggtggatcatgaggtcaggaraktgagaccattctggctgacacggtgaaaccccgtctctactaaaataaaaattaaaaaatctctacccatgagcctctttccacactttttataagtgccaccagatatgtagtgttcatagcatttatgaggttccaaacaatactatgtcactagtgtatgaagaactttattttacagtartaaaaatgttagaaatgccttaattaactgaaataaatggaaacatttatcacataacttcttttttcatttaatttgttaaagttttattttagatgcagaggtacacgtacaggtttattacatgggcataccgtgtggtgctgaggtttgggcttctaattgtcttgttgcccaagtagtgaaaatatgtttttcaacccttgccccactccttcccccactacgtaacttcttatgtgataaaatgtgaataacataacttatttttgtttccttaattttgtaggatggcttctggaaacttacaccagaactgggacttatattaaatcttaatacaaatggtttgcacagctttcttaaacaaaaaggcattcaatctctaggtaaggcactatgtttccatttattaagtcattattttcattcattaataagcatgctcctaattgttrtaaactgttttgtaagctagtgtattaatgtaataattatgaaagttatattcgaatggaattatatttaaccattaaaggaaatgggagatgggtttctagtcatatttttaccactaattagggtattatctgagcaaatttattagcataaatagcaccaagtgctgtaaaaaaaatctcagaagcttaacatggtaatcaaagattactttyttgtccgtatcacagtcaartattggtcaggaagaaagttccacttatgtggtcatttagagaccttgactccttccatactgtggctccaccatcttcaatatatgtctttaaaattatcctggtaagagagaagaacaaagattaccctggcatcatccccctgctagacaagaggaagaatactagtcacatagccccatccatgtacgaaggcctgagaaatgtactgttaagctgcgtgtccaggaggagaaaagagctctgatgagctcctagccagcctctgccagaggcarttgttcaacctctggacctgtttcctatcatgacaacaaggggatagatgaggaagtcctgagcatccttracccagcaagtggtttgaaggtcaaatgctagccctaggacaggagctgttgtttgtttgtttgttttgagacaaggtctggctccattgcccaggctggagtgcagtggtactatctcggctgactgcaacttctacctcccaggctcaagggatcctcccacctaagcctcctgagtagctgggactacaggcacctgccaccatgcctgactaatttttgtattttttggtagagatggggttttgccatgttgtccagtgtggtctcgaacttgtgagctcaagcartctgcccaccttggcctcccaaagtgttgggattacaggcatgagccaccatgctcagcctggagatttttttttwaaataaaatacacattattaaacaactagccaatattcatggatagatagagcagcagcgtctcactgccccaccatcacctctaaaatgccagagttttcatattccaggctgggtgggtgggcaaatgcatagcctgtttgacctgcactaggccaaaaaggggtgatgacaatttacgtgaggagtgagtgcttgatcctggaataatagaagagcctctatctgactaactctcctgccaataacagttattaactttgaataaaatatttaaaaccattctttgaaggccaggagaataatccaaaacaggcagaagctagagtgaacataatctttgaaagaaagaaagccaactaggtgggctccacacgtatccagcttgtcacctaaaggcatttctcagctcatgagacacaatgggatgtttgaactaaaacagaaagtcttaacgggatgaggacatggggttggagtttaaggttgccaaagtggctggaagttaaggattaaaatcctataaaggagggaaccacagagcagggaactctgaaatctgcatccagatacccckcagatccttggctgtctcctaacctctacatayacaggtgcaacctcaaggaatccagaaaaaagcaacagctgggaagctacagagctaagcagagatttcagctgctgcctagtactggccagagtttagagttcaagtggcaccaaattagagagactttataaatatctttccattgaaaccataaaagggtcataaggatcatatctcatgatcaaggactataccccaggacatagggataagccaaaatagacccatcctaataaagcctaaaacaaagcctacacaggacctaccagaacaaaactgaacattctttagagtaagatagcatagctgagagtctctacaaggygtcatttttaatgttcagtatggaatgaaaatttaataacatacgaagaagcaggacaatatgatcrtgatcaaggggaaaatgggctataaatgctgacccacagatgacccagatgttagaattagcagacacagactttaaaactgctattaaaaatatagtgaaggattgacttaccagaaaaggatggaatgggtgaatcgcagaatctcagcaaatagatggaaactataaagaaaaaccaaattaaaatcctagaactggaaaatatagtatctgcaatgaaaaggtcattgaatgagcttaacaacagaatggacagaacaggaaaaaaatcatttaattcgattgacaatgcactcaataaacttacctaaactgaaatatagaaagaaaaaaaatagaatgaaaaaagaacagaggagccaagactgtggaatgatatcaaaaggtttaacatttgtgtaaccagggtttcagaaggtgaaaggttagatagaaaaatatttgaacatttttgtaaaattgatcaaagacagcaccttccagatccaacaaactcagcagaactccaagcactataaatacaaaaatgaccacatttagataggccagagtcaaactgttgaaaaccaaagataagccaggcacrgtggctcacaccagtaatgcctgcactttgggaggccaaagggggcagatcatttgagctcaggatttcgagaccagcctggccaacatggtraaaccccatctctacaaaaattagccaggcatggtggcgtgtacctgtggtcccagctacttaggaggctgaggtgggaggatcacctgagccctgggatgttgaggctgcagtgagcagtgattgtgccactgcactccagcccaggtgacaaagtgagataaaaattcaagataaatatattgtcaagtgaggctggagctcatggaagaggtcagaattggaaaagactgggaaaattctcaacgttagtagtatttaaagcctggctctggatgagatcacccaaagaaagaaggtggactgagcagagcaggtgctaggaccagcctgctgcacagcagggtttagtgttcagactggacaagaaacagcaaagacgctgagaaggagcggcctgagaaacaagaggaaaactggagaaaattgagtcacagatgcaaggggatgggatttcacagatgtgccttatccatgggcttttcctgtgtttcactgtattgctccctattatctgtgttatttttctgtaagcgtgtgcttttctgccttccttcttcgacgtagagtctcaagctgtcttttttctctgacttgtttttatatctctgtacccaactttgtcttttatcctcttcttcatttctcttttatcatcccctctccttctgaatttgttttttaaatgacgttgatacacattaggtatttcatcagtttattatttattatattattcttggagttgtatgttgcttattattaatattgcttaaaaattagtctaacattttgtaaataatactcaaaaaataagccacaaaagaatccagcaaattaaactgcttttgtctccactgattttcttttgtgggacaatggattggttttgttattttgtttttaaaaatgtattcaattcctttttcctctattaagaacattatattatttaataaaagcccacttacgagcagttttggctacctcaacgatgtaaaattaatggtgtatatgcagatatgtacatactatgccaagtccttttgtctttactcaaaaaaagtaattgtatattcttaattataagacaaagatttgggtttttcttttcttccctaaaaccattttttggctatgtgttgtggctcttgcctataatctcaacactttgggaagccaaagtaggaggatcacttgagtccaggagttgggggctacagtgagctctgatcacacccactgcactccagcatgacagagtgagcccctgtcttctccaaaaaaaaaaaaaaaaaagaagcttggatttttaaaatgaaaatgggttgttaattgagttcaacacatgtaaacattcatttttcaattttgatatttcataatatagtaaaatatcttggatacctataggtactaaccactagaaataatttgatacaccagtgtaattagtcatatctgttgtttatctgttgaatatttaggtttactcttctaagctatttgtaacaggagcctaaaaactggatttcttttagtgaacttcatggctctttggttattgaagatggcaagtgaggggcactctggatacagttcagtttcctgacaatgatcaggataatatcataggcacacgggtctaactgtcctcattttttatttaaacagcaaaccatttaaggaccttgaagagtattagagtttcacgatctgctcatgtactgtgatttaaccgtattataattctttttttttttttttttttttttttgagacagagtctcactctgtcgcccaggctggagtgcagtggagtgatctcggctcactgcaagctccgcctcccgggttcacgccgttctcctgcctcagcctcccgagtagctgggactacaggtgcctgccacccccggctaattttttgtatttttttttttagcagagatggagtttcattgtgttagccagatggcgtattgtaattctttaatgagaattttataaacaggcacagtttgagatgcagagtttccaacagacttaacggagtttttttccttttaggtgtaaaaggaagagaatgtctcctggacctaattgccacaatgctggtactacagtttattcgcaccaggttggaaaaagagggaatagtgttcaaatcactgatgaaaatggatgacgcttctatttccaggtggctttaactatagtattatgcaacttatttatattttcaactatttatttaataaaccttagaaacagctatagggaattatcttacatgtgtacactataagtatgtagcaagagaatttgtttgcaggtgacagcttgcccayagtctcctgtggcgggcagggctgatgtatttgtgccttgggctgcacaggaaatgggctcaaagagtttcagtgcagctyccgctggaggctggcgcttctgggctctggatgtggtactcttcactgcagtctgctgatcctgggtgcctccagaagacccacartgtgactgttgggcccagccctgttcccaacaatggcagggcctgggacaagaatacaatacaagtatttaaagtttataactttrtagtttataacaagtgtttaaargttataaatcaaactagcaaactattagattaaatgtgttctaatctcctcccttggcaaatacaacttcataaccacctggaaggccaggttcaaattcggcccttggttgaccccyagcaccctaagagggtttgcctgcaaacgtgaataccccaccccacccatcaaaatgccatccagaccccatgccagtgccccctcacaccagccaccttgtagcaccagtgagatggcaacactgttcaaactcaggatgacagaccagggaagaccctggaagtggactcagggccatgtggtcagggatgctggagttgcagggtctaaaaaggaggatatgggctctggggtgggcatattctcttgtccctacagaccccccaccccatggcaagagggtcaagaccagagtaggatccctctgagatatatagatatagatatagatatagatatagatatagatatacacacacacacacacacacacacatgcacacatgcatacacatatacacatatacatacacatgtaattggcttatgttcttttaaaggcaagataaggggaaaactaatcaaactaataatattattgctacggggatttgatagaggggacaaagatagaagctaggtttctcctagtgtgctttgttttgcagttttgactttggaactgtgtaaatattttacataataatgcataagattgatatttatttatttatttattgagacaaagtctggctctatcgcccaggctggagtgcagtggtgcaatctcagctcactgcaacctccgcctcctgggctcaagccatcctcccacctcagcctcctgagtaactgggactacaggtgtgcaccaccacgccctgctaattttggtatttttgtaaagaaggggctttgccatgttacccaggcaggtctggaactcctgaactcaagcaatcctcccgcgtcagcctcctgaagtgctgggattacagacatgaaccactgtgcccatcctgggaattaatttaaggtgaatttaaaacatagtactggccgggcgcggtggctcacgcctgtaatcccagcactttgggaggccgaggtgggcagatcacgaggttgggagatcgagaccatcttggctaacatggtgaaaccctgtctctactaaaaaaaatacaaaaaaaaaaaaaaattcgccaggtgtgatggcgggtgcctgtagtcccaggtactggggaggctgaggcaggagaatggcgtgaacctgggaggcagagcttgcagtgagtcaagatcgtgccactgcactccagcctgggtgacagagtgagactccgtctcaaaaaaaaaaaaaaaagtacataatttgactatatctctctagtgggatagtacctaaggattaaaaaatattacaaagaaatctcactgggagtagtcatggtgttaataatacttttgatttgttattttggaaggtagatattaatattgttagaaactaatatgtataaaatcaaagaagttaaacaaaaccccttgatttctaaacttgaattagatcagagaatagaggaacatgttacttgacaccatggaaatgcagtcagcraagtctggaatgtggggaaataaatggcaagagaaaaataaatggcaatagaaaaaaaaggttgaggagcagaacctgtaaataaacctttagagacatatcaaccaaaagcaagggtagaccttgtttaggtcctgatacaaacaaaacccactgcatttaaaaaaatgagataggaaaaattaaacactacctggatattttatgatattaaagaaatattgataaytattttttaagtgtcatgattaagaaaaagttctcaaacacaaaacaggtgttcaggaagttctgggctaggcaaattggctcatgcctataatccaagcactttaggaggctgagacgggagggtcacttgagcccaccaagatcaagcccagaagtttaagaccagcctaggtaaccaatgagactgccatctctacaaaaaactttttgtaattacccaggcattgctgggcacggtggctcacacctgtaatcccagcactttgggaggccaaggcaggaggattgcatccaggagttcaagaccagccttgaccacatagcaagaccctgtctccacaaaaaaatttaaaattacccgagtgtggtagtgtgtgactactcaggaagctgaggtygkggggattgcttgagcccaggaggttgaggctgcagtgagttgtgatcgtgccactgcactccagcctgggcaacaaagcgagaccctgtctgaaaaaaaaagaaaatcataatttactatatgtaatttatacttccattttttaaaaagcaataccttctcattagtttgccaagaaagatgagaatttattttgtttttctattttgggagttttctttttttttgttttgtttttatttatttatttattttttgaggccagatctcgttctgtcacccaggctggcgtgcagtggcacgatctcggctcactgcaacctccacctcccagtttcaagcaattctcgtgcctcagcctcctgagtagctggaattagaggtgtgcacagctaatttttatatttgtggtagagatgaggtttcgccatgttggccaggctggtctcgaactctggcctcaagtgatctgcctgcattggcctctcaaagttctgggattacaggagtgagccactacactagcctattttttgtattttattttaaaataaaccagtgccacttgccaagaggattaattaaataaatatcaaagaaaaaacactttgaacagctaggaggtgggactaaaaaattagtattgacttaataggcacatccaaagacgcatttattctatttagatcattgccaattattaatattatagctgttaaaacaagtataaactttgaacctgcttttgaactgtaatatcataaagtaaagattttcaaaattgatcaagtatattccagcatattgctcttactccattactgctactgtgctagcawaatggtttgttggcacttgagtacataagacaaacaattttaggccagacacggtgactcacagctgtaattccagcactttgggaggttgaggcggacagatcacaaggttaagagattgagaccatcctggccaagatggtgaaaccccgtctctactaaaaatrcaaaaactagctgggtgtggtggcacgtgtctgtaatcccagctacacaggaggctgaggcaggagaatcacttgaaccaaggagtcagaggttgcagtgaaccgagatcgtgtccctgcactccagcctggcgacacagtgagactccatctaaaaaaaaaaattaaatattttttatttcctgtttattgcatatttgaaactttgttctatattttctatttcaggatgtacataacattgatgcaagagcacattatatgggggtgtaggcacaagattttcttgctagcggaatgtgaaccaaaaagtgtagaggccaatcagtaaaaatattcaaagccagttttgttgttttcagcagttagtaactatcagtagatgaatatttactaggaaacattggtcttttaaccactttgggcatgcttcttatttagtatgttcatcatgatttagtatcatgacattcagcgaacatttattgagtgcctactgtgcactagggactagtaagcatgttaagtttgtaagctttgttratttccaccacaaacccataggacctcaggttattctcataattgaggaaactgagattcccagtgttgaatgaaagccacacagtatcacatggccaatatcatgtkattgcagagtcaggactcaaacccagctcttaaccaccacgctatactgacggccctttcccagttcacagggaaaattcaggaacagggagagaattttcaaaatattaagtttccccatagaattttctgaagaactttggtatatgttgccccttgttcactaacaagttctagcagatgasagaacaaatgaggaagtagctaattaatattaatgaacaacctcagaatttttctgagtgttgaatagacttgaatattcaacagtctcaaatatttgacaccatttagtggacacagacttgactcgatatgcttattctaccaagttgttcctggtttacgtgacacaactgaatgtatgccagtttcatgggggactctcagatattctgaaggtacctaatcaagtcagtacagtgggaaggagagagaaacagaagcctcatttgtgaaatagtacttgagtttgtgcgtgaagaatggataggatttagactgagaagcgtggaaaggggacaaccataaacaactgtagagaggctggaacgtgagctgtgctgcaggcagcagggatgcctggaggcacgtggaagccaggaggtggcgggcacagggcacttgacaatgcagtgcataagctcgaggtgagacgggcagaagaacttccgtaagatgccaaggaaaactgcttttattaaatatcttaatttttggcagaatcattttgtctgatataatgtgatgggtttagtaccacattacatttcacatgttatattctgaaatctgaaactttttttttttaatctaggaatattccctgggcttttgaggcaataaagcaagcaagtgaatgggtaagaagaactgaaggacagtacccatctatctgcccacggcttgaactggggaacgactgggactctgccaccaagcagttgctgggactccagcccataagcactgtgtcccctcttcatagagtcctccattacagtcaaggctaagtcaaatgaaactgaattttaaactttttgcatgcttctatgtagaaaataatcaaatgataatagatacttataatgaaacttcattaaggtttcattcagtgtagcaattactgtctttaaaaattaagtggaagaagaattactttaatcaactaacaagcaataataaaatgaaacttaaaatatttcagttttctgtgtctcattttttttgttgatttttttatgtattttttttttttttttttttttttgagacaaagttttgctcttgttgcccagactggagtgcaatgacgtgatctcagctcactgcaacctctgcctccttggtgcaagcaattctcctgcctcagcctcccgagtaactaggattataggcacctgccaccatgccctgctaattttttatatttttagtagagatgggatttcaccaggttgcccaggctggtctcgaactcctgacctcaggtgttccacccgcctcggcctcccaaattgctgggattacaggtgtgagccactgtgcccggcctgttgttgttgttttagagatggtctcaatctgtctcccaggctggagtgtggtggtgcgatcatacctcactgcagcctcaaactcctgggctcaagggatagtcctgcctcagcctcccaattaattgagactacaggcatgtgccaccacacccagctaattttggggtgtactttttgtagagatggggtcttgctctgctgcctaggcttgtcttgaatttctgacctcaagcgatcctcccacctcagcctctgaatgtgttgggattacaggcataagcctctgcacccagccggtgtttcagagttttaaggtgatgagagatgcttctggatagtcctgggagcctgtgtccttctcacattcaggagtccagtggaaagctggctcagctggactgagcaatctgagaagaaacatgatcttttgtaggggatctgtcagggtggtgggagaaattataaaaattaagttgtaggaaacagacacaaaacttcttggaaggccaggaggtttgcatagcttcagtaaaagatttggctgaaggcagctgaattctcttaaaagctcagggcgtagatacataggaatgtagaggagtttatctaaatggcttgtttactcatgtggtcctaagatcaacctttgataatctgcaggcacgtgactgccgtctacttgggaggtcagcaatgttaattaccctctagtggtgtttacttaagacctttgtccttaaatctgtactgaataaatgcctggagccccagcctgtcagggccacagctgctgactctttacagcaccctcctcagtgtctgggagctgccggtcccctagcctgctgtttcatgggatacctgtgtctgagtgcatttcttcatccgtcacacggccagggtatggaggttggacccagcaagttactgacacagtttgaaaattacacaggattggtcgttgagttggatattttagtcaacatttattaagcccgtgcctcagcagtagttgacttttgtctaaagggaaagaaagaaattctagttttcccaaacgtccaaggctccatccaaaacatgctgaatcaagatttccagaagaaaatcctggcaacttggatatttaataggtgctccaggttatcaagcatatttgaacacagtggcccaggtgctgtatctcaaagtgtgagtctgtggactggcattgtctccctcactcaggagctcatcaagacaggcagaatctctggtcctgttcgaggctattgaatcagaagctgcattttatttagcaaggcccccaggcgactcctgtgcacatttatagttgaagggctagtggactgtggtgacaggaacatatttggtgcgtgcagggccttgttctaagaacccatgatgcttgggcacagtggagcatctcatcagtccaattgttgggcgaaaagctgaggcaacacttgctagtctgacataatataaagagtcttggaacatgtcctgggtccagagtttgaaacctcttgtggcctatggaacaccaagctctgtacttaagagtggaaggctgccctgccgcactacaacctaagcccagggcataaaacccctcgtggcttggatggaatccagggctcagggcataaaacccttcgtggcctctggaatgtgtccagacttgctggctccttgcttcttgctctcccaggatcataaattgattgtatcttcaaaacaaataaccccattaaaaatgggcaaaagatataaacgtacacatctcaaaagaagacataccagtggccaacaaacatatgaaaacatagaactaccatttgacattgcaatcccattactgggtatacatccaaaggaaagtaagttctaccaaaaggacacatgcactgtatgctcttctcagcaccattgacaataggaaagacatagaatcaacctaggtgcccatcaatggtggactggataaagaaaatgtggtacatatacaccatggaatactacacactcataaaaaaattaaaatcacggctgggcgcagtggctcacgcctataatcccagcactttgggaggcggaggcgggtgggtcacctgaggtcaggagttcaagagcagcctggccaacatagtgaaactccatctctactaaaaatacaaaaattacccaggcatggtggcaagcacttgtaatcccagctacttgggaggctgaggcaggagaatcgcttgaacctgggaggtggagtttgcactgagccaagatcatgccattgcactccagcctgggcaacaagagtgaaactccatctcaaaaaaaagaaaaaagaaaagaaattatgtcctttgcagtatcatggatgcagctggaagtcattatcctgagaaaattaatgcagaaacaaaaaaccaaataccatatgctctcactcataagtgaaagctaaacaatgggtgctcatggatatcaaggtggcaataatggaccctggggagttctagagggggcacagcagaaaagggcacaggttgaaaaactaactattgggtcctgtgctcagtacatgggtgatgcgatcactcacaccccaaacctcagcatcacacaatattaccaataaacctgcatatgtacttccaaatctaaaagttaaattataccaaaaatctaagctcaaaaagaataaaagtcttttgcccattaaaaaacataataaaagaatacgaatcatcctatatcagaaatctatgttaatgcaatttatcatattcatcaattaaagaagacacaccttacaattatctcaattagtgtaggaaaaagcattcactaaaattcagcctgcacctgtgactttaaaaattaacaacaactaggaaacttccttaactcaacaaagagaatctacccaaatacctaccaggaacatcatattaatgacataatattgacagcattttcttcaaagcctggaattaaacaaaaatgtcctctcttctttgcttccatttaacaatatactacagagcctaaacagtgtagaaagtcagtatagtaagtaagtctacagaatagctccttaatctaatgagagagtttaggaagatttctagatgcaggctcaacataaacaaaaaataatagctaagtcaaggatgcggttgaaatctttacagtaattactaaaaacagaaaatgagtatatgactttgaaggtaatgatagagggtgagaaggaaagaattacattattaaaattcaatcaaacaaaagtagaacatcagtaggaatatagaagggttaaataaaataattaacaaatagatgtacatagaacactgttctcaacaatgcataatacatgttcttttcaaatgtacagaaaacatttgacagtattgaccatattctgggccgtaaagcaagtctaaacaaatttcaaagaactaaaagaaaaaaatacatagtatgttctgtgtccacaacacaatataatcagaaatcaaaaatttaaaaacaaaattctcatatgtttggaaataaggaagtatacttctacataactcatgggtcaaaaaaaaaaaaacaagcacagtcaaaattggaaaatagtttgaactaagtaaaataaaaacaatacaaataaaaatttatggaatgaagctaaagcaattcttagaggaaaacttgtagccttaaatggtaaatagaaaagagagtggttgacactctaagaattatccatgtcaagaagtcaggaaaagaacaaattaacccaaggactacagaagaaaatactaaatatcatagtaattgatgaaataaaaaatagagaccaccaataaggccaaaaatttggtacttttaaaagactagtaaaattgataaatccctggtgagactaatcaaaagaaaaaaggggagaaggcaccaagaaagcaatgtcaggaataaaaaagggaacacctctgtagacattaaaatggtaaaatgatattgtgaacaatttgatgtcaagacatttgcaaagttagattaaatggacaaatgctgggaaaactataatctaccaaaattggcaaaagaaataaaattataaaaacattctatatatggaattgagccataatttaaagacttctctccagagaaaactctaggccaatgtgcgttcactggtgaatttcactttacacttaagaaggaaaaaaatcagcatgcataaatttacccagagaagaaaaatagagaaaatgaaatgtaactcattttatgaagccaaaatttgaaaaaactgtgagaaaggaaaattataaccactctcccagatgacatgaatttgaaaatcctaaacaaaatattaacaaacagaatctggcaatttaataataaaattatttaataattatttaacaaaataataaagcacaactaaattacatttattccaggaatatgttggtttaccacttaatcaatgtaattaaccacatcatctcaaagattcagaaaaatctttaaaaattcaacatccactcatgatttaaaaaaaaaaaaactcttagcaaactaatttcttttttctttttgtttgttttgttttttgagacagagtttcactctgtcatccacgctggagagcactgtgcaatcttggctcactgcaacctctgcctcctgggttcaagtgaatctcatgcctcagctggagtagctgggattacaggcatgtgccaccacacctggcaaatttttgtattttttagtagagacagggtttcaccatgttgcccaggctggtctcgaactcctggcctcaagtgatctgcccatcctgggcctctgaaagtactgggattacaggtgtaagccatggtgcccagccaagaaatttcttaatctgataaatggtagctcacacacacacacacacacacacacacacacacacactcgtaaagcaattggggagatgttgaaagcctttccctggagaatggaactatatgttgatggctgctattgccacttctaattctacactgtactgaaggttctagccagtgctaggggagagaaatgactgaaatggaaaaaatacaatttactatttttatatgatgtaatcatgtaccataaaatccaaaagaatctatagataaattagtagaactaataagtgagtttaggctgggcatggtggctcaggcctgcagtcctagcactttgggaggcagaggctgaggctggcagatcacttgagcccaggagtttgagaccaacctgggcaacatagcgaaacccaatctgtacaaaaaaataaaaaaaatcacctgggcatggtggcacctgcctgcagtcctagctactcaagaggctgatataggaggatcacctgagcccagggaggttgaggctgtagtgagctgtgatcatgccactgcactccagcctgggtgacagaaagagaccctacctcaaaaaaaaaaaaatgagtttaggaaagttgctaattgcaagattaataaataaaatgagctgtatttaaaacaacaaaaaacatttagaaaatatttttaaagggatatcatttaaataaccataaaatatcaaatatcta

SEQ ID NO: 94139 - DNA, 147237 bp, Homo sapiens
  misc_feature (1)...(147237): n = A,T,C or G
acaaaaatagaatcacaaataaaacattaacaatcttaagtatccagtccatattcaaaatgttttcatatataaataatttttttttttttaaagacagagtcttgctcttgtcacccaggctggagtgcaatggtgtgatttcggctcactgcaacctccgacttctgggttcaagcgattcttctgcctcagcctcccaagtagctgggattacaggcgcgcaccaccacgcctagctaatttttgtatttttagtagagatggggtttcaacatgttggccaggctgctctcgaactcctgacctcaggggatccacctgccttgcctcccaaagtgctgggattgtaggcgtgagccaccacgcccggccacaatttttttaaaaattaatttgttgattttttttgacatcagaacccaaagtgcactgcatttggttgatgtgtctcctgtctctctctctctctccctctttatattgtagtaaaatatacatgagaaattgacaattttaagcattttaaagtatacagcttagtggcattaagcacatttacactgtgtggaaccatcacaccatccgtctccagaactacttctatcttaccaaattaaaactctgtacccattaaattaaactcctaatttccccctcccccaaatccctggcaaccactattctaccttctgtctttgcgaatttgacaactctgggtacttcatatatcctaagtctcttttcatcaataagttcccacttcctctttttcttcccttgcaattactgtatttgtggatgaaattggcagattctggattttgccatttacatccccatagtgttgtttaacttgttcctttatcttctttttcctataagctggatgtagggaatttatttatttatttatttatttatttatttatttaagacggagtctcgctctgccgcccaggctggagtgcagtagcgggatctcggctcactgcaagctccgccccccgggttcacgccattctcctgcctcagcctcccgagtagctgggactacaggcgcctgccaccacgcctggctaatttttttgtatttttttagtagagaggggatttcaccatgttagccaggatggtctcgatctgacttcgtgatccacctgcctcggcctcccaaagagctgggattacaggcgtgagccaccgctcccggccaatttattcatttttaaatatcatttgaaggtagagtggacaggacttgccggccaattgaaggtggagtatgagagagaagaatcaaggatgacgccaaggtttttggcctgagcaagtggaagaatggagttgccattttctgagatggggaagaccgtgggaataggtttgggaggggacaatctgcttggacattttaggcttgagatgtttattagacactcaagtggagatgccaggtgccaggtgaatatgtgagcctggagttaatgaaagtggctgcagcaggagacataagtttgggagttgtcagcagatagatgacatttaaagctctgagactaaaggagatcaccagagaagcaaatgcagattataagagagagaggaggggagaagttcgaggactgagctttagtacttcaatattaagtgccaggaaaattgaggaggaaccagcaaaggagactgagtaggggcatccagcacaataggagaaaatctaggttagtgtggtaccctggaagccaatcattctaaggaggagattatgaaacatgggtcatatgtcatggataggccaagtaagatgaggactgggaattaattattattgggtagaaaagagatgccctcccccaggcatggtggctcacgcctgtaatcccagcactttgggaggccgaggtgggtggatcatctgaggtcaggagtttgagaccagcctggccaacatgatgaaaccccgtctctaccaaaaatataaaaaattagctgggtgtggtggcatgcacctgtaatcctagctactcaggaggctgaggcaggagaattgcttgaacccgggagatggaggttgcagtgagctgaaagtgtgcctctgcactccagcctgggcgacagagtgagactctgtctcaaaaaaagaaaagagatgccctcccttttgatgctctttaaacaaatcatgtataattaaattaaaactcaatggccaggtgcagtggctcacgccactttgggaggccaaggcgggtggatcacctaaggtcaggagttcaagaccagcctggccaacatggtgaaaccctatctctactaaaaatacaaaaaagtagccaggtgtggtggcgtgcacctatagtcccagctactcaggaggctaggcaggagaactgcttgaacccgggaggtggaggttgcagtgagccaagacggcaccactgcactccagcctgggtgacagagtgagactccatctcaaaaaaaaaaaaaaaattaggccgggtgcgatggctcaagcctgtaatcccagcactttgggaggccaaggcggggggatcacgaggtcaggagatcgagaccatcctggctaacacggtgaaacccgtctctactaaaaataaaaaaaaattagctgggtgtggtggcgggcgcctgtagtcccagctactcaggaggctgaggcaggagaatggcgtgaacccgggaggagcttgcagtgagccaagatctcaccactgcactccagcctgggcgacatagtgagactccatctcataaaaaaaaaaaaaattaaaaaaattaaatctcaaaacaaagttcccagggaaacattcttttcatgtataggaattagtggagtgtgatgtcatagtaataagagaggttagtggttaagagcagaggcttggaaattaggaaacctggatttcagtatcaagctgtgtgatcctgtgcaattaatcccctaagcatcaggattctcctctgtaaaataggaataataagagacccttctaaatgtggctcttgcaggaaaaacatgagataagcatacttttatgccagtaaaggacttagcaggatgcctggctcgccgtaagtacccaacaaattgttggctattataaatatgataggatgacacaggtaggcacatgactctcagatacttttgcctaggtgtttaaaataacaggaaagccatcatcttagttaaatacatgtactaaatagagaaaaatacatgacagccacagttggaattttgatgataaaatggtaattttaacataaattgaatagcatatttaaaaaaaaaatctctgaaacagtcattccagtggaaccaaggaactgtagacctggctcgcagagggagggaactttgcttttaaagggtcctggcttagttgcattagttactacagacaccaaacacttggatgaagttgttattaggatttactttagggccgggcacggtggctcacacttgtaatacgagcactttgggagactgatgcaggtggatcacctgaggtcaggagtttgataccagattgaccaacatggtgataccctttttctactaaatacaaaaaattaggcaggcatggtggctgatgcctgtaatcccagctacttgggaggctgaggcaggagaatcacttgaacctgggaggtggaggttgcagtgagccaagattgtgccattgcactctagcttgggcaacaagagcaaaactccatctcaaaaaaaaaaaaaaaaaaaagagagagagagagatttactttagctttgtgcaatgtctgttattaaaagcctttggtggccgggcacggtggctcatgcctgtaatcccagcactttgggaggctgaggtgggtggatcacaaggtcaggagattgagaacatcctggctaacatggtgaaaccccgtctctactaaaaataccaaaaaaaattagcgtggtggtggacgcctgtagtcccagctactagggaggctgaggcagaagaatagcgtgaacccgggaggcggagcttgcagtgagccgagatcgtgccactgcactccagtctgggcaacagagcgagactccatctccaaaaaaaaaaaaaaaaaaagcctttggttcagttttatttgttttctgtgtttaagcaaataaacacccagtgttttccaagagcattttgactctgggctgctctccagagaagcaggatataagcttgtccacaaacccaaatgaaaacaaagggcccacacaattgccacgcatctggtgaccagacaagttcactaaatctcagctggggtggaagttccttgagaccagggaatttgagtcaccttgtaaccctaaacaaagccaggcataagttggatgcttaccatatgttagttaattgaaagaaggaaaaacagagcactgcactgatagagaacagtgactgtgcacctgatgtgccgcaatgtggtttggtgttaaaaaaaatcactctcattcattactagtaggagttcaaatgggaaccacagttccaaaaaagcaattttggcaacgtgtaatgacagccttaaaactataaacacaaagatgttccctgcagccttattcataatttttaaaaataaaaaacaaactaaacatctaataataggctatgtaatcgtccagtagctctagtggatggactattacattattataattattcaaattaatattttcccgcttcttccctgctttccttcaagaggtgggggaggccacctggcccaagctgaaggccaagatacaagaaaaaaatgcaaaggttctattttggcagcgtttacatgggcagggtgtcgtggggaggctggcggagggagtgggagcaggtgacagagaatatagggtaagttagaaggctctcagtgctggtaaaaataaaatagagtaaagtaaagggtgggggtagagttgaggggggcgtgatcagatttctgttcaaataggatggtctttttgctgtgaacttaagactgctctaaggccaggcgcagtggctgacgcctgtaatcccagcactttgggaggccgaggcgggcggatcacaaggtcaggagatcgagaccatcctgcctaacacggtgaaaccccgtctctactaaaaatacaaaaaattagctgggcatggtggcacacgcctgtagtcccagctactcgggaggctgaggcaggagaatcgcttgaacttgggaggcagaggttgcagtgggctgagatcgcgccactgcactccagcctgggtgacagagtgagactccgtctcaaaaaaaaaaaaaaaaaaagactgctctaaaaaataaagtgtattaaaaagaaactacgatgttcagtgtatgcttcatctacggtcaaagaggcaaagactgaagtgacagtggaagccaggtggttatctgggaggcttacaagactatgtgatagtatggaaaatactagtattaagtgaaatgctggatgcaaaactatgcatagaggggaaaaactggaaagaaatagtaaacacagcaaaagtagtttgtgtgaaggataaattttttaaaattattttttgtagaaacagggtttctctacattgcccaggatggtctcaaactcctgggctcaagcgatcaatcctcccacctcggcctcccaaagtgcacaggtgtaagccaccgcgcccagccgaaggataaggattttgggtggtgcgctcttttctcctttccatttctgcattttccaatttacctttagcgaccgttctttcctgttaaaaaaaaaaaattcacgaccttgaagaagatacacgggctatgacttcgctgttgtcaccgagcgccccgcccaccgcgttctccgacccgcggccggcagggggctcgcggcctccgccaggcgtccttcggctccgtcagttcccacagggccttgtgcgacatgggctgcgccgagggcaaggcagtggcggcggccgccccaacggagctgcagacgaaaggcaagaacggcgatggccgccgtaggtcaggtacgaccgagggcgaaggcctggtccccaggtcgacgggccgaagcgggccttccggccggggttggggataaagtgccccggagccctggccttgaagcccctcactggagtcagtgactgaccgcgcgccacgctggagaccccagaaacgctcccccaggtcaccccgggagacggaggccggcggccggccgagggctgccccgcccgctggctgtgagagaggtgggaggtggaaggaggagcgggcccgccgcgaggacctgcccggaaacctgtcggaaaccgaaccgagatctcggcagcgacccgcctgatttcgctcagggcccgttagggcgtcctcttcctacaagcaccgtgtttccaatgaaaggttacgggggaagcgaccaaaccgacagccgagtccgggggtgccccttcacctctccagaagcccccggcccactcccagcatcctcctccatcgagaatcttgtccgacacgccttcccggccccctttctccatccccttgaattttgggcacatttctcccaccatcatcccgctttatcctttcacttgttcttccagaagagaaagctcccagtctcttctccattgtccggataatgccaataatggctagtggttactaagcactgacatgagaggggcctttggaagcactagacatgggtaataatcttggttcatgtttccagccatactgagagatttatcataaaccccattatacagatgaagaaactgagaagcaaagaggttataaaacttacccaaagcacacaactastaagtggaagagctgggataccagttgaggccatctgactcaaaagccctggtcatagtcatatggccgcctccaccttttttataggcttgagaaagtgaggctccaaaaagtgccttgcccaatggctagaattattaaatgctgtaggatctgcctctttcaaaggcttacagtttagttacaaggcagcatatggtgaagggctaaaaggagtggtaaaaacagccaagtggggatggcagctcccatagatgaggtaggatttggtagaggtgtctgaagggagaacattcttgttaggggaagcagccggtgagaccatgctagagatagggaggcctgtatatcctgctggagttaaggacttggattaggggaagggaagaataaaggaacagggtaggagcaaggtcaggcaaggtccaggtcaggcagctaatttgtggccattagtacaatgaaggagtttgagcaggtgcatcccaaattgacgtttcatgtgccatcctcaggatcttcttgatatctatgtccttccatttatttactgtttttctttagctacattctttttgtgtgtggttaaaaaaaaaaaatttaccatcttaacaattttgtttttttttttttttagtttcgctctcgttgcccaggctggggtgcaatggcgccatcttggctcacctcagcctccacctcccaggttgaagcgattctcctgcctcagcctcccaagtagctgggattacaggcatgcaccaccacgcctggctaattttgtatttttaatagagacaggttttcaccatgttgttcaggctggtcttgaactcctgacctcaggtgatctgcccacctcagctccccaaagtgctgggattacaggcatgagccactgcacccagctgaccctaaccgtttttaagtatacagttttcagcagtattaagtatattcacattgttgtgaagcagatcccctgaactttttcatcttgcaaatctgaaactccatgccaactcgttaacttttcatttgccgtttcccccagcccctggtatccatcattctactttctgtttctgtgaaatttggctactttagattgcttatataagttggtatcatacagtgtctgtctttttgtgactggcttgtttcacttagcatacttgtcttcgagtttcatctgtattgtagcatgcgacaggatttccttactttttaaggctgaataatattccattgtgtgtgtgtatatgtacatacacacacacatatatacacacacacacacacaaaatggaatatatatacacacacacaccacattttttttttcccgagatggagtcttgctctatcgccaggctggagtgccgtggcatgatcttggctcaccacaatctccgcctcctgggttcaagcaattctcctccctcagtctcccaaatagctgggattacaggcccgccaccatgcccagctaatctttgtatttttagtagtgacggggtttcaccatgttggccaggctggtcttgaactcttgacctcgtgatcttcccgcctcagcctcccaaagtgctgggattacaggcttgagccaccacgcccggcctgaactattttataatacagaaaagctcactcgttataatacaacttgctaaatttttacaaacgaagtatatgcatgcagcccacactcagctgaggaaataaacgtttccagtaccccaggagcccctctaatgtctcttacccccataccaagggcaaacactactctgatttctaacagcatagaagaatttcacctatttacatttactttttgaaacttaaatttaggcatattttaagcattaatctattaaagcacggctttatactaggtatttttctttttcttttctttcttttttttttttgaaatagggtcttgctctgttgcccaggctggagtgcagtggcccaatcatagctcattgcagcctcaaccgcctggtcttaaacaatcctcccacctcagcctcctgtgtggtaaagtgtgccaccaagcccagctaatttttttacattttgtagagatgaggtcttgccatgttgcccaggctggtctcaaacttctgggctcaagtgatcttcccaccttggcctcccagagtgctgggattacaggtgtgagccactgtacccagcctagatatttttctatacacatacatatatacataatgatgattattatttttctagagatgggtctcactctgttgcctagattagagtgcagtggcatgaatcatagctcactgaaactgaactgctgggctcaagtaatcctcctgcctcagcttcctgagtagctaggattacagggacacaccaccatgcctagcctcaattttaaattttttgtagagataggtctcactaagcaacagccccatctgatctcgaacacctggcctcaagtgatcctcctgcctcagcctcccaaagtatactgcaccaggcccatattatacataactattgacattaaaaatgttcttttgtgtgtcacctacaaacactctagaagccaccttccttaagtaccatatgatctctaagttccttctcaaattaaaattatgtggttaagtttcaagaaactaatttcttaatgatgcagaaggttttgcttgaatgactcttcaaccgagcatctattatttatcaggcactgggaactcagggataaacaaggcatgatctcagtccttgaacatagagtctcgtggagaagaatggcgtagaaaatgcagtgtcatgatgtgtaatcataaaagtagatgggtacacaccacttcaggagaatggcagagggagttaacatcttggcacttagcrtttagtatttcttctgtaacacacattccattctattttaatgagcttgcaaacatttttcctgctggatttttgaggatcaggaatgtgttttgttcactatcttatctcctacagtccttggcatactgccctacaaatcagtaaatgtgtttatatgactcatatggcaaaaggcaatttttttttttttaataagtgaggaatgttccaaaagccaatgctattaacattgaccagcttcttctagtaaggagaggagacagtattttttcaaagtgcggtcctaagaccacctgcaagagaattaattacatgctgggaatgtgtagattaaaaactcattttcctgttctccatttcagacctactaaatcagcctcagagtgaaggaagcttcatttttggtgtctcaagtgattctatttgaaccaaggcctgagaacactgcagtgaggtgtttaggccagcgtcaaatcacctatttctgggcagaggtgcctatccttagcaatggggctgaggctggggtggaggttgctactgcagatcactgaggctgataagggtgagtcagatgccccaagaggaaattgaaagctttggaatggaaccaaagatcgtgactgacatgcagtcatgcaatctgcaatcagaagttagtattacacgatgcgctagataattgtagagtaatcttgctttttgttgattttaaccaggtaatttaaagtcattactcattatttggattttcacatttgaatgtttactctttgtattaatgtgtactgagtatttaaagcttttaaattagcttttttaaaaagtgtattttaggccaggtgcggtagatcatgcctgtaatcccagcactttgggaggccaaggcgggtggatcatctgaggtcaggagttcgagaccagtctggccaacatggtgaaaccccatctctactaaaaaaatacaaaattagctgggcgtggtagcacacacctgtaatcccagctactcaggaggctgaggcaggagaattgctttaatccaggaggcagaggttgcagtgagctgaggtcgtgccattgcactccagcctgggtgatgagaacgaaactccgtctccaaaaaaaaaaaaacgggggggggaggcggtattttagatttacagttggattaaatccttgaaagaactcaaaagaaggaattaatctgttaatgccttttctttaccttcataaaacatcagggaatatttcatgaatattccttatatcctactttctagctctgagcattactttgctggtagaaactagtctacatgtatataactataaatgactatcacaaatcactctttgatgttaaaaacaaactatctggctggttgtggtggctcatgcctgtattcctggcactttgggaggcccagctgggaggattgcttgacaccaggagttcaagaccagcctgggcaacaaagtgagcctcagtctctgcaaaaacaaatagctgggcatggtggcgtgcgcctgttagtcacacctgctcaggaggttaaggtgggaggatcgcatgagcgtgggaggtcgaggctgcagtgagccatgatcaggctactgcactccagcctgggtaacagagggagaccctgtctcagaaaaacagcaacaaatctacctgttgggtttttcgtttgtttggatttttattttattttattttattttgagacggagtttcactcttgttgcccaggctggagtgcattggcatgatcttggctcactgcaaactccatctcctgggttcaagcgattctcctgcctcagcctcccaagtagctgggattacaggcatgcaccacaacgcccgactaattttgtattttttgtaaagacaagggtttctccatgttggtcaggttggtctccaactcctgacctcaggtgatctgcccacctcagcctcccaaagtgctgagattataggcatgagccaccgctcccggccacctgttggttttagtggtagtgcagtggttttcagctttcaacattcaagtacgctcccaactttgacaaatatagaaaagttatttttgccacaatttagtgtgtttatggaaggtgtatacagaaacttcagatgacagtgtctgttagatgaaaaactgagctgggcaggtggtgggaagttgtatagacccagaaataacttgttatgggaagaattaagaggccacaattaatgggttgaaaattaaaaatctgcagggacaggcaggtcatataaatgagtgacccaggcaggtagtaaacagcagggagtggtggagactggggtggactgaggagagaatgctgtacagacagggcaatttctactgagcttccctttctttgggtgggaaaatgagtgtagtgtggccagacctgctttttttcaagagaaactagaaatctctatttatcatttttgtgacttccccagcttgtgaatgtcagcagtaatgcaattaagcaaaatactgagggtcaaacaagatgtgattgcaggtaaatatggtctgtggatgtgtagaataatgtcaagctggcacacatttaaaaaatgagaaaaagatggtgtcttttgaatgtatagaagtggctgggacagaaaacagtttttcttagatagtaacacagtgcagagaagtgtctgagtgaacagtgtaaatgaccgctgtcaaagtatggttttcgaaacgttaaaaatatgatcttgtacagaaaaaaaaacaggtatcaaaacttagtcattaattaaaccaataaatgaaagaaccaataaaatggtaaagctaatttaaaggcaaattcaaggactagggacatataatcaaagaaatgatgaattgaatttgctagtacagtagttacaaagctggttaatgtctcacagagcaataaaactaacttttgggccagatgcagtggctcatgcctgtaatcccagcactttgggagactgaggcaggcagatcacttgaggtcaggagttcgagaccagtctggcgaacatggtgaaacctcatctgtactaaaagtacaaaaattagccaggtggtggcatgcgcatgtaatcccagctactcaggaagctgaggcaggagaatcacttgaacctgagaggcggaggttgcagtgagccgagattgcactgctgcactccagcctgggtgaaatagtgagactctgtctcaaaaaacaaacaaacaaacaaaactaacttttgggattattgagcagaaatgtacgagttaacatgaaacttcagtgtctaggctgtaataaaatagtaaacagcaaagtcaagtacagatacactctcttaagaaaattaaatgatccttgggtgggcttgttaaacatggtccagtatgacattgaaaggacatttagtcaacttctttctttacttccaagtttggacatttttcttaagattgtggatattacagtgtagctatggctgccttgagattattgctcacttatatagtggcattttaagctgcttaatcccctcaaatgtgctgccaaaattctactttttcaagtatgtgcagcagcttttctcaagtatgtgcatttaaacttttaaaaatgtttaaaacaactgtgagcaaatcgaaggcttgctgcactctatatagggtcaatgtttcattaagtgctttatcacaaagatttgtttagaagtgggcacaaggctcttggtcatcaaattcgttttaggtttagagaagtaatcttacctcttggagcaagagctagatttcactcttttatgtrtagagtgagatcaaggaagaaggggaatagaaggaatagaacttagcaaacagctccccactcccaagtcaagtttgttagaaatgtaacactggactaccattgttgggagaccaaggagcatggtttcgctgtaccattcctttcacgggattccatgggatctttctagatgtgctggactggtaaaaatccttacctgtgggaagggagggtgtgtccagttgaagcagaataaaaggaaagctaaaccgggaggtgacccttgatcaagcactgggaaaaagtggtaaaagctcttgaatcactcactgagaggcagctgaaggtggggactggtgaggagggagcatgaactgctgcatctggcagccagctttggggaccagtggctggtgcagacttgctaaggagtgctaatggtgtttattaaaacaacaacaaaagcaatttagttactctggccctgggtgtgggcagagtagtgtgggaaggggagagggcagattgcaaaggaaatatatgtgagattgtttctttttgcataggcactgatgcataaccattcgcactggattagtcaaagctgtaactcctgatgaaatttctttaaggatgaaggacgtgtgacaagtttaggtctccttttaagcttgtggcacaagttttttttcccctgttccctgaccttgccagactccctcactcatctgttcatgaatggttgttctcttttacctaaaatatccttccttctctttgctgggcaaactctcctcacacatcaagacccagtccaaatgacagttttgtaattccccaagtagagatagttttgccctttctggacatctgtggctcttctcattttttttgtaggacatatagtgtattgtgtagcattctattagactgggctcctgggggtaaggatgtcttgtttattttttatttatgtttttttgaaacagagtcttgctctgtccccaggctagagtgcagtggcgcaatctcggctcactgcaacctctgcctcccaggttgaggcaattcttctgcctcagcctcccgagtagctgggattacaggtggccaccacacccagctaatttttgtttttttagtaaagacggggtttcaccatgttggccaggttggtctcaaactcctgaccttgtgatctgcctgccttggactcccaaagtgctgggattataggcatgagccaccgcacctatagctgtcttgtttagagttgaatttcctgtttgggatagttcatggcacatagtagatgctcggtaaatgttcaaatatagttgtgtcaagttattccctcctgattttctcccccactgtttgatcaacccaggaatctctttcccccttggaaacttcttttatctacctctctgcccctgactcactggaatcctacaaatgggacatctcaggcaggtaaaattgccattgttatgagggtgagagaatgcagattttttacagtgtatttccaatgtcccatatggaacattgtatttcccagtaatacagtttttttgaaagaggggataacaccaaagtagtcttgttaattagataatatttattcatttaatacttactaaccatcttccatatgttaggcattgttgtaggtgctggggatctgtgagtaaatatgcccatatggagttgttttctagagtaatgtagaacttctgagagctttaataaaaaggagtaacatttattgaatgcttattatgatccaggtactgtgctgagtgctttatatgtattaacacatttaatcactgcaagaggcaaatgaggaaagtgaggcccagagaggtaacaagcatacaactattaagtagtggagcgaggattctcatgctggaagctagtgtacttaacyactgtgctctactgccttgcttaatagagtgattgggcacgtctaatgaaaccttggtgatatggtttagctctgtgtccccacccaaatctcaccttgaattgtaatgatccgcatgtgtcaagggcagtaccagatggagataactgaatcatgggggtggtttctgccatgcctgttctcatgatagtgagtgagttctcatgagatatgatggttttataaagggcttcccccttcacttggcactcattctctctcctgccaccatgtgaagaggtgccttctgccatgactaaaagtttcctgaggcctccccagccatgcagaactatgaatcaattaaacctctttttttttttttttttataaattacctagtctcagatatgtccttatagcagcgtgagaatggactaatacacctggattcctccatcccttcataagacctgaacaggaagcactgtttcccattaaaataagcagttgaaataaaatcaaactttttagtggattaccagtatctggaaacaatagaaaaagragcttatgcygggcacagtgtctcacgcctgtaatcccagcacttcgggaggccaaggtgggcggatcacctgaggtcaggagttcaagaccagcctgaccaacatggagaaaccccatctctactaaaaatgcaaaaaattagctgggcgtgtggtgggcacctgtaatcccagctacttgggaggctgaggcaggggaatcatttgaaccctggaggtggaagttgcagtgaaccaagatggcaccattgcactcaagcctgggcaacaagagtgaaactctgtctcaaaaaaaacaaaaaaagaaaaagaaaaaggagcttattcataacagtttaaccttatatttagggacaggtagacagttatacggatgctgaagacagccaaaaatgtctagcttaggttgtagatgctgaacgctgtgggctcactgacccttgcctatgaagcactgtagaatacctttatcacttcatttccataagttcagttatgtccctggaatataatcttgaagcagaagagcctgatawaataacagtgtagcctctaaggttgatccccaatatragatgatctttacagagatctcctgttatatttcaggctacttatttagattatggctccacaagtcatttgaggcaaagtggaaagagaattagagtgaagagaacggaattctagtttctgttatatccttaaatagctgtgtgattttagacaagttccaaagcacctatgcgccttagttccctcatttgcaaaatgaagtgaatggatgaatattaagtcctctcaagctgtaaaattctgtaggtctgtctcccataaaattaaaattaggcccgtaaatgcgtagaaaatgtaataattccaaataaaaatacctagcatttttggattccacaatagcaaggtaatttcccatgtattatctaagaygtgtctttttttccggtcttggctcctggaatgcatgcctgaatgactactaaggttttaactcattcactttattttatatggtaagtcagtagctcaagatagtaaggaataacttgctttaaagtaataaatatgttaagacccaaaagactgtcaattatatttggaaaagatttgggtagaggaatttgctacattcaagtacatttctggaaccagttatctgaaagtagtgatccttaaattcatgtcctcctcctaagatctctagtgcagtgttttataacaactgctgagtaacaaatatatctagtaggatatctttttaattttatttttaaaattggtatacaaataaaatagatttttggtgtccttttaattttttattatttattttaatttatttctttttggagaaagggtcttgctctgtcacccaggctcaagtgcaatggtgtaattatagctcacagcagcttcaaactcctgggctcaggtaatcctcctgcttgagcctcctgagtagctatgaccacaggtgagtggtaycatgcctggctaacttttttatttttatttttatagaaatgaagtcttcttatgatggccaggctggtctcaaactcctggcatcaagccatcctccctcctgggcctcccaaagtgctgtgattacaggtgggagccaccgtgtctggcctttggtgttcattttatgaattttaacatatgtatacatgatcgggttacataacagttccgttaccccacaaaatttcacccatgctatccctttgtggttacagcctccccagttgattaggatacaactgtattccaatctctggagccactgacctgttctccatcaatatagttttgtcttttcaggaatgccatataaatggaatcacaaaataacattttgagattgattttttcacacagcataatacttttgagattcatctaatttgtcatgtgtatctatagtttacttcattttattactgagtggtattacattatacaagtgtaccataatttttttgtcctttcattcattgaaggatatttagattttttccattttttagtgattatagagttgctataagcattggtatataagttttttaaaaattgatatataaggctgggtgcagtggctcacacccgtaatcccggcactttgggaagccgagcggggcagatcacctgaggtcaggagttagagaccagtctgaccaacatggagaaaccccatctctactaaaaatataaaattagctgggtgtggtgttgcatgcctgtaatcccagctactcrggaggctgaggcaggagaatcacctgaacccagaaggcggaggttgcagtgagccgagattgtgccactgcacttcagcctggcaacaagagcaaaactccatctcaaaaaaaaaaaaaaaaaatcggtatttgattaacataccataaatataggccggttgtgatggcttactcctgtaatcccagcactttggaggctgaggcaggtggatcacctgaggttgggagtttgagaccagcctgaccaacatggagaaaccccgtctctactaaaaatacaaaattagtcgggcgtggtggcacatgcctgtaatcccagctacttgggaggctgaggcaggagaatcgcttgaacccaggaggcagagattgtggtgagccaagattgcaccattgcattccagcctgggcaacaagagtgaaactctctctcaaaataaagtgggggcggcaggggaataaccatttaaaagtgcacagtttagagtgcaaccttcaccactattgaatttgagaacattttcttttcttttttttttgagacggagtctcgctctgttgcccaggctggagtgtaatgatttgatctcggctcactgcaacctccgcctcccgggttcacgccattctcctgccttagcctcctgagtagctgggactacaggcgcccgccaccacacctggctaatttttggtatttttagtagagatggggtttcactgtgttagccaggctggtctcgatctcctgacctggtgatccccccgcctcggcctcccaaagtagtgggattacaggcgtgagccaccgtgcccagcctagaacattttcattactccaaaaagaaaccccatacccattagcagtaaattttcactctttccctagcaattgctagcctactttctgtctctatagatttgcctattccgagcattacttttcttttttttttttttttttgtgagacagggtctcactttgtcacccaggctggagtgtagtggtgtcatcttggctcattgcaacttctacctcctgggctcaagcaatcctcccacctcagcctcctcagtagctgggactacgggcacacaccaccatgtctggctaatttttgtatgttttgtagagtcagggtttcaccgtgttgcccaggctggtcttgaactcctgagctcaagtgatttgcctgccttggcctattctgggcatttcttataagtggaatcatacaatctatggtcttttatgagtggcttctttcacttagcataatattttcaaggtttattcacattgcagcatgtattagtacttctttttattgttgaataacagtgcattgtatgaatatacaacattttattttattttattttattttattttattttatttattttttttgagatggagtctcaccctgtcgcccaggctggagtgcaatggcgagatctcagctcactgcatcctctgcctcccgggttcaaccgattcttctgcctcagcctcctgagtagctgggattataggcrcacgctaccacgcctggcyaatttttgtatttttagtagagatggggttgcaccatgttggtcaggctggtcttgaactcctgacctcgtgatccacctgcctcggcctctcaaagtgctgggattacaggtgtgagccactgtgcccgggcaatttttatttctattttaaccacttcttggacatttgggttgtttccactttttggctgttatgaataatgctgagaaccatcatgtacaagtttcatgtacacatgtattttttatttatcttaggcatatactttgaaatagaattgttggaccatatggtaactatatgtttaacatttttttcattttttttgagacagattcttgctctgtcacccaggctggagtgcagtggtgtgatcttggctcactgcaacctccacctcccggttcaagcaattcttctgcttgagcctcctgagtagctgggactacaggtgcatgccaccacgcccggctaatttttgtattttcagtagagatggggtttcaccatgttggccaggatggtctcgaactcccaacctcaggtgatccacccaccgcagcctcccaaagtgttgagattacaggcatgagccactgygcccagccatgtttaactttttgaggaatttctaaactgtttcccaaagtgtctatactattttacatttctgccagcaatgtattagagttccaaattttccacatccttgttaacactagttattgtctatcttttttattctagccatcctagtggtgtgaagtggtatctcactgtggtttgatttgcatttccgtaatgaataatgatgttgagcatattttcatgtgcttactgtttatcttctttggataaatgtctgttcaaagtctttttccattttttaattgggttttgttttgttttgttttaaggagcagaaagtttaataggcaagaaagaaggaagaagctcccccatacagagacagagggaaagtcaagaggaaaccctgtgtggggcagaaaagtggctacttatatgaggaggctggaggaggtggtgtctgatttgcatagtgctcagtggattggtttgatcagcatgtcattcacgaagcccctgaaaaatctggccctcacaccctagccttttaatatgcaaatgcagggcgccatgatgttttacacacgtgaggatgtgtgggggtgaccatgttgccaggcacatgtcggggcaagggcaagaaaaagagggtgggaatcaccatgtttgggtggactcagtttctaatggcttgcattttcatatcaaaggttgcctgcccggctctaagagcccggtcttccctgctagacaagaaacatttctggagctgctttaaaagaaacgaaaacttcccaaggaccccttttcctgtctctctgcctaaaataatttattaataactcctataacattctcccctgtggagaggtcaccctaactgctgttagggggttttgggcaacaactatttctggctacttcctgctgaaaaggggtgtcgaatggggaacagcagctagggcccctcctggggtcgataagggtcctcagaagaatggcatgtccatgcatggttcagtttgcagcagcatttggagttggattgcttctaggcgagaggaaacaatttgatttatagtattgagaatacagggttcaaatattaatacaagacatataagcaagagagggcttaataaaggggttaaccaattccataaagaagactggaatgcattaaagagggattgtagccacccggggctgaagcctccatttttccgtcagcctgtcaatagttttgatttgatctttaagtacctgrtgtagtaaataattttcatctaaaattttacttgccaagatatagaatttccctctggggggtgtctatgaagttccttgattttattttcccaaacaaagaaacctctgggttatgggcaccctactcactttcattacctggcagaatttgcaggataattgctcagaactaccatattgatctggatttttacgttacccatccctttttgtttcttccaagctgcaggtgatcaccacttggtccacaggaataagcagggttagtttaaaatgtaggcaaaaagcttaaaaacaattaatgagactaggatttaatgacaaatgtatgataagctttggagaacaatttctctctccagtccttatttttggtaaaaacaaattattataggactgtgtgtgttgttcatagaataaactttagtcttatacttggcctgattatttgcataaagtgcagcaagaatggttatttctgcataggacttttggattggctttgatgaaacactattccacaaggaatttcagataagacctttaaagccaagcccagccatgggattgtatcctcaaatatctgtaagttgggtgatcctcttctccttgaggtcccaagataaacttggagctcctggcctattagaaagtgacattcttaggctggcacggtggctcatgcctataatcccaacactttgggaggccgaggkgggcagatcatgaggtgaagagatcaagactatcctggccaacatggtgaaacccctcatctctactaaaaatacaaaaattagctgggtgtggtggtacacaactgtaatcccagctacttgggaggctaaggcaggagaattccttgaacctgggaggtggagattgcagtgagccgatggagccactgcactccagcgtaggtgacagagcgagacaccacctgaaaaaaaaaagtgacgttctttactgaccacaggttaggaaccctgtgcggggactgggtagacaagacatgaggccagtgctccccaagggcttttattggctctgcatgtcaagtttgattccttaaagagaaacacacccttttagtcaaagccttgatcttgttagacataaattttcggtgctgcaaaggaaatagcgctcgaatatgaattttctcagcaaggcaactttacttttctgcagaaaagatgcttctaagaagcctgattgtcatgagagcataccaaacaaagaaaagcagaggtttttatccctgacacattgggtccttactgcagtgtcctatctccattggctggagctggaccgcacaatctagactgatcctgattggctaaaaacttaaaactttcctaaataggtaaatgcacaatggagaacaaaggaaggaagggggttgtttacaaactaggagaataataacatttccaaataaggaagagatgtatgctgtaagctgggaatgcctgggcattttcagacatgtytgagcaggttataagccagaacaaataacttggttaaagtacaaggacatagaatgtacttattcccttactatatttaacagctacatagggcttaacaaagagttactagcaaaaagcaaggaagcttgacggaagttagtttttaaaagaaactattatttctaacatttattatttattctttaacaaaaagggaaactttgaagaggaactttttacttttcacggtaaaataaccagtttttccaattgtgtcctgttgacaaagaaaaatggatttttattgcactgatgcaaacaattatattgccataagttaagagtactcacagagagtttccaaattctagaggaaccagacagagaaaaataaaaatgctccaaattttgttcacaggagtataccttactcatttttttctggatggagtttcgctcttgttgcccaggctggagtgcaatggcacaatctcggctcactgcaacctctgcctcccaggatcaagtgattctcctgcctcagcctcccgagtagctgggattacaggtgccagccactacgcctggctaattttygtatttttagtagagatggggtttcaccattttggccaggctggtcttgaactcctgacctcaggtgatctgcctgcctcggcctcccaaagtgctgggattacaggtgtgagccaccgcacctggcccccttactgaattatttagggccgtaaatatatcaaaataagtttccttaactctgaaaatcaaaacaaggatcagcaatatttcaagcaaaagtcaaaagggttgctttaactttctgagtgcagtccatttagttaactcttattttgcttgatatttgtgaatatgtcagttctgtatgagtcccatacattcttcttctatttcaatattacaatcttcaaagctattaaaaacctgtgtttgagaatacctgttaaagtccttaatatagcttgattataaactgtcttcgagaaggaacaaagcaagacaatttgtttgcaaatgacaaaatatgtaggagttacagttaaaaacatggctgtagactacctatttgcattttgatgatacttgcattttgccaataatctttgagactgtttttatttcttaaagtcacatgaactaaaaagtatttgatttaagcacatctttttctttttttgagacgaagtctcactctgtcacccaggctggagtgcagtggcatgatctcagctcactgcaacctctgcctcctgggttcaagtgattcttctgcctcagcctcccaagtagctgagactacaagcacgcaccaccatgcctggcaaatttttgtattattrgtggagaaggggtttcaccatattggccaggctggtcttgaactcctgacctcatgatccacccacctcagcctcccaaaagttctgggattacaggtgtgagccaccgtgcctggccaaaaagcaactaattttttaaagaataaacattttaaagtcagggaaaaaaaaaaaaaaaaaaagaagccttccaaaatttaactcaggtatttgacctctcatggaggaatgttatgctgcttctgagccaaactctaactgcagctagaacaggcagctctgcaagcagaagaaaattttggagatgagcaatatatctcctatagtaggccagaagggaaaagaaaaaatagggaaggcaaagaaatagggggaacaccattcccaataggaaaagaggcaatacctcttgatgaccctcaattggaactcctttctatggtgtttttccttcatttgcagtttaaaatggcttctatctcttatgtaatgttcttctaacctgggaaaagttaattttccaaatcttaaaatgcttggcttagagttgagctgggggaaggtgttggatataagagttcggagtcgcaaagaaaatgagcactcaaagaatttctcagcaaggcaaatttacttctgcagaaaggtgctgctcattcttctggtcactgtgagagcacactgaacaaaggagggaagggtttttatccctaatgcagtcagtccttgctactgtgtccgatccccattggttggggttggaccgcacaatctaagctgatcctgatttgctacttgaaatggagcaggggtgkgggctacaaaagtaagggtgccaaataaggaacagatgtgggttgttacagattgggaacggatgtgsgttacagattgggaatggctggaaggttgtttaccgtacctaggggcaaggaggcaaggaagttaggctttgaaaatagaggacaagcagaacctttaaagaagaactcactgtttccagcaaagggaacccagaagcctgatatgacatcaagagggtaaaaaggtttaccagtcgggcttttggcttctctctccttgtgcaaaccagtaaaagggataataaggatcattgtttatattctctgtaaatttatagttaatgaaaaaggatttgtgaggttagtcttaagctgtagacaatctggtgtgctttgcatgtctttctgtgtggttctgttgaggaaagggtatcttaggttagaatgcaggcccagaaacccataagcctgctgtttgagccaccccaacaaaatggtcagtaacaaacttagctacaagcttccatgttgtttcatgtccttgggaacataacctgtagccacgtggcaatactttattttagtccctgcaattttacaatggtggctgtcttcttgtgctaagtcagttcctgggtgagggccacaaaatcaagtaaaccagtttgttaatctgggtggtgccagctgatccatcaagggcagggtttacaaaatatcttaagtgctaaccttaagagcggtttagggagggtgaaaatcttgtagcctccagctgcaggctcctgggccatggtttctaatcttgtggctagtttcttggtctgttcccaggcaagagggaagtatatcttgggaaatactgttatcatctttgttttagactatagactgtaaatccgactcctcccaaagttggttcggcctaaaccagggatgggcaaggacagcttgggggctgaaaacaaaatggaattgtttgggtcagatctctttcactgtctcagtcacaattttgcaatgacagtttcaaaagcttcctatcactcctttgaaaataccttgtacacttgcattaagtcataacctaattaaggctcattggtttcacctgtgaggttactgtttgtaaagttcaaaagccaaaaatcttaactgcttggcatggctaaagtcgagtaacaagggattttaaaggattttcttaaagagcactgagcttaattaaaagttcaggcatggtggctcacacctgtaatcccagcactttgggaggctgagatgggaggatcacctgaggtcgggagtttgagaccaacctgaccaacatggagaaaccctgtctctactaaaaatacaaaattagccgggtgtggtggtgcatgcctgtaatcccagctacttgggaggctgaggctggagaatcgcttgaacccaggaggcagagctgtggtgagctgagattgcaccactgcatgccagcctgggcaacaagagtgaaaactgtctcaaaaaaaaaaaaaaaaaaaaagtggatattcaagttacagggttataggtatatttaaggcctttatgtttttctcttcttggatcttgtttttctggaaaaaggctcttttcttctcagttgactgaattatttttctccattttttgtcttaccactcttaatgcatgcatgagaggccctaagataacttctggtaacatgggactgctggagaaaaacagaggaggcatcacagactccgttctgggggggttgggagggaacaagaaacaaatcaaaaaaacctctgttttcctcatgaaactctccaaattaaaagcagatagttccctcaaaatcaaaggctctgtactgttatgtattgtgttatctaccgcttttgagttttggggtatcaaattacttcacattgtgggagagctttggtgtgtaataacttacagtgtagaaaatacactgtaaggggtggctaatagtagttataaatcagagaagcatgctctgcgccatctgaaagatatggagacatccccataccccaataagagatgagactcccttgagggatgggctaattacaaattaagccaattagcttggagttgccttgcaatgaaatgcatggtagaagcactacactgtcttctcccatagtatcttcctccttttggggacccaaaatccagtataaaatggcaccgttaattttagggatctctctttgccttcagttgtgcctgcttattaggccctaaaaaacgcatactacccggccctgttcctccaagggtttcaccctaaagccagtaatacaattaagaaactggcaaatgaaaaatcttaacaagtgctgaatattctgtctgtgttgttatagatgtgttgtgtgtaatgtctataaaaacagctctaattgattggcttaaagaaaaataagcactaggccagacgtggtggctcatgcctgtaatcccagcactttgagaggctgaggcaggcggatcatgagatcagaagttcgagaccagcctggccaatatggtaaaaccgtctctactaataatacaaaaattagctgggtgtggtggcgcatacctgtagtcccggctactcgggaggctgaggcagaagaatcgcttgaacccacgaggctgaggttgcagtgagctgagatcacgccactgcgctccagcctgggtgacagagcaagacttcatctcaaaaaaaaaagaaaagaagaaaaaagaaaaataaacgcttaaataaaaaattttctagttcacatgactttaagaaataaaaatagtctcaaggattattggtaaaatgcaagcgtcatcaaaatgcaaataggtggtctacagtcatgtttttaactaacctgcaaattttgtcattcgcagacaattgttgtcttgctttgttctttctcaaaagacggtttataatcaagctatattaaggacgttaacaggtgttctcaaatgcaggtttttaatagcttttaatattgtaacattgacatagagaaagaatgtatgggactcataaagaactgacatgttcacaaatatcaagcaaaacacaagttaactaaatggattgcactcagaaagttaaagcaccctttttgacttttgcttgaaatgttgctgatccttgttttgtttttcagagtcaaggaaacttattttgaactatttacagccttaaaaaaaaagatgttgtgggtttttcatagatgacctttatcaggtagaaaagtttccttttattcctagtttgttgagtgttttttatcatgaaagggtgttagactctgtcaaatgtttgtatctgttgaaataaccgtgtggttttcattctttattctattaatatgatgtattgcattgattgattctcatatgtttaatcaacctgtgcaaggtttatcctgggataaatttcactcagttgtggtgtataaaatttttatatattgctggatttggtttgttaatgttttgtggataattttttttgtctatatttacaaagggcattggtctgtggttttcttttctttttttttgcgacagagtcttgcactgttgcccaggctagagtgcaatggtgtgatctcagctcactgcaacctttgcctcccgggttcaagtgattctcctgtctcagcctcccaagtagctgggattacagatgcccgccaccacacccttttcatgtgatgcccttgtctggttttggaatcagggtaataccaatctcatagaatgaattggaaagtatcccctcctcttctgtttttggaaagagtgtgaaaaattgctgataattctgtgttagacgtttgggagaatttatcagcaacaatcatctgagcctgggcttttctttgtgggaatttttttttttttttgagacggagtttcgctcttgctccacagactggagtacaatggcgcgatctcggctcactgcaacctctgcctcctgggttcaagcgattcttctgtctcagcctcctgggtagctgggattacaggcgtgtgccactacaaccggctaattttttgtctttttagtagagacagggtttcaccatattagtcaggctggtctcaaactcctgacctcagatgatcctcctgcctcggcctcacgaagtactgggattacacgtgtgagccaccgcacctggccaagagtttttattgctaattcaatctcttgtctattcaagattataagtctatttagcttctcattccttttttttccctagactcaagtgattctcatgcctcagcctcccaagtaactgggattacaggtatgtgccaccatgcctggctaaattttgtatttttagtagagtcaggggtttcaccttgttggccatgctggtctccaactcctagcctcaggtgatccacccaccttggcctcccaaagtgctaggattacaggcatgagccaccacacccagcctcatttcttcttgactcagtttgggtaatcatgtctttctaggaatttgttcatttcatgtagattatctaattcgttggcatataattgaattttttatactgttaatatgagcagtctaaaccagccttgcattcccaggacaaaccccactagctcgtggaatattattattccttttatatattgctggattcaatttgccattattttgttgaagaattttgcatctttgtttatgagggatattgatttacagtttccttttcttgtactgtctctgtctagtttgagtatcaggatgctactgacctcataaaataagtttgaaaatggcccctccccttgtattttctggacaagattgtatagatggtagggtatcttttattaagttttattttcctccagatatcctgtttgtaggtgtgtgtgagaaacagaaaatgttactgaatcagagagagtctaagtaccattgttttctgcagttttctcttaaaccttggggttaaaagaaatctgttgaaatacagtgtaaccacatgtcttatttctcagctttttgtgagagatctcaactgggaagattgattgaggtagtttcttttaagccctgttgttggtcacattgamtgaacattttagtgaactaggattactccacttactggatattcttaatactaaggtaacaatatgaaaaaagaacgtattttctgtatatatgtataaagcatatttagtgaaattgtgagagttattggtctagtataggcaagagaactttttagcttaattgagttctcaactggtatatagtatgtgtttatatgaaggatcagtttagtaattgtccacagattccttttatattttaatgactgtaattcaggttttacaatcagaaaaagcacctacattgtcttctgtgtatatgttttttgtccagaaaaggtatctttgtggaattttttttttttttttggagtgttgctctgtcacccaggctggagtgcaatggcactatctcgactcactgcaacttctgcctcctgggttcaagcgattctcttgcctcagcctcctgagtagctgggactacaggcgcccgccaccatgcctggctaatttttgcatttttagtagagatggggtttcaccgtgttagccaggatggtctcgatctcctgacttcgtgatccgcccgcctcggcctctcaaagtgttgggattacaggcatgagtcactgcgcccagtttttttttttctttttttgagacggagtctcactctgtcgcccaggctggagtgcagtggcatggtctcggctcactgcaacctctgcctcacaggttcaagtgattctcctgcctcagcctcccaagtagctgggactaygggctcacgccaacatgcctggctaatttttgtatttttcagtagagatggggtttcaccatgttggccaggctggtgtcaaacttctgacctggtgatccgcccgcctcagcatcccaaagtgctgagattacagacgtgagccactgtgcccggctgccaatggtatttctctcacagatgagaaaagtctgatttctttttttttgagatggagttttgctgttgttgcccaggctggagagcaatggcaaatctcggctcaccgcaaacttcgcctcccacgttgaagcgattctcctgactcagcctcccaagtagctgggattataggcatgtgccaccacgaccggctaattttgtatttttagtagagacggactctccacgttggtcaggctggtctcgaactcctgacctcaggtgatttgcccgcctcagcctcccaaagtgctgggtttacaggcgtgaaccaccacacccagccagtctgatttctttttaaattttacttttatttatttatttatttatttattttgtagagatgggttctcactgtgttgcccaggctagtcttgaactcctaggctcaagtgatgctccttcctcagcctccctgttgggattacaggcgtgagccaccatgctcagtgaaaagtctgatttcttaagtcagttttaaaaggtgatatgctaagaaaaactttaacattttattttttcatttaacatcttttattttttatactaatgattttttttttttttttttttttgagatggagtctcactgtcgcccagactagagtgcagggcacgatctcagctcactgcaacctccacctccctggttcaagcaatttccctgcctcagcctcctgagtagctgggattacaggcgcacgccaccacacctggctatttttttgtatttttagtagagatggggtttcaccaagttggccagagtggtcttgaacacctgacctcaggtgatccacccaccttggcctcccaaagtcctgggattacaggcatgagccactgtgtccggcctactaatgattttttaaaagctctgtagtgtctgggtgcggcggctcacgcctgtaatcccagcactttgggaggccaaggcgggtggatcatgaggtcaggagttcgagaccagcctggccaagatggtgaaaccccgtctgtactaaaaacacaacaattagccaggcatgrtggcgcacgcctgtagtcccagctacttgggaggctgaggcaggagaatcgcttgamcctgggaggtggaggttgcagtgagctgaggttgtgccattgcaatccagcatgggcgacaagagtgaaactccgtctaaaaaaaaaaaagctctgtagtattgcttttaaaatgattttcttatcttattaacagcatcaatattaaatttacagctaggtgaaagaaaggatatgtttttcttcttccatttggtccttcagtacctcttccacgttccctgtggtagagcccaaccctgacaggagactcttggtgctgagtgatccagtaaaccaagactaacccccaccctctcctacctcaaacacacagtgtctagttacagtggtagcctacatggatttctggcrtaatttctcttatcatgaaccattccataaaccagtcctctgcagaaaagagagttcctttcaaatgtgtattctcaggctcacgcagccactgaatcctggacctggcatataatcatattagaatacaactgtggagtgaggcaagtgggaattcttggctaggaccccaacataactaaggtttaatcttaaccttaaataagactcctttgaaggaggtacaagcacaagagctataamcaggatattgtagtcctttttatagcacttaagttcttcttatgacatttatttgtaaaaactaaaaatccttttaaggctaaaaaacctacctagggttttatttcaatttggtaaataaataatactaataactacaatgtacttattattaatttcaacactagaaattcattatcatgtccttttagggagtctttagtcttccttccgtgtgtttccataaagacttctgttttatttttccagcttgtctcatatcctacagactttcagaaacacatataactactttcttgtcttcacttgatttatagacactgtaatgggtatagcttacccatttaagcttccccactcttgggtctcttatggagtaacttctttacttgatggggtcttgtcagacccaagagtaatatttgtgtgtcttgtgggttgaatataatattgtaataattcttactttgttaaaaggaatcttctgagagtggtggtgtgtttgccatactccttgagcttgaactgaatgagttttgttaagaggtctggggttctgtggaaatccttgatttcttctgacttgcagtccagatgcttttaaccacaggcaacgagtaaaaatatgtgcatgacaaacctgtaaaccagaaagtgaagacagcaggcagagtggcgtgctataaaatttttatcatcacacttgaagtgatcgtgttgctcattaatggcraaaactcaagttctaacacatggcagttttagtctgtgtttagccttgccatgtgctttcatctgccaggctcctctttgctttcccctttgtttccctgctttgaagttcattcattgtcctggtttactgtgaaatgccacttggggataactcaaaataggasagtggctttattacctgtgcttttcatatttcatgctacctttctgttttccagtttcccccagttaagttgcattccttatgtaccgtgatgttcctctgttgtcaaactagagcttcttcccacagctaagtggctgatcaaggtttctccaaagagataagtatcagttatatagctctctaagcaatgtgtagactgagagccactcaaaacctggctctctgcaggctttcaggtggcagtagtcatgggtgagagtcagtggttttggcaggtacaaacacatatgaattgtatgaagatgtttcttgaggaggagtgtcctggagtggaagtgttttcctttagtaatccctttactaatcccacagttcaaatatcttgctttatatccctaagagtacaaagatttcaatgaatttctctgtttagtgaagtcagagacaggaacaaatgcaataggctggtatgcaactttaattttttttttaagtttgggaaatacaggaaagaaaagtcatggataattctgtcacgccaatataactaatatgaccattttgcacattctttttcaggattcctatatgtcgagtttcacagaattgtaaaactatggtacataggacttggtattctaggtttttaaaaaactaacaattgtgtcaaactatttctacattattttgaatcttgaatagtatgcagccactaaataaggttagaacaagagagctactgtaatttagccattcctctaatgtcagacatttgttgtttctaattttttgcaatagctaatgatgttacaatgaaatcattggtaataattggataaaaagaagggattgaagacagggaaaagaaaggggtgtaggctgtagagcagggagagaacctctttgcagcttaggcttgggagagagaaaagctgtggcaaggtataactttgtccctgtatctagaaaggttatggacatgttcaggaggtccggaatggtgagtattgataggcctgtggcctgtgttgttccactgggttttacaggaagttaacatgattgatcctaaagctatagcacttttattgaaagggaatttgggactatccccatttaactaggtgataatagctatgttaataaaaactactgaaagcttttcctaagagaaggctaggaggtaggggtctttcaatgttttcattattttagatttttttttttaaagctagtcgtcacaaataagaatactgagttaaggctcggcgcggtggctcacgcctgtaatcccagcactttgggaggctgcggcaggcgggtcacctgaggttgggagttccagaccagcctgaccaacatagtgaaaccccgtctctactaaaaatacaaaattagctgggcatggtggcacaggcacatgtcggtaatcccagctactcaggaggctgaggcaggagaatcacttgaacctgggaggcagaggttgcggtgagccgagatcacaccattgcactccagcctgggcaacaagagygaaactccatctcaaaaaaaaaaaaaaaaaaaaaaaaaaaaaagaatactgagttaaaaggtatggccatctcaggaggttgcagtgagccgagatccgagatggagccactgcactgcagcctgggtgttggagcaagaccctgtctcaaaaaaaaaaaaaaaaaaagtatggccatttgagtagtttttgacccacactgtcaaattgtttttcaaaagaatagtattagcttgtgttacacagccctgtggactcacttcagtgtacatttatcagcactgggagttttcattttttttgtatgtaagaaatgacatttcggggccgggcgcggtggctcacgcctgtaatcccagcactttgggaggccgaggcgggcgtatcacgaggtcaggagttcgagaccagcctggctaacatggtgaaaccccgtctctactaaacaaaatacaaaaaaattagccaggcgtggtggcgggctcctgtagtcccagctactcgggaggtcaaggcaggagaatggcgtgaactcgggaggcggagcttgcagtgagctgagatcgcgccgctgcactccagcctggagcctgggcgatacagcgagactctgtctcaaaaaaaaaaaaaaaaaacttttcccagctgggcacagtggctcacacctgtaatcccagcgctttgggaggccgaggcgggtggatcatgaggtcaggagatcgagaccatcttggctaacacggtgaaaccccgtctctactaaaaatacaaaaaaattagccaggcatggtggcgggcgcctgtagtcccagctactcgggaggctgaggcaggagaatggcatgaacctgggaggcggaacttgcagtgagccaagatcgcgccactgcactccagcctgggcgacagtgcgagactccatctcaaaaaaacaaaaaaacaaaaaaacaaaaaacttttccccaaattatcaagtcatcattgccatactattttgaaagtacattttattgctttgtgatggttttttttttttttgagatgcagtctcgctctgtcaccaggctggagtgcagtggtgcgatctcggttcactgcaacctctgcctcccaggttcaagccattctcctgcctcagcctcctgagtagctgggattacaggcgtgcaccaccatacccagctaatttttgtatttttagtagagactgggtttcaccatgttgaccaggatggtctcgatctcctgactttgtgatccgcccgcctcggtctcccaaagtgctgggattacaggtgtgagccactgtacccggccacatgatggctttttaaaaatcataaatgattctgtatttgtctctttctggtctatctaatctcttttactgatctctgtttacttttataaatacaagtagggagactattttattattactctttagtttcagttgttacaagtggatagtaagtacttcatggatccaaatattaggaattgatcttaggcaaaaaagttggggcaaaatgaaagcaacttatcattacagttttttgtttgtttgtttgtttgtttttgagacagagtctcactgtcgcccaggctgcagtgcaatggcgcaacctcagctcactgcaaactatgcctcccgggttcaagtgattctccctcctcagcctcccaagtagctgggaatacaggcacccgccattatgcctggctaatttttgtatttttcattgtgacagggtttcaccatgttggccagggtggtctcgaactcgtgacctcaggcaatctgcccgcctyagcctcccaaagtgctgggattacaggtgtgagccaccacgcctggcccattacagttttatctgcatttttctgactgcctggttctgtgctgttcctgcaacatttacttaacatatttctttgaatgctgcttcaaattttatttcaaaattgagggggaaaaataagcaaatgataaacataaacaaaattttattttccttttttgttagaggcagaatttaaggaaaaattctgatgattttgattacagttagtggctaacctcttatgatttatttacctatctatttatctttccatctatttgtacatttttttgtttgtttgtttttttggtaaacagtctctccccagtaagaatgcagttcttcttaatcacagaagttattcctttccttgtaatggccttctctgttctgtgtcttggcaaatatctgagcctaatagttgggtggtgcccttggcatagatgttatgtaaggaattgtcacctgcttttagagtcagtcatcccatgaaatcgaaggagtcagtaaggcgttatggaatcaggaggcttgtgtgacagctctgacgctgataccaattaatgacctgactggacctcagtttcctcatcagtggaatgaacacagttggcctagtgaccccagatgtctctcccaagctaacattctgtgattctcattctctgaaatgttaccacgaggaatgtttacttatacgttactttttaaaataagaaaaatggagaacagaaaatgagaactagagtttaattttaaaattttgaagtgtcatggatgaggctatcgtcatgtgtcatgttgctttagtccaatagttcttaattaacagtatgcattagaactaccagtgaacatttaaagtatatgcatatatgtgtgtgaacatatatgaatatatacacacataaatatgtttgtttatttatttatttacttatttatttattggagacagagtctcactctgttgcccaggctggagtgcagtggtgcgatcttggctcactgcaacctccacctcctgggttcaagcagttctcctgcctcaacctcccaagtagctgggattacaggcgcgtgccacaacacccagctaattttcgtattttaagtagagatggggtttcaccatgttggtcgggctggtctcaaactcctaacctcaggtgatccaactgcatcgcctcccaaartgcaggaattacgggcgggtgtgagccacgcgcctggccacacacacaaatatgcatgcttaggcccatgccttgcaagtctgattcagtaggttagggacaaggatgagacctaggaagtcttggttattcagatgcaaataagggttgaaaggcctcccttccacttacggcagatactgcaggtatagattggtctggtatactctgcaacaaataagtcccattgctcttctgggatcctataattaattggcacagatgttagtttttcttttctttttttttctttttttgagatagtctctcgcactctcacctgggctggagtgcacgatctcggctcactgcaacctcccccgcccaggttcaagtgattctcctgcctagcctcccagtgctgggattacaggcatgagccaccgccccgggcccagagaaattacaagcgagaaattacaacaagctagtttttctttaagaagaacccacttctcattttcttatctgttcaggctggtaaaacaaaataacataaactaggaggcttatcaacaacagaaaacaatttcttacagttctgtggcctaggaagtccaagatcaaggtgccagtagattccacgtctggtgagggcccacttcctgattctcagtaggtaccttcttgctgtgtcctcacatggtggaaggggagatgggctctctggagtttctttcataactgcgctaatcccattcttgagggctcctaatcacctcccaaaggcccctccttctaatgctgtcactttgagaattaagattttgacagagaaattttagaggtatagaagcattcagatcatagcgcttatatctcaaagataaggagatttctatgttcctcttcacttttctatccatatgttaagtattagtaacatttgattgtctggtataaatgaaacagtctcttggttgttgaccctgtcttgacattgtatgataggggttatttaaaaatttcttaaattaactatctttctaaaaactatttttataaaataatacatgttcatggtttaaaaacacatagtaccaaaagtacgatgaaagtgaaagcttgccaggcgcggtggttcacgcctgtaatcttagcactttgggaggccaaggtgggcagatcacgaggtcaggagatcragaccatcctggctaacatggtgaaaccccgtccctactaaaaatacaaaaaattagccgggcgtggtggcaggcgcctgtagtcccagctactcgcgaggctgaggcaagagaatggcgtgaacccgggaggcggagcttgcagtgaggccgagatcgtgccactgtactccagccttggcaacagagcgagacgccgtctcaaaaaaaaaaaaaaaaaaaaagtgaaagcttactagacataatgattaataataataatgattaataataaacattttggggatttagctgattttattaacaccatttaaatatcagtctaggtgtagtgacagtataacatactggttaaaagcatgggcgctacctttacatttatggtcaattgatttttgacaaggttggcaagatacatcaatagggaaagattagtcttttcaacaaatggtgctgagacagcaggttatccacatgcaaaagaagaaagtggatgcctgcctcatagaacacatgcaaattaacttaaaatggatcatagtcctaaagtaagaactaaaactataagactcttacaaaaaaaataaaatccttgtgactttggaataggcaatagtttcttagatatgacaccaaaagtataagcaaaaaagaaaaagataaatttgacttgatcaaaatttaaaactatatttcaaaaagacttctatattttaaagctgttttttttaaagtgtaggttctagagaatgataacctaagtttgaattttagctccattacttattgtaagctgtgcaaccctgaggaagttgcataacctctctgagtctgtgtccttgtttgtaaaatggggatgatggtagcagtgcccacctaacgatattgctggaaggattaaatgaaaggaggcatataaacattaaccctctgtctagttctggataaatacaaatatcaactatgaagatgataaggagattgaagaaggatgaatggcttacttggatcagcagaaatgagaagaaatcacctaaggaacaagtagtaagggtgggcttgaacttggtttattcatgggccctgaagaagatggatagtttaaacatttttacaagttggaggtagcaatctcttggtggttttgactggtgatgatgcccaggatgacagtgctgtcatgtggggataacataccactaagctggatcatgtttgttttgatgcctgattgggccagcacaaaatcctgaggagaaaataattcgcagtaagtatttttattgcagtcttgctgcatcttgcctgaagatcctgtgtctgcttatccaggagttaacctgggagaaaacatgtaagccttggtttgagtggtctgcccctatgtctgtaagcagggttgtgttggaaggggacatctgtctgacatttggcctctctgcatttaaaccatggttgggaatagagatggcataaaatgtggcctcagtatttccaacctgttacttattttcctgtgtccagggaaggttctgattatggcttgttggcaggatcccctgagaacatatcttgactgtgatctgagttaggaatattgaataatatgtcagaggttccagtcagatgaaagaagtaaatctataatcttcattagagtccttccttcctcagattccttattttggcctgtgggacttaaatggtaatgcttttagagtgaacctaatattagaaaatgcatcatcatgttttcctttgtgataattaccatccttacttccattacttctagctaaagatcatcaccctggtaaaactttgccagagaacccagcaggattcaccagcacagccactgcagactccagagccctgcttcaggcctatatagacggtcactctgtggtcatcttcagtaggtccacatgcacacgctgtactgaggtaaggctttaaactcaaggggtttaaatggaattgaaggaatttgacagacttttgagctcaaatgtaaacaactggattttacctttaggaagagtgtatgtaggctgggcgcggtggctcacacctgtaatcccagcactttgggaggccaaggtgagtggatcacaaggtcaagagatcaagaccatcctggccaacatgatgaaaccacatctctactaaaaatacaaaaattagcccaacgtggtgtcatgtgcctgtagtcgcagctactcgggaggctgagacaggagaatcacttgaacccaggaggcagaggttgcagtgagccgagatagtgccactgcactccagcttgggggacagagtcagactccatctcaaaaaaaaaaaaaaaaaaaggaaaagtatatgtaggtgtaacttgcttcagagtaattgtaaaatgtggatttgataacaaaatattgtttgaataatctttctgagcttttgggaagtatgagacatattcaggtagtcgaggtcagggaaggttagggtgggggagttaccaaaccggttgatttgcggccctttcagatatgtctgtagggaatatttcataaggaatggttacttagggtactaccaaattttgataaatatctcttcatgctttggtttattatggggaaaataacttcacaaagaataaactgtttcctacttggttcttaatcttagattatcagagagaaaaggtcagtggttacagccaagggtaggattagtttagtccaccctgaataaaccagggtggacttaaccattaacgaaggtgagaattgaaaggcaaacctgatctgtctggtgcttcataggaaggctgagggcatttaaatgtcactgaagtttagctctaggcctacacaatggagtcttaggtaaatataactggccatctgtccaggttcactgagaggttaatttattatttttatatatatatatatatatatatatatattttttttttttttttttttttttttttttgagacggagtctcgctctgttgccaaggctggagtgcagtggcgcgatctcggctcactgcaagctccgtctcccgggttcatgccattttcctgcctcagcctcctgagtagctgggactacaggtgcccgccaccacaccccgctaattttttgtatttttagtacagacgggttttcactgtgttagccaagatggcctcgatctcctgaccttgtgatccacctgcctcggcctcccaaagtgctgggattacaggcgtgagccaccacgcccggccgattttattattaagtttaattttctctcaacttgtctgccccatgacttactttccagatctcaaggagtttgaattcagaagtctttttattctggaagccttacatagaaataaatgggcttatgggctttttggactctctctctctgtttctctctctcgttctgcatgtgtgtgtgtctgtgcacacgtgcacttttttcccaagtaaagraaaaggaaggtgggcggcaaaaacactgaggtacggagaccctttcatccttgtgtctctcctgaacacattctgcatcgatgccaccttaggcttcatccctatcaatatgatagtgatgcctttcatgtaggacatcatattgggagtaggattgcaaagaggcagaagacacaagtcccatccctgggggtttagctcaactgagggcagaacataggcttaagaagaaaaatgatctcagataacccatgctaaattctacatgattggacaggcagcaagtgctagagaatttagaagagggctgggcattagaaatctgctatgtaattcttggcctctaggggcttaattatgtagctctgcaattcttatctgcttttgggacctactgcccctcccccgcaccgcctgccacttccttttttttaatctttaaaatgaagggcttgaactagttgcttattgagggtttttttgtttttgtttttgagacagagtctcgctctgttgcccaggctggagtgcagtggtgtgatctcggctcgctgcaacctccgcctcctggttcaagtgattctcctgcctcagcctcccaagtagctgggactacaggtgcacaccaccatgcctggctaatttttgtatttttagtagagatggggtttcactatgtggccaggctggtctcgaactcctgagcttgtcgtgatcctcccaccccagcctccaaaagtgctgggattataggcgtgagccactgcgcccagcctgagggttttcttagttctgaaattacgtgcttgtctagtctttttcgttaccaaacaggttaagagcctggactctaaagtcagagtgtggatcttggctctgtgatttatcagccatgtgactttagttatttacctgtggtgccacagtttccccatctgtaaaatgtggatgataatagtatctatatcgtaagtttgttatgaggattaaattaattaatatttataaargccatagaacatacctgagacatagtaaacactatatcagtgtttgttaaataaaagaactacttgcatttttccttttcctatcaggacttaaaaccttgggtggttaatcttccttctgtcagtactgaggctagattaaatggtaatcaacaaatacctgacataatgctaagtacaattaatcctatcagtgggtaaatagctaccatttgagtgccaactatgtgccaggcattcggtcactctactcatattttcaaacattattaaagaatcgggagctgggcacagtggcttatgcctgtaatctcaatgctttgggaggccaaggcaagaggttcacctgaagccaggagttcgagaccagtctgggcagcataacaagactctatgtctatggaaaaaaaaaaaaaaatatatatatatatatatatatcagcatggtttgcatgtgcctgtagtcctagcttctcaggaggctgaggtgagaggatcacttgagcccaggagttaaaggttacagtgagctatgattataccactgcacgccagccttggtgacagagtgagaccctgtctctaaaataaatacatatgggcgcagtggctcacacctgtaatcccagcactttgggaggctgagacaggcagatcacttgaggccaggagttcaagaccagcctaggcaacatggtgaaaccctgtctcttctaaaactacaaaaattagccaggcatggtggtgaatgcctgtaatcccagctactcaggaggcacaggcatgagaatcacttaaaactcaggaagctgagggggcagtgagccaagatcgtgcctctaagctacagcctgggtgacagagcaagactctatctaaataaataaataaaaaaaataaaaattaagaaataaataaataaacagaaaattccaattttaaccctgctgtagttctggaatgaaaagttgggctagcggtcaggattgctactagtggtagatagtcagtatgctccttgcaatcccagatctctttgacctatcattgttctttttttcttttcttttttttagtccctattatgccccagaatgttcttattcttactgttatctctgaaatctactaactccctcatttcccagctctcctgcctatccctgaaaatgtaaagccttgcctatatttcccccagttttacttaattaaaactagcctgggaatgaagaacttttcctataacatttgttggttagttatttgcatgcttatttaaacatacagttgcccgagcgcagtgactcacacctgtactcccagcactttgggaggccgaggcgggcggatcacctgaggtcaggagaccagcctgaccaacatggagaaaccccgtctctactaaaaatacaaaaattagccgggcttggtgatgcatgcctgtaatcccagctactagggaggctgaggcaggagaattgcttgaacccgggaggcagaggttgcagtgagccaagatcgcaccattgcactccagcctgggcaacaaaagtgaaactgtctcaacaacaacaacaacatatagtcatcctggcaaatttatttaatatcattatccaaacaatccctgggtatgtcaagtcttctagataaacatcccctggttttaccttgttgatttcagattgttttcagattggtgccagttaatttggaaattaattttcgatgtctttggccatgaaagatgattaggtgcttttcctggtaaagtggtgaatttcttctgagggtgtacaactcatatacttagctgttcacatttatttatttatttaaattaccttgaagtagaattttcccaggttattttctttagtttttatttaatcatctcatttaacaactgggatatgagtaaatcagaatagagaaactttgtttttatatttgtacttggtctgatgaatgtgtatttctctatgggatgagtaatgtcatttgcattaattcaaggtgggaagtgcccataaggaaactaacgtctacgtaaaggtagctttccgctcttgcataacacattagttaccatatgtgttttgcgtgcatcttgctgtgaagaggttttaaagtgcaaagataatccctctccaccttttcagaattgcaatatttatttcttatagctatttcagagtggtggggggaactgaattcagattcagactggggcttaggtgacatctaaaagagtttaagaaaaaggctactggctgcgtatggtggctcatgcctgtaatcccagcactttgggaggccgaggtgggcagatcacgaggtcaggagatagagaccatcctggccaacatggtgaaaccgcgtctctactaaaaatacaaaaattggctgggtgtggtggcgcatgcctgtaaccccacctaattgggtggctgaggcaggagactcgcctgaacccggggaggcagagattgcagtgagccgagatagtgccactgcactccactggtgacaaagtgagactctgtctcaaaaaaaaaaaaaaagaaaaagaaaaagaaagaaaaagaagactaatgaggttgtatgaatgaacatattttcccattttatcaaaatgttgaatttggtcctatagaaatgatagaaatctccgagtgtacttccatacaataggaagtactgttttagtagttaagtttagaatgagatgagaatatattttcttttctttttttttttttttcaagaatcattttcctcattgatcatctctgtgaacttcaggctactctggccttttaaattttattgtataactggaggaatatggttctaaactttcctaaattattgacaggctgtttgtgtcttgtacataaaagtctcttgtgtcagtagtttaaatgttatctagtagtataagtaacttttaaataaaattttgttttttaccagtataatttgtataaccacgagcataagattttttgtttgtttgttttatttaatagtctcagagcataataggttttttgtaactgatttattggttgagggttactcagccaaaaaagaaataataccttaactattgtagaatatatttttcccaggtttgccacataatgctttggaaacattaagtgttccaatgcttttttttttttttttttttgaaacagagtcttactctgtcgcccaggctggagtgcagtggtacaatcctggctcactgcaacctccgcctcctgagttcaagtgattctcctgcctcagcctcccgagtagctgagattacaggtgcccaccaccacgcccggctaatttttttgtatatttaatagagacggggtttccccatgttggccaggctggtcttgaactcctgacctcaggtgatccacccgtctcagcctcccaaagtgctgggattacagacgtgagccaccgcacctggcctgcttttttaaacatagtattaaacccattttataatgaggtagactgagtcactaaacatataaaatgtatcttatgaagcgatacagatgaatcattgacaattgratagaatcaacagacttcagatactcttgtaaatatcatttctgtcaacagggagaatcttatgggttacataaaagtgaattggaaagttttcaaaggtgaaggctggttgaggaaggaagtaacaaagctggataagagattctcttgttggttataacctcatttttcattttcctccttgtttttcaacttcttccaggtaaagaagttatttaaatctctgtgtgttccttattttgtgcttgaacttgatcaaacaggtaagtttctgtttaatatgtaaatcatagctgctgactgtacattttatctcatttattctatctggctttaatttgtcttccttgaggtttttattgtttagtgagcacttgctagctgattcttctttttggtcttttagacagggtactctcctggagctaatcatattcacctttagcctttacctagtgtatagccttggtattacccagagtttcctcttattgaaattattcttcttattactcatgaatctagttacagatacagtatttgctggttttatggtaactttacttttgcaaatttgtctcctttctgataagtaatacaaatagtatttgaattaaatataaactgagatgcattcagaaattttggcagggacatacaaagatcagtaaaggtgaaagatccatgaaaagtgctactgggaaatcccagggagagaaagattggtggagtaaaatggaaagcttctttctaggaccatggtgctccttttttgtgggtcagaaaatcccaagggctcacagrcaaacattattaagaatctaatctaggcctgttggtgactcaygcctctaatcccaacacactgggaggccagggtagtaggatcgcttgaggccaggagtttgagtccagcctgggcaagagtgagagcttgtctctacaaaaataaagaattaaaaagttaaccaggcacagtggcatgagcccatagttctagctactcaggaggctgaggcaggaggtttgcttgagccaaggagttcaaggttacagtgagctatgattgcaccattgcactctagcctggattactgagtgagaccttgtwtcgaaaaacaaaaaggatctgctagtggccagcaccatcatttctattaggaaaagtgggctcttccagattaggaagaggaggtaaacttcatgcctagtagctttaaggaagcagagtcctgggcattgacagcttctgctcagtctccaaaggaatacaaagaaagggcctggcatggtggctcgcttctgtagtcccagcacttggggaggctgtggtggctggattccctgaggtaaagagtttgagaccagcctggccaatatggtgaaaccctgtctctactaaataataaaaaaaattagctgggtgtggtggtgtgcacctgtagtcccagctacctgggaggctgaggcaggagaattgctggaacccaggaggcagaggttacactgagccaagatcgcaccacagcattccagcctgggtgacagagtgagactctgtctcagaaccacaacaacaacaacaacagcaacaacaaagaaaggattcaactagacagagaaagatatatggcaattgggagatatgaacaattggcatataagtttcatttcttttttttttttttttttgagatggagtttcgctcttgttgcccaggctggagtgcaatggtgcgatctcagctcaccgcaacctccgcctcccaggttcaagcaattctcctgcctcagcctcctgagtagctgagattacaggcatgcaccactacgcctggctaattttgtatttttagtagagatggggtttctccatgttgaggctggtctcgaactcctgacctcaggtgagccgcccgcctcagcctcccaaagtgctgagattacaggtgtgagccaccacgcccggccataagtttcatttctagggtcaggaggaaggaggtagttgtgtggcaagacatattacttgatgtttctaaagacaggttctctaacacagagagcatcacataataactaccatatatagagtgttagtccctgttttacatggactatgctgggttaagtatagtcacctatcctcacatgaactcagcaagggagatattctctatattttataaatgaggaaattgaatcccagagaagtcaattaacttccttaacattgacccggtgcagtggctcacgcctgtaatcccagcactttgggaggtggaggtgggaggattgcctgaggtcaggagttcaagaccagcctgaccagtatggagaaaccccgtctgtactaaaaatacaaaattagccgggcatggtggctcatgcctctaatcccagcactttgggaggcagaggcgggaggattacctgaggtcgggagttcaagaccagcctgaccagtatggagaaaccccgtctgtactaaaaatacaaaattagccgggcatggtggctcatgcctgtaatcccagctattcgggaggttgaggcaggagaattgcttggacccgggaggcagaggttgcggtgagccaagatcacaccattgcactccagcctgggcaacaagagcacaactccatctcacaaaacaaacaaaaaaaaaacacaaaaaacaacaacaacagaaaacttccctaacttcatataaatactggatctataatttgaacacaggcccatgtaattctgaagcctgtgttatttccataataccatgttgtctggctcctctacggtgacccttctattccttcatcaaggaaggctcttgcccctaaatactccatagtatgaaaggtaatctcaataaataaaatttcttctgggtccaaaagtagccttttataaaaatataaattttcctgggaaacttaagtcacttgcaccttgctgtgaattagggaaaaataaccaaacggaacaataaccaaacaagcaaattaaactaatataagataaagcaaatgaacatgtccttcaaggatgggaaaggtaaaggaggtaacatcggaagagatgggcaggatgaatgcactaagtgcttggggagcatgatttgtaaggatttactctctgaatgtggaaaacttgtgttttttggtaacaaatggcagatgttttatttctaaatctgttagtaagtggctaaggaagttttaagagtctgtgatttaatacatgtatgaactttattttcagtcccagaaaataagcattggattatgaattgacttttgtcccggtggttccccagttatacttcccttgctctttctttctttttttttttttaattgagatggagttttgctcttgttgcccaggttggagtgcgatggcacgatctgggcttgccacaacctccacctctagggttcgagcgattctcctgcctcagcccccagagtagctgggatcacaggcatgcgccaccacggccaatttattttgtatttttggtagagacagagtttctccatgttggtcaggctggtcttgaactcctgacctcaggtgatccatccacctcggcctcccaaagttctgggattacaggcgtgagccaccrtgcccgtyccccttgttctttcttaaatgtcctctttactttctctatcatttttcagactattcttatcttttttaaatgtgtgttgccagtggggaggtgcggtgactgaaaaatctattaaatttctccttttccaactacttttctgtgtgagactggatttttcatttacttctgccaaaacaacgtatattgcaacaaattaatccagaagcaaatatgggaatctagttgttttttattaggaccaatgctaaaaaaattcaaaaaaatgtgaaacaatgccagtcttctcactatgtttatttattttgagacgaaataagtgcattctcagctcagtgagcaaaggtgcaatctcagctcactgcaacctctgcctcctggattcaagcaattctcctgcctcagcctcccaagtagatgggattacaggcatgtgccaccatgcctggctaattttgtgtttttagtagagacaggttttcaccgtgttggtcaggctggtctcaaactcctgatgtcaggtgatccacctgcctcggcctcacaaacttttgggattacaggcgcgagaccagcttggccaacatggcaaaatcctgtctctactaaaaatacaaaaattagccaggcatggtggtgggcgcctattatcccagcgactcaggaggctgaggcaggagaattgcttgaacgcaggaggcggaggttgcagtgcgctgagattgtgccattgcacttcagcctgggcaacaagagcaagactctgtattaaaaaaaaaaaaaaaaaaaaaaaagaccaagtttgacaccccgttctaaggcaagtaggaagcatgaatattaacacagttttgattttgtgagatttatttgtcccaagcatagragraacaccgttctacatgtgcagttggccttagccacacaggagaggtgtgatctggttcatgtcttcgaggagcttgtaatcatggagctggaactgctgatgcagtcttctaagtgctggtttcatgaataaacacctcctttatctgtttcttctgggttccaaaagaaccctccataggcatgattttcacaccagtgttggctacgtaatcttcccagggcctggatcatagtgggtatttaaaaagtcagaagatcaattggtagacaggagtatttggcatagaatcacatgggtgcatttattcattcagcatatttattgagtgcctgctgtgcactaggctctgtatactaagcactgggaatacagtagtatactaggcaggtgtgcttcctgtctaaaggaattagacttgtttgtgttttttttttcttttttttcccagcaaattccttttattttcctttagagttgagggcctgtgtactgcctaactggattggtaatggagtgagtgccccatgaattcctgtgtttgcaatagtatcacctctcacagaaaatcaagaagagaagttgtgctaccaggggatcctctctcttcaccctaacattttcttcttccttcttttggctgtattttggccagtctacataaattaaggttattatttgaaaacaaccatcagggtccactgagttctactgagattggtattggagagagaaactcagaaccgggaggcctggcattcatgtcctgtgtgtaggtagtggtagtagtcatacatgctatcctccttgtgccagaggctcatgcatgttctcctatttaatcttcagaataccaccaatcaggtaggtggtgatatcaccttcttatgatgaggaaataaaaacatagtaaagtattagtatacagggtggctggctttctagtgaacctactggcaattcgtggcccctcccactacttcctgagactatctcgtagaaccttccatgacttgcccccagtgtcttatgtataatgttcatggtgtcgatatcatgataggtgttcctagatgtgatggtgtctgttgcacacacatgtggtggtgtgtttggtggcagaggttgtacaatctgccaccatgccagctacacacatcttggctatccctgtggatgagctgccactcacagggcctgttgatttacaaagacttgtatctatacttcaggtgtcttcctaggagctttgatctaaggaacagacaacatcagtgtaatcatcttaatttggtctggcagctgctgacattctatagctataaatgtggaaaacagacataagatttcaggagtttgccaaaagtgtgcatctggatgccacatgtcactagcttgggggttctgatgtgtattattcatgtctcctggctgcttatggaggacatggctttaatgccttcagcaagagggagaggaactaatatttgagtttctttttatggcagtgtctcatatctctcttacttaatcctcacaacagctttgtgtggtttttggaattaattctgttgttgtgaggaagcagatgctcagcatttgaataacttgctcaatgttgctgtgtcaagcccaggcctgtctgcttccctagttgcctctttggcattgttttccttgaacaaataaaaacccctcacaagcagaggtaccctagctagctcagttctcaccactttggtattgatacttactcattcaacagatttgttttgggcacctatttatatgccaagcactggcaggagagaaaagatgagtaaggcacaacctcgttctttaagatcattttacttgtttgcctctgcctcacttccaatttcagtgtaatctggtatctctaaaggctgtaggatcacgggtggacaaargtagtgggtaagacatttaaagctgtaaacaaaagcaacttagaaaacatcatggcatgttcatttagagcaaaactggcaaggcctggggcagagaacgatgagaggttaagagttgaaaagtaaagaggctttctcccatagcgaatgaggagacatgggaggttgttctatttattttatgaatgaggctcaaaatattctttaagcattttggttttgtctataaaaatgttaatttttttaaatttggagaccacagtataataaaatacaaaaaatcacatataattgcatccagagatagccactattaatattttatgtcttttttgtaaactctgttctgttttattatttaatattttacatgttatataagttcttaattttctcaatgactacaaaatagtccatgtatttacttagccattctactatatttggacagtctattgccaattttttgctattgtggaataataggttagaaatgtttttctttgtacgtgaagtttttgctgtatttagaattattttcttaggatagattactggaatggatttatgggtcagagtatgaacaattctaaggttctagagccctttaaatggtgtgtactaattaataacttcataagctcaaagagttccctgtacttagtagtaagaaataataataggttttgggccaggtgcagtggctcctgcctgtaattccagtgttttgggaggctgaggcaggcagatcatgaggtcaagagatcaatactagcctggccaacatggtgaaaccccrtctctactaaaaatacaaaaattagctgggcgtggtggcatgcgcctgtagtcccaactacttgggaggctgaggcaggagaatcgcttgaacccgggaggtggaggttgcagtgagctgagatcacaccactgcactccagcctggtgacagagtgagactccgtcttaaaaaaaaaaaamaaaaaacttccttttgcgggtggcggcgaacgcggagagcacgccatgaaggcytcgggcacgctacgagagtacaaggtartgggtcgctgcctgcccacccccaaatgccacacgccgcccctctaccgcatgcgaatctttgcgcctaatcatgtcgtcgccaagtcccgcttctggtactttgtatctcagttaaagaagatgaagaagtcttcaggrgagattgtctactgtgggcaggtgtttgagaagtcccccctgcgggtgaagaacttcrgsatctggctgcgctatgactcccggagcggcacccacaacatgtaccgggaataccgggacctgaccaccgcaggcgctgtcacccagtgctaccgagacatgggtgcccggcaccgcgcccgagcccactccattcagatcatgaaggtggaggagatygcgrccagcaagtgccgccggccggctgtcaagcagttccacgactccaagatcragttcccgctgccccaccgggtcctgcgccgtcagcacaagccacgcttcaccaccaagaggcccaacaccttcttctaggtgcagggccctcgtccgggtgtgccccaaataaactcaggaacgccccggtggaaaaaaaaaaaaaaaaaagtgatctggctggacaaactgagccagtcccacacaaaatcttaaaaaaaaaaaaagaaaagaaataataataggtttttaaaaatcattatttgcctattggagaggtaaaaacagatttctttatcttaatttgtatcactttgattattaatgaggcacaatattttttcctgtatgttgtatttcctatgtgtaccttgctgggctcaggtgrtcctcccaccttagccttccaagtagctgggactatctaaattgtagtcactgtgttgtatttcattatctgaattgcctgttcattttcctcatgggataataatactaggaagagccccggtgcggtggcttacgcctgtaatcccagtactttgggaggctaaggtgagtggatcacgaggtggggagatcgagaccatcctggccaacatggtaaaaccctgtctctactaagaatacaaaaattagctgggcatggtgacgcatgcttgtagtcctacctactagggaggctgaggyaggagaatcgcttgaacccgggaggtggaggttgcagtgagttgagatcacgccactgcactccagtctggtgacagagcgagaattcatctcaaaaaaaaaaaaaaaaaaaattagttggctgggcgtggcggctcacgactgtaatcccagcactttgtgaggccgaggcaagcggatcacaaggtcaggagatcaagaccatcctggctaacacggtgaaaccctgtctctactaaaaatacaacagggccgggcgcggtggctcacgcctgtactcctagcactttgggaggccgaggcgagcggatcacgaggtcaggagatcaagaccatctggctaacagggtgaaaccccgtctctactaaaaacacaaaaaattagccgggcgtgttggcgggcacctgtagtcccagcaactcgggaggttgaggcaggagaatggtgtgaacccgggaggcggagcttgcaataagccaagatcgagccactgcactccagcccrggcgacagagcgagactccgtctcaaaaataaataaataaaataaaataaaataaaaataaaaaataaaaatacaacaaattagccaggcctggtggcgggcacctgtagtccagctacttgggaggctgaggcaggagaatggcctgaacccgggaggcagaacttgcagtgagccgagatcgcgccactgcactctagcctgggcaacagagtgagactccctctcaaaaaaaaaaaaaaataatataataattaataataataggaagaaacctttatatatagctctttattttcttttctctttctttctttctttctttctttctttctttctttctttcctctttctgtctgtctgtctgtcttgctctattgcccaggctatagtgcagtggtatgatcttggctcactgcagccttgaactcctggcttcatgcaatcctcccacctcagcctcccgagtagatgggagtacaggtatgtgccaccatacccagctaatttttgtattttctgtagagctggagtctcatgagccaccatgcccagcctgccttacttcttcctttccttctttcctttcctttcctttctttcttttttctgagactatcccgtagaaccttccatgacctgccccacctgtcttatgtataatgttcatggtgttgatatcatgataggtgttcctagatgtgatggtatctttctttctttctttctttctttctttctttctttctttctttctttctttctctctttctttctttctttctctttctttctttcctttcttccttccttccttcctccctcccttccctttccttcccttccctccttccttccttctttccttccttccttccttccctccctccctccttccctccttccttcctctctctctttttttttttgagactgagttttgctcttgttgccctggctggagtgcaatggcgtaatctgggctcactgcaacctccatctcccgggttcaaacaattctcctgcctcagcctcctgagtagctgggattacaggcacctgccaccacgccaggctaattttttatatttttagtagagacagggtttcatcatgttgtccaggctggtctcaaactcctgacctcaggtaatccacctacctaccttggcctcccaaagtgctgggattacaggtgtgagccacttggacccggccccttcctctttctctctgtctctctctttctttcttttattttttatttttattttttgaaatggagtatcactggctgggtgcggtggctcacgcctgtaatcccagcactttgggaggctgaggtgggctgatcacgaggtcaggagatggagaccatcctggctaacatggtaaaaccccgtctctactaaaaatacaaaaaaaaaacccacccatattagccgggcatggtggcaggcgcctgtagtcccagctactccggagggtgaggcaggagagtggcgtgaacccgagaggctgagcttgcagagagctgagatcgcgccactgcactctagcctgggtgacagagcgagactccgtctcaaaaaaaaagaaagaaagagagtatcactctgtccccaggctggagtacagtggcacgatctcggctcactgcaaactctgcctcccaggttcaagcaattatcctgcctcagcctcctgagtagctgagactacaggctgcactaccacgcctggctaattttgtatttttagtagagacggagtttcaccacattggccaggctggtctcgaactcctgacctcatgtaatccacccgccttggcctctcaaagtgatgggattacagtcgtgagccaccgcacctggcgtacagtagagcttctttcaaaactggaaccaatcctctcaaaccctgccactgcttatcaattaaatttatgtcatattataaatccgttgttgtcatttcttttttttttttttttttgagatagagtctcactctttttgcccaggcactatctcaactcactgcaacctctgcctctcgggttcaagtgattctcctgcctcagcctactgggtagctgggattacaggcgcctgccaccatgcctggctaatttttgtatttttagtagagatggggtttctccatgttggccaggctggtctcaaactcctgacctgaggtaatctggcccgcctggcctcccaaagtgctgggattataggcgtgaaccactgtgcccagcccttgttgtcatttcaacaatgttcacagcatcttcatcaggagtagattctatttctagaaaaacattatttgctcatccataaaaagcagctcctcatccattcaaattttacatgagattacattaattcagtcatgtcatcagactctactttttgtgggttctttttttcttctttttctgtgtttctttctytttttttttttttttgagacagggtttcactctgccacccaggctgtgctgcagtgatgtagtcatggctcactgtggcctcaacctcccgggctcaagtgatcctcctgcctmagcctctcaagtacttgggactacaggcacatgctaccacacctagctaatttttgttgttgttgttgttgagatggagtcttgctctgtccccaggctggagtgcagtggcrcgatctcggctcacagtaacctctgcctcccgggttcaagcaattctcctgcctcaacctcccaagtagctgggactacaggcacgcgacaccatgcccagctaattttttttgtatttttagtagagacagggttttatcatgttggccaggatggtctcgatctcctgacctcgtgatccgcctgccttgtcctcccaaagtgctgggatgacaggtgtgagcccccgcgcccagcccacccagctaatttttaattttttttgtagagacagggtcccactatgttgcccaggctagtcttgaattcctgagctcaagcaatcctacgttggcctcccaaagtgctaggattatagatgtgcaccaccatgcctggccttctcttctaattctatttctcttgttatttccaccatatcttcagttacttcctccactgaagtcttgaattcatcaaagttactcataagggttggaatcaccttcttccaaactcctgttaatgttgatatattattgacttcttcccatgaatcatgaatgttctgaatggcatctagaatagtgaatcttttccagaaggttttcagcttactttgcccagatctgtcagaggaatcactgtctatggcagctatagccttataaaatatatttcttaaataataagacttgaaagtcaraattaatcctttatccctgggctgcagaatggattttgttagtagtcatgaaaacaacattcatctccttgtacatctccatcagatctcttgagtgaccacatgcactgtcaatgagcagtaatattttcaaaagtcttcttttctgagcaataggtctcaacagtgggcttaaaataaaccaagttgtaaacagatgtgctgtcattcaggctttgttgttccatttctaaagcaaaggcagagtagatttatcataattcttaagggccctaggattttcattgtaagtccatttgtctcctgtttaaatcataagtatagaaacaccttaatatggccattatttgatagtagtgacatggaaaatactttgccatcttagaaagggcaatgactaaatactggcctaatgtatgtttttcctccgagaaggaggaaagccacttaatggtcaacattgaatcctgtcaagcagagtaggaggcaatatagcctcctttatagcaatacagcctcaggatattcctgagattattgaaagattaactagccgggtgtggtggctcacgcctataatcccagtactttgggaggccgaggggggtggatcacctgaggtcaggagtttgagaccagcctggccaacatggtgaaaccctgtctctgctaaaaatacaaaaaaattagccrggtgtggtggtgcaagcctgtaatctcagctactcagtttcacgtgcatccgtgtgaaaagaccaccaaacaggctttgtgtgagcaacaagcctgtttatttcacctgggtgcaggcaggctgagtcagaaaagagagtcagcaaagggtggtgggattatcattagttctttctttttttttttttttttgtgagacagagtctcgctctgtcgcccaggctagagtgcagtggtgcgatctgggctcactgcaagctccgcctcccaggttcatgccattctcctgcctcagcctcctgagtttctgggactacaggtgcccgccactaattttttgtgtttttttagtagagacggggtttcaccgtgttagccaggatggtctcgatctcctgacctcgtgatctgcccgccttagcctcccaaagtgctgggattacaggcatgagccaccacacctggccatatcattaaatgttcttataggttttgggataggcggtggagttaggagcaatgttttgtgggcaggggatggatctcacaaagtacattctcaagggtggggagaattacaaagaacctttttaagggtcggggagattacaaagtacattgatcagtcagggtggggcagaaacaaatcacaatggtggaatgtcatcagttaaggctattttcacttcttttgtggatcttcagttgcttcaggccatctggatgtatacgtgcaggtcacaggggatatgatggtttagcttgggctcagaggcctgacactcatgaggcagaggttgcagtaagccaagatcacatcaatgcactccagcctgagcaacagagcgagactccatctcaaaaaaaaaaaaagtagaagaaagaaagatgtatttggattcactttaagaaagagcaaataagcatttagggccaggcgcggtgactcacccctgtaatcccagtggccaacatggtgaatccctgtctctactaaaaatacaaaaattagccaggcatggtggcgagtgcctgtaatcccagctactctggaggctgatgttataagtaaagtttcggtgccgcaaaagaaatagcactggaatataaagttttcttttgaattctcagcaaggcaagttacttctatagaagggtgcgcccttacagacggagcaatggtgagcacacacttcgataagggagaggaaggggttcttatccctgacacacgtggcccctgctgctgtgtctttcccctattggctaaggttagatcgcaaaggctaaacattccaattcactaatttaaagagagggacagggtgagtggtttggtgggaaaaatcattatgacagagcaggtaatyggaatgagtcagggtggggtaggtaatcggaatgacttaagggtggagcagataatcggaatgagtcagagtggagtaggtactcgaaaaggttgctttacgaggaagttaagtttaaaagtagaaggcaaaagtcccggcgctgtggctcacgcctgcaatcccagtactttgggaggccaaggcgagcagatcacgaggtcaggagatcaagaccatcctggctayggtgaaacccagtctctactaaaaatacaaaaaaattagctggkcgtggtggcgggcgcctgtagtcccagctactcgggaggctgaggcaggagaatggcatgaacctgggaggcggagcttgcagtgagcccagatcgcaccactgcactctagcctgggcaacagagtgagactccacctaaaaaaaaaaaaaagaaaagaaaaaaaagtagaaggcaaagaattgaacatactgacatattgattctttgaaaagaaatttagaactcatatctaacactgaggcaggagaattgcttgaacctgggaggcagaggttgcagtgagccaagatcacatcattgcactccagcctgggtgacaagagtgagactccatctcaaaaaaaaaagcatttaaaatctatagataattttcagtctccggctgcggctgcgaaagaagccgccatgtctgcatatctgcaacgggtggttggcactgctccagtttcctgatcaagaggaataagcagacctacagcaccatgcccaataacttgaaggcctgcaactgcttccactacaatgggcttattcaacgcaagactgtgggcgtggagccggcagcccacggcaaaggtttcatagttgtgaagcagagatccagccagtggaagcctgccaccttctacatgcagaccaccattaacaagaatgctcgggcagggcggggtggctcaggcctgtaatcccagcactaatgggaggcggaggtgggtggatcacaaggtcaggagttcgagaccagcctggccaacgtagtgaaaccccgtctgtaataaaaatacaaaaattagccaggcatggtggtgcgcrcctatagtcccagctactcaggaggctgaggcaggagaatcgcttgaacccaggaggcagaggttgtggtgagccgagattgcgtcactgcactccagtctgggcaacagagtgagaatccatctcaaaagaacaaacatacaaacaacagaaaaaaacaagaatgctcgcgccaccctcagcagcatcagacacaggatcctcaagagcaagtaccgccccgacctgcgcgtggcagccttctgcaggccagcgccatcctgcacatccagaagcctgtgatggtgaagaaagaggaagaggattagaaaacctgcccccaaagcaatagtcagctggctttctcaaaaacaaaaacatgaatcaagaggtcaggagatccagaccatcctggctaacacggtgcaaccctgtctctactaaaaatacaaaatgtagccaggcgtggtggcgggcacctgtagtcccagctacttgggaggctaagacaggagaatggtgtgagttctccgggaggtggagttgcagtgagccgagatagtgacactgcactccagcctgggcgacagagcgagactccatctcaaaaacaaaacaaaacraaacaaacaaaaaacaaaaaatctatagataaaggaattcagatatatactggtggagaactataaggttctcatctgtctttggggtggagaaattggtctgaatgcctcttaatgagacataggtcactctcaattcaaaccagggcctagagcattagaaagatccaaggctccttcaggcccagctccatgaagtgaccatagctttccattaacgactggtagccatcaactgtctcgggcttctgggattttggctctcagagaaattagagggggatgttcttctcaagatcaactatctaatagtgtttaagaatttagaggttaataataataagctgccgggcgcggtggctcacgcctgtaatcctagcactttgggaggccgaggcgggtggatcgcctgagttcaggagttcgagaacagcctgggcaacacggtgaaaccctgtctctaataaaatacaaaaaaaaattagctgggcgtggcagcgtgcacctgtagtcccagctactcggtaggctgaggcaggagaattgcttgaacccgggaggcagaggttgcagtgagccaagatcatgccactgcactccagcctgggtaacagagtgagactccatctcaaaaaaaaaaaattaataataaaaawaataataataataagctatatggcacttctttcatcttaggwtctaatagctgtttaccactactaattagtatgtaactccttggctggtggtgagggtggttgatctgcacttttatgagatgaaacatctgagagttgactggaatggagcctgtacctcttgaggtacttctggtcagtggttttctacctgaaaactttttctttcctctaagattgaaatgggacactgagcgaccaaaagcaaatggattgcagaagggaaatattctgcatgtactagcatgtgcatattacgcatgtgtgtacatgtaatgcagaatgcaggcactaatttttaaagaggtttttcatgttcctttcactccttttagcaagttgtttaagaaaattatgtttttctagccaggtgtggtggcgcatgcctgtaatcccagctactcgggtggctgaggcaggagaaccacttgaacccaggaggcagaggttgcagtgagctgagatcgcaccattgcactccagcctgggcaacaagagccaaactccatctcaaaaaaaaaagaaaattatgtttttcttcttctggcaagaaaagacaagctctgggtaatgagaatatatgcactgcggaaaatggcatgcttagccacagactgcttgctaattaaaagtaaaatgaaaaaatgaatgtgctactccaggctggagtgcaatggtgcaatctcggctcactgcaacctctgcctcccaggttcaagcgattctcctgcctcagcctcctgagtagctgggattacaggcatgcaccaccatgcctggctaattttgtatttttagtagagaaggggtttctccgtgttggtcaggctggtctcgaactcctgacctcaggtaatccaccggccttagcctcccaaaatgctgggattacaggcatgagcyactgcacccagccttgagttaagttttgatcggtgtccactgtaatgctttgttgacagttactgtgaatgaccaacctgtaaaaggggaaaatccaaacttctaaccacactgaggtcatcatggatttataccatgcatgaggacataatgattataataactaagctattgagtcttttacatctatttacatcctttacatctatttactcatctcgttttccacaatcaccacatgaagtgtagatactgtatttatcaccattttatagatgagtaaacaaaggcacagagaggtaacagaagttgcctaagggcacacagtttgccagcagaaaagccaggttaygtgatttcattgcrggctcttataactattgagctatactgcttgttagtagaacgccagatgatgctatgggattagcccagagatttacaaaagaggagacctgggcacatttgaaggcggaatggcttaaacggccctgaatacaagataggaagaggatgttgaagaaaggtggggtcccctaagaccacttggaattgggataggttataggttgtagtgctctggtaaaggcgagctttagcagaggtagaacaatccttattcttctgaggttgcagtgacatgtaagtatagagagctgctgggaagagaagacagagaagtgaaagtaacttgtacctgacgacttgagcctttgggcagtgtgctggagctggctcgtaccagctcaagagaccccttgttaaacatcaaggaattttgcaagtaggttggtagcttgaaattagccaaagtgggagtattcaactccagaaattagcaaatactacaaatcagggcctccccaccaccactcagaactggtttaccagaacaccttacactccctttcttctcttttccacttcactaacagtcaaaagcctgctgaagtgccagttgaatttgaagcttgagtgagtgcccattatgggaaaggcactgtgccagatgccagggtaagaaagaccaacccctcaagtaaataatactgtggtggagagtgaagagcatgcaggcgtaaatcctggactagctgtcggctcttgggacagtcacttaaacttgggttactcatctgtaaatggagataataatatatatcccaaagggttattgagatgactgagaacatgtaaagttcctggcacagaggtgttcattaagtgatggttctaagagtggggacatgtaaacagatgtctttcatatagcttgatataagaaataaagatgggagccgggcacagtggctcatgcctataatcccagcactttgggaggctgaggtgagaggactgcttgagcccaggagtttgataccagcctgggcaacaaagygagaccctgtctctacaaaacatttttttaaatgaagcataggccgggtgcggtggctcatgactgtaatcccagcacttggggaggccgaggcgggtggatcacaagatcgggagatcaagaccatcctggctaatgcggtgaaaccccgtctctactaaaaatacaaaaaaaaaaaaaaattagctgggtgtggtggcgggcgcctatagtaccagctactagggaggctgaggcaggagaatgacatgaacccgggaggcggagcttgcagtgagctgagatcgcgccactgcactccagcctgggcaacaaagtaagactctgtctcaaaaaaaaaaaaaaaattagtcaggcacggtagtgtgtgcctctggccagctacttgggaagctgaggcatgaggatcatttaaacccaggagtttgaggctgtggtgagctatgattgtgccactgcactccagcctggatgacagagcaagattctgtctccaaaaaacaaacaaataaacaaaagaaataaagacagaatgactacaggtcatagtcccctcagtagattccagagttttcagggtggatgattcatggatgattttccttgtttgttatcagaaggttaccggggttttttttttgtccctacaaatcaagtttaccggatttacttgttgtttttaccggtttttagcctgttcctcactctatattatttaattgtaagacaaacaatggatttggaggtaggcacagttggatttatataccagctccaacacttacctggtttgtgacctttggcaagattctttttttttttttttgagacgaagtctcactctgtcacccaggctggagtgcagtggcgtgatcttggttcactgcaacctccgcctcccgggttcactccattctcctgcctcaccctcccgagtagctgagactacaggcgcctacaaccacgcccggctaatttttttgtatttttagtagagagggggtttcatcgtgttagctgggatggtcttgatctcctgaccttctgatccacccgcctcagcctcccaaagtgctgggattacaggtgtgagccaccatgcctggcctctgatcaaattcytttttttttttttttttttttttttttgagacggagtcttgctctgtcgcccaggctggagtgcagtggcgtgatctcggctcactgcaagctccacctccccggtccacgcctttttcctgcctcagcctcccgagtagctgggactacaggcgcccacccccaagcctggctaattttttgcgtttttagtagagacgggtttcaccattttagccaggacggtctcgatctcctgacctcgtgatccgcccgccttggcctcccaaagtgctgggattacaggcttgagccattgcgcccagcctaattttttttttttttttttgagatggagtctcactctgtcacccaggctggagtgcagtggtgccgtcttggctcactgcaacctccacctcccgggttcaagcagttctcctgcctcagcctcctgagtagctgggactataggtgcacgccaccacacctggctacttttttgtatttttagtagagacagggtttcaccacgttggccaggctggtcttgatctcctgacctcgtgatccgcccgcctcggcctcccaaagtgttgggattacaggcgtgagccaccgcacccagcctctgatcaaattcttaaaggccaaattacctttataaaactgaggaccccctaacatttaccttgtaaaagcttttttttctccttttctctgtgaaaaagatggaatatacaaattaactaagtaatatctgcatttttacagatttaatctctcaacaattatttattgatcaattactatgtgtgcatactatattaagtgctgggaacatgatggtgagcataactaatcctggtccctgctcacatgtggctatgtacatctatattaattaaacttaaataacattagaacttcacatccacacctgtactagccatcttttatgtacttaatagtcacatgtggtgagtggctattgggttggacagtgtagatttagaatattttcatcaccacagaaagtcctcttggactgtgctattctagagtgagggaggtggacattgatcaaatactcataaaagtatgattgcaattgtagtaagtactaggcagaaagaatagatggtaacatgagaacatttcatagggggatttgacttctctgttggttttcccaaggaaaacctgttcaaactagatttgctcaatgcttggaagttagcaaagccctgtggtgggagggaggacagtaattacagggactgaaagcaagctaatgactgaatcatggggattgaggagaagtttgggtgagatgaaggggtggaaggaccacaaagggccttgtagaaagaagatgaagaagcagagaggcttagtaacttggctttgcagttagtaatagaacctggatttgacttcaaagtctacactgcataataagggtatattcaacagactttggttctgcaattatctctttttgctccttctttggaaattgccaaagttccctctactggattattcctttagcataaaaacatgctgtaataatttccttcttagacaaaccaaaaaaaccaaaaagtctggccaggcacggtggctcacccctgtaatcccagcactttgggaggccgaggcgggtggatcacgaagtcaggagttgaagaccagcctggccaacatggtgaaaccctctctctactgaaaatacaaaaattagctgggtgtggtggcatgcacctgtagtcccagctactcgagaggctgaggcaggagaattgcttgaacccaggaggcagaggttgcaatgagctgagatcgtgcctctgcactccagcctgggtgacagagtgagactctgtctcaaaaaaaaaaaaaaaaaaaaaattcctctatcctacatccctctttagctcctttcctattgttgttttgttttgttttgtttttatagcaaaacccctttaagagttgcctatacttactccctccatttccttattttctgtttcttgctgaacttcttctaattaggatttcttacctaccaccattttcataagtgacctccatgactcagcccttaccttataggatttcttggcagtgcttgaaatagttgatcttcctttttggagcacttcttcattggcttctgagacaccacacagtcttggttttcctcctacctcctgccagctccttcttaggctccattgctggattcttttccccttttgcagtttgagcgtgccagggctctgtcctgggccatctttatttctctaaatacattaactcctgggtaatttcatctagtcccatggagtgacagttaattttatgtgtcaacttggctagcatacggtgcccagttgtttggcagataaaagcatagatgttgctgtgaaggtattttttagatgtgacttacaatgaaatcagtaggctttgagtaaagctagtgaccctccataatgtggatgggcttcatccaattagttgaagaccttagagaaaagatggaggtttcccaaagaggaagcaattctgcacccagaccaccgttagtctcaagattgccacatcaatgcctgcttgaatttccagcctatcagccagccttggagttttcagacttatcagccctcacaactgtgtgagtcaattctttaaaaaaaagaaaagaaaaaaatctctctatatatacatgtatcctattggttctgtttctctgaagagctgtgactaatacacatggtattaaatatcttttatgtttgacaccaaatgtttatttctagccttgacttctcccttgaactccatacttacatatccaactgcttagtcaacctctccatttggataataatagatctgttaacccatactatggatttgtcccaaactattgttttcccccacctcccatctttcttcctcctctctgggtgttcctgcttttcattgaagagtgctattatttaccccattgctaaagccagaaatctagcgttatcattgattctctttctcttacatctcttattccatccatctgtacaactgtacaacatatatctgtgcaattagctttaccttcaaatgtattttttaacctcactaatcagcctttatcatctctagcttggaccaggacagtaacttcctagcaggtctgtatatctccatatctccacttttttttttttttttttttttttgagatggagtctcactgtgtcgccygggctggagtgcagtggtgggatcycggctcactgcaaactccgcctcccgggttcacgccattctcctgcctcagcctccccagtagctgggactacaggcgcctgctaccacgcccggttaattttttgtatttttagtagagatggggtttcactgtgttagccaggctcatctcaatctcctgacctcgtgatccgcccgcctcagcctcctgaagtgctgggattacagacatgagccaccgagcccggccatatctccacttttaagtccctgccctccttagcctattttccacacaactgagcaattattttatcatacaacaatcatttccttctcttctcttcacactctggcatcttaccacatttaaaatgaaatccaaaatcctgactatggcctgatgatggatgtgacccctggctattcctctgacctcacttcctaccactttttttctcactcattaggctttagacatactggttactttgtggattcttggataagtcaagcagactcctagcttagggctttagtatgttgaagccagaataaaaatgtgagacaagtctctaaattaaaattttttatttggaaagaaagaatagcaatttggggcatatatgcagacagggtggtcttcagtatgtctgaagaacaaagagaaggttagaggttttagaaacaggagagctgttacatattgctcttcaagaaagttctttgggactagttagggtttggggagctagcaagctctggtgagtgatggcagtgggcaaaattagtcctagagtttcagcaagttctcttagcatttatagataaagctggtctcaggttacaacaggcagtttcagcagtcaggcttgcagagaattacattcttggagcaatgttttgtaccctgagtgcttttccccctagccccttggctctgatttaattgggaatgacaagaatgacccaattttatgatcagctttcacaagtacctcctctttcctctgcttagaaagatttcttccctaggtactctcatggcctgttccctcatagcactgtgggctctgctcaagcatcacattctgagatctttcctgacttccctaccctactttattcttcttcaaggtacaaagaactctttcagaaaagctttktgtgtgtgtgtgaaggagagcaatgaaatggggtggtggtaactgcaagggttggggcacatgggatcatgagagccttttctttctttttgggaacagttttgctctgtcatccaggctgaagagcagtggcatgatcatggcttactgcagcctcaaactcctgggctcaagtgatcctcccacctcagctttccaagtagctaggactacaggcaggtaccaccacacctggctgacttttataattttttttgtagagacaaggtcttgctatgttgtacacactagtcttgaactgctggcctgaagcaatcctcctgcctcagcctcccaacatgctgggattacaagtgtaagttactgcaccaggtcgggaggcttttttaaaatggtaaaacaacaatgcatttgtatgatgatgtaaatgatcaggtagagaacaagcaattgatgatgccagagagggaggctaacttcaagagtgatgttcattaatattaagaaggaaataaaagatgagaatccatacacaagtgaagttggmcttcactattctccacataacagcaattctttgaatgtacaacaatcatttccttctcttctcttcacactgtcttttttgtttttgtttttgtttttttgagacggagtcttgctcttgttgtccaggctggagtacaatggcatgatctcggctcaccgcaacttccgtctcctgggttcaagcgattctcctgcctcaacctcctgagtagctgagattacaggcgcccaccaccatgcccagctaatttttgtatttttagtagagacggggtttcaccatgttggccaggctggcctcgcactcctgacctcgtaatccacctgcctccgcctcccaaagtgttgggatttcagccgtgagccattgcacccggcctcacactctggcttcttaacacatttaaaatgaaatccaggctgggtgcagtggctcacacctgtaatcccagcactttgggaggccgaggcaggcggatcacctgtagttgggagttggaggccagcctgaccaacatggagaaaccccgtctatactaaaaatacaaaattagccaggcgtggtggcacatgcctataatcccatctactcaggaggctgaggcaggagaatcactggaacctgagaggcggaggctgcrgtgagccgagatagtgccattgccctccagccagggcaacaagaacaaaactctctctctcaaaataaataaataaataaaaataaaatgaaatccaaaatcctgactgtggcctgataatgggtctgacctctggctactcctgacttcactacctaccactttttttctcatcaggaaataataagagtgaaggcagagaatatggcagcttgctggttaagggagttctgtctgattgatgctattttcttaaagtagaaagtaggtcatgagctaatgcaaggtgtaggggcattagaagtttgaggaaagagggatacgtgtgaaatggtcattttggatcctgagaaaacaaatattccagggatgcaaaggattgctkggcaaccttgaggatacatttgaagtttgtggtcttaactttaaagtgaaatcacttttaatttctgtgtttccttcagcaatgtttcctgctttaagtggagtacagaatatgtggacagctaggttcagcaagggtgggccttgccatgtcaacgcgactgagaagcttggacttcatattgagggccctagagagctactgaaggtttgagtaaagaagatttaggtgttagaaagatcattctagctcagtatggtgtgtgtgtgtgtatgagagaaaggcttattataggtagaacagtagtttaatacaataggagcctttatcaaacacctgcataaatttgttatagcttagatgacagttcaggaacatagagaggtctatttccagcattttctgagtacctactatataccagattctgtaaagacaaaataaacaagggtttgcctatccaaagctcttgtagaagatttgtaattattattaggtatttgggggacaaagaagagggaaggagcaattaacactgggtgaaaatccaggaagactcccagaggaggtgacatttcagatgagctttgaaggactaggcccttagggagggaagataattctgaaaaggaagaatgagcccagtcaagagatgcgaaatgtatgattaaaacattttatgtttatgatttgctacggccaggcacagtggctcacacctgtaatcccagcactttgggaggctgaagcagacggatcccttgaggctaggagtttgaccatcctggccaacgtgttgaaaccccatttctactaaaaatacaaaaaattagccaggtgtggtggtgcatgcctgtagtcccagctacttgggaggctgaggcatgagaatcgctggaagcagggaggtggaggttgcagtgagctgagatgcgccactgcactccagccagagcaacagagcaagagactgtcaaacaaacaaacaaacaaacaaataaataaataaattgctgcatgatgagaaatggtggaagaagatgaggttcttcttccattaaccagcaactaaatagaactaaggagtttttcctctagaattcacgacaagggtaaggcatctgggctcttaacagcagcaagaaggatttgaaagaaaagaagatggttttaaaatggtgattttaatttaaagaaaaataactacatggtgctactctgggcatctttgctataatttgctcacttaggaacaatgtgaagttaaaatgccttatctagcctgttttggaatgccgttagaaaatattaattataatcactctgagctgtctatacaagatgcttttaatggcaagcctcttcaaatcaatccttattacttgcttttagtacattatttcaagttaaatgatccttctgtgtcctaagtcatgcttttgaaataaggtgtattttcaatatatttctaagaatgaggagtttatgaccctggttcatgggtcattcggtagactaaatgagataaaggcatataaaattattaatacagaacttggcttgggagccaggagtaaatgttttttgttctcccttagacccagtcttttcatgtttttccttctttcctccttaaatcacattgtttcctcaacacccacgtactagatccattctctgttctagggactccagaatcaggtgaaacactcatgtcaataatcaaacactcatgtcaataatcaccttacaggggaagtgtcaagttagtgtgtgtagtgtgtgtgtgtgcccatttagagggtgaagaagctaaatcaagcctctgagtttcaccttggaagggcctggcaggacctggcagtggttgcctgtttgtttagagggagtgtggcttctgctggctgttaggagcccgcaacgctctcagctgagagtgcttcaatctggcattatccaaagaagtgggaaagacattccttccttccttccttcattcagttattatgtatttattcagcaaatattcatagcctgctagtgcacagtgctgaataagaacatgagtaagagcagggaagcatgagagagcatggctcaccttagtagctgcaggtggctgggtgcagctggagttaaaagacactctgagtttttcttaaaaaaaacaataaataccaaacttagaatctaataaggaagaggtgctctcaggggaagttaggtgtgttcctaagaatttgtcatttcttttcaggattagtcaggatgaactagacatttcttttcaaaagcctaataacttcctttagggaactgccaaactgactaatccatgaccttaaggcagtgggtcccaaactttgctgccaactcaatcacctttggagtttyttttttttttttaaacgcagaggcccaggtcacactccacaccaatgacatcagaatgtctaggggtgggagccaggcaccaggattctaaagaccctcacgtgatgacaacagctagcaaagttctgtagctactgccttagggcatagtctaatttcttcagtaaaaacacacttattccaaatttggttccagaattgccttaaattgtttttgctctgttcttaggttgggggcggctatgagcaggcagaggatgtggtgtcacccaattaggagctctcagcttackaggcaattagcataggttgccagggctgcacgaggagtggatttctgctttgtcattctgactctggcagttagcccgcccgctcggcgcagggcgtggcttctcgtagccattaggaaasagcaaccctttcacctcagttttcttcactccggcatttgcagcagagcgaaaggtggtsgagtcctgaaggagggcctgatgtcttcatcattctcaaattcttgtaagctctgcgtcgggtgaaaccagacaaagccgcgagcccagggatgggagcacgcgggggacggcctgccggcggggacgacagcattgcgcctgggtgcagcagtgtgcgtctcggggaagggaagatattttaaggcgtgtctgagcagacggggaggcttttccaaacccaggcagcttcgtggcgtgtgcggtttcgacccggtcacacaaagcttcagcatgtcatgtggtaggtgaggccggcgcctgtaggctggcggtttccttcctcttggtctttgtagagacagtttgcagaacagcggagaaaatgggtattgtatcgtttcttacagagtccgagtcttgaaatgtagatgacaatgtgttgagtggactgacagatccttgagaatattaagaaagtataactatgtaagaatgcttctctaggaattttcacaccatttaatcctcagaaatcctgagacgttggcaaaacacatggggtctccatgtttttacaagtagggaaagcaaggctcagaaagatyaagtggcgtgcccagctggacacagactattaaatggggcggcgacgacgaccccagggcttcctcactctctcaggcagtacaggacagtgattaaacgcgtcgaccacattgcctgggtttgaatcctgccgctgcttttgagtagctccttgagcttggacaagtttcttagcttttctgtacctgtttccctgtctgtaagttgggcctggtaatacttacttgtagagtggttgtgaagttgaaatgtaaatatatgtgaagcagtatagacatgttagctactattattacaattaagcagctatactttgttttttgttttttgttggttttttttgtttgtttgttttttgagacggagtctcattctgtcgcccaggctggagtgcagtggcacgatctgggctcactgcaaccttcgccccctgggttcaagcgattctcctgcctcagcctcctgagtagctgggattacaggcacctgccaccgcgcccgactaatttttgtatttttagtagagacagggtttcaccatcttggccaggctggtcttgaactcctgacctcatgatccacccgcctcggcctcccaaataagcagctatacttttgaatgttggcgtgatttatgtctaatgaataggcctcatgtcagtgtaactgtggaatctgtatgttccactgagttcacccctttgtgaaattttaccattagtgcctagtttcatctgtagcgttgtgtattgcttcaggattctttttaagaatgcaccaggtaggcagagtgttcttaattttgctccacggtttcaaatgtcaaggaaacgttggaagttggattttggcattcagtatagatgcagagttgaaagcaagatcaaactgggaggtgttttgtgaaagttgagataaacgtgtattaagcttcttttttgaagcttttctgaattcgggatttaccgggaaagtaggacgtttaattttagcggagtagtgcaatgatttaaccctgactagaactctgacgtttacagctagccttgaggccatgttttcagccagtgtgcggatttgccggggtcagactccaagsttgattgtgagttctagcctttgtcagaaatgcagcaagtcatgctaacttgcaagggagtcaacagagggcacgcggtgcctgcggggccgggacggaagccccgcccccggcgcagttcccgcctgttagcgggggagaagcaccttacacgctccgctctgcttttgtgccacacagaggacggtcgggccctggaaggaacgctctcggaattggccgcggaaaccgatctgcccgttgtgtttgtgaaacagagaaagataggcggccatggtccaaccttgaaggtaggagagagtaacgtatctttttaaacgggggatgagctcgttgagctcagcgtggtcacagcctgccttttaaagccagcgtggatgtgaccctccaaacgggacgcagcgctgggaaatgacgaaaaacgctcgtgggctagcgcatgtgttaatcgaagttgatgagacgttggacaaatttcacatctcgggaaacttgraatttctaacgctttttatcttttaaaatagctttttaaaaatgtcctttttctcctatttccccttcctctttccctcccagttgtaaataacattttttagcagcaatgtaatctgctaaatgttagttgtttagggaagtcctgagaaaaggggatcaggaaatgcttatctttgtcatcaaggtggccctgtaatcttcctcttaattctctcaggggtaggggacccggaaaccccagggtctggaggagagcaaccaggaagctcttggggtgacttcgttttccttcaggtgtgtctttttagcccagagttaatagttgggtgaagggaaaggaagaagtcttccctttggctggtagcaaacgcagtagaaatccttccttagacctatgctactgaggagttatagccactgagggatttatagcctacagtgttagaaaaatgcttggaggctgggtgtatgtatgttttatttatgtatttaaaaaaaaaaacagtcttgctctgtcacccagagtgcactggagtgcagtggcgtgatcttgtatcactgcaacctccacctcctgggttcaagcaattctcctgcctcagcctcccgagtagctgagattacaggtgcccgccactacacccagcttcaccatgctggccaggctggtctcaaactcctgacctcagatgatccacggctgggtgcatgtttaagggaacaggacacctgggtgatgttctatctcacctgtggtagattaccaggttagaaaacttcccgtagtcccatcaccacgatccatgtgatttttgtccttatccatttatatctctgtaatttttaagaaatgaaaacattgccttcttagaagtaaacctaacgcctgcgttaaatgtaaaaatatatttagatgtgttgcagccttaggaaaaatactaataatttgaatttttatttattaccttttcttttaaaagtattttatttatttttgacaaatggttatagggaatggatctagacttcaaacagcaaattaatggaaaattaatggaaatacagaggcttttagctttagttaaaatatattgtgttactcagacctttagtttgcaggtaaaaagagataacggtctattatattaatattccttcctggccgggtgcggtggctcacacttgtaatcccagcaccttgggaggccgaggcaggcggattgctttgagctcaggagttccagatcagcctgggcaacayggtgaaaccccgtctctactagaaataaaaaaattagccagggcttggtggcacatgcctctggtcccagctactctgggactgaggctgaggctggggaatcaacttgaacctggaggtggaggttgcaatgagctgagattgcgccactgcaccctggcctaggtgacagtgagaccctgtctcaaaaaaaaaaaaaaagaaatatacatatatatatatatatatatatatatatatatatatatgtatatttcttcctgtctgattattctattattttcacctgtgccataagtttacatttacaaagttatatagtaatttgatctttatgtaattctactgatactcctggttttaatggcaatgggagtaaaaagagtcactctttttataagctttggaactcacttaattgatttggtctgatgttctgatgttttttctttttttttaattgaaaacttttttttctttagagmtggaggtctcattatgttgtccaggctggtcttgaactcctgggctcaagcgatcatccggcctcggcctcctaaagtgctgggactgcaggtcacgacatttagtgaggtatagtgccatgaatgaaaagcataccatcaagaacacttaaaagaaatcatttagcatatttcttaagtaaacttattctactttgtgtctttttttttttttttttttttgagacaaagtctcgctctgttgctcaggctggagtgcagtggcatgatcttggctyaccgcaacctctacctcccaggttcaagcgattttcctgcctcagcctcccgagtagctgggattacaggcacacgccaccacaccctgctaatttttgtatttttagtagagatggggtttcaccatgttggtcaggctggtctcgaactcctgaccttgtagtccaaagcgctgggattacaagtgtgacccaccgcacccagctttttttttttttttttttttgagaaggagtctcactctgttgcccaggctggagttcagtggcgcgatcttggctcactgcaacctctgcccctcgggttcaagtgattctcctgcctcagcctcccgagtagctgggattacaggcgcctgccaccgtgcctagctaatttttgtatttttagtagagacaaggtttcaccatcttggccaggctggtcttgaacttttgacgccgtgatccacccacttcggccttccaaagtgctgggattatgggcgtgagccaccgggcccagccctatttttgttttttaatgagtgctaaaaaatgaaaggagaaacagcaaggtaaggactattggtttgaaagatctgtgaacttttcagccaattattgcccacatttggggctaaatggtaggttttgaaacccttaagggagctttgggtttcagtggagaaaggcatttatttagtggagaattgagtgcttatagtcctaaaggccacacctttaaaaagaaggttaagatttcatactttaattgcaacataaataatggagggagctcttcaaaatgtccacttttcctttctccttttaatattgtttcttcctcatccccttttccctgaataaacaacagcagcaaaacctaccctgctttcacagtgagtgtactatagaagacaagggagaaagaatcctgctggaagaagttggtgagcctaggtgactcccttgataaaggatgaaagctttgcagaagagtgttccaaaaaagtgtagtctccagaccacstgctcagaatcccctggagtactcgttaattatgcatgcccaggctttacccgagttcttttgaagtagactcgggaaagagctaggaatctacccccgcccccccgccttttttttttttgagatggagttctgctcttgttgcctgggctggagtgcagtggcatgaactcagctcactgcaacctccacctcctgggttcaagtggtgtggttctcctgcctcagcctctcaagtagctgggattataggcatgcaccaccatgcctggctaattttgtatttttttagtagagatgtggttttgccatgttggtcgggctggtctcgatctcctgaccacaggtgatccacccacctcggcctcccaaagtgctgggattacagtgtgagccaccacgcccggcttgccttattgtttttgttttgttttaaataagctccctccaataatttttaggataaatgtcaagtttgagacgctttaatattattgtacatagggtagtttgatcaagatcatttgatgagataattagaattgcggaaaacaaaggactagtctttaatacccaaaacatayttgttagaaaacagcaaataggaacccaatgggggaggaacactttttgttgaacactttaacaatgaatagaaaaatagggaaccaagctgtttgcagccagggcttttgtatgtccatgtataaagttggaactagggacctccaagatggttaagaactatgaatagagttcctactgctcaaagatgtggctttcataaacatcttggtttttaaagcaaagttccagtattcttatagggaacctcttttgtatgtaaatcagcatctccctcaggattccagggttttgaaatcacttgtagagaggcctattggtggtactgagaggagaagcagagtgagtgaaaaagtatttactggaataataccaagtgtcagacatagttaagactttagtagtttgaggtaatcctgggagataagactaaaactgacaactcagggcttaaataatttcttcagggcaatattaggagagatgacaggcacaaagcaatgcgggattaatatccaggtgaattttgcagacagttgcggtggccccatgttccagtcttggrgggtagatgctgagacaaaggcaggtctccttttatgttttgagacaaggtctggctctattgcccagtgcagtggcttgatattggctcattgcaaccttcgcctcctgggcttaacccatcctcccacctcagcctcccgaatagctggaactacaagcgcacaccacctcacccagcttatttttgtattttttgtatattgggggtttcaccatgttgtccagtgtagggaccagccccacagggtcggtgggtctctccctgtgtgcggcgacgagagagtgtagaaataaagacacaagacaaagagataagagaaaaggcagctgggcccgggggaccgctaccaccaatgcgcggagaccggtagtggccccgaatgtcgggctgcactattatttattggatacaaggcagaaggggcagggtaaagaatgtgagtcacctccaatgataggtaaggtcacgtgggtcaygtgtccactggacagggggcccttccctgcctggcagccgaggcagagagggagaggagacaaagagaaagacagcttacgccattatttctacacatcagggactattagtattttcactaatttactactgctgtctggaaggcagagccaggtgtacaggatggaacatgaaggcggactaggagtgtgaccactgaagcacagcatcacagggagacggttaggcctccggataactgcgggcgagcctgactgatgtcaggccctccacaagaggtggaggagcagagtcttctctaaactcccccggggaaaggcccccccccccgccgccggctttcccggtctgctaagtagcgggtgttgtttcttgacaccttttgctactgctggaccacgatcctcttggtgacgggcgtcttcccagatgctggcatcaccgctagaccaaggagccctccggtggccctgttcgggcataacagaaggctcgcactcttgtcttctggtcacttctcactatgtcccctcagctcctatctctgtatggcctggtttttcctaggctatgattattgagtgaggattatcataatattggaataagaagtaattgctaccaactaatgattaatgatactcatatataatcacatctaagatctatatctggtataacaattcttgttttatattatactggaacagctcgtgtcctctgtctcttgcctcggtgcctgggtggcttgccacccacagtccaggctggtctcaaaactcgtgagtttaagccatctgcctaccttggcctcccaaagtgctgagattacaggtgtgagccactgcacccagccaggtctcctttcaagtctaacttctaaagttaccagaaaccagaatcttaagtgaatagacatcaggacatgagtggtaattgaataactctccaaccatcccctttcttaactattcttaactgcagaggctaccagaacttgacagaaaacacaatttattttgtttctatcctcttaaataatcccttctttttggaggcattagtaatgtatctgcttttggcttgattaaagttgaggcctgaggaggactggaggattgctttgaagatgagggaagtgacagattctctggcgtacattaaaaggaagtaagggttgaggactaccaagatttattagagtcttagactgttagaactgcaaataaacgtagaaatttactggttgtagagtcgtgttgagctcctcctacttctaccaggtgtaaacacaaatctctttttttgctgtgtatctgttctttaatagtagcgtcaaaattctggtggtatagacttcagatttccggtcacttctcctgtttactcaccagcgcctgactattctaggcatcaccttcttgcccctatttacttttgcctggaccatttcatcagtctttaactggcctcccacttctgatctcccttctcttccagctcatattgccagtcatcttcctgattgctactcgctggccccagatctgcatccagaacgaaatgggagctccttagcttggtattcaatgccctccagggtctagccccaacctgcttttctggttatctcctgctctgctccctcacttactggaggctcccgggactatcattgcagctaaaatatttctccctacagttttcctcctcacttctattctttatttcaacacctgtcttctcttcctaccacaacccactttyccaactgcctacccgttcagaatacaagaccaaagttttccattcctttcctcctctgttcccacgacaatcccataagtctttatttttggaaaaggaggaatcctgccaatgataactttttggcttacatatcgaggtcagagagctagtcttattctttatgcctgtggtcccaggcatatgttagagcccagcagatacctaagcaaatatgcctgttaatgattataacatttatttgttgaatacctattatgtgttagactctaaatgttgttaatacttagtgattaaatccccacaacagtcctgtgaaggaggtgatattatccaggtttacagaagagaaaataaaagccttgagaatttaaggagcatgcccagattacaagctagttaagtggcagagtcaggactagaacccaggcctgtttgcctgcaaagctcactctcatgtactcatacttctggcacttggccttatgttattgctattgagatacatgcttgtgtccttgatgagatgctgtggtgtgctcatgattcgaggtcaggcccatgcaaatcttggtattcctagcatagtgctggcatatggtaggtgttcattcattacatgcttgctgaatggaacttcattcttctgtgcctacttgtactttctttaagagaacaatgaggctgggcttctaaaaaaaaakatacattttartatcttccatatattgaaaaaaatttctttagaggcaaggtctygctctaacccaggctggagtgcggtggcactatcatggctcgctgcagcctcaacccccctgggctcaagcaatcctcttgcctcagccgcctgagtatctgggaatacaggcatgtaccaccacacctggccaatttttaaattttttgtaagataaggtctttacaaaaggctttttgttggcttaggcttattttttaatacctagtgtgcattcagtaaatatgtattgagtgaatagatcgtggtagggccagaagagactcacttaaaggatttagctctaaggtatctggttttattgaagatgggctatcaggaaccaagctctaggttgttcagaagagattctaggcagcatattggaaagcagttcagaattaaaagctgtatgacagcaacattgtctgccttcagcattctatgcaggtgtgtccaggtcagttgggaacaaagtcacttcacatctatttagctagtatttactgagcacctgtgttgacatcgggctaggcactatctttgtaatctctaacgcaagtctgtagagcaatgtacttatttaaaaattcatttgtcaggctgggtgtggtggctcatgcctgtaatcccagcactttgagaggccgaggcgggtggatcacttgaggtcaggagtttgagactgacctggccaacatggtgaaaccccttccctactaaaaatacaaaaaattagccgggtgtgttggcgggcgcctgtaatcccagctactcaggaggctgaggcaggagaatcgcttgaacctgggaggtggaggttgcggtgagcggagatcctgccattgcactccagcctgggcaacaagagtgaaactccatctcaaaaaaaaaaaaaaaaagtaatatacaaacacttgttgacaaataaatttatatttatttatttatttatttagtttttgaaatggagtcttgctctgttgcccaggctggagtgcactgtgtgatctcagttcactgcaatctccgcctcctgagttcaagcaattctcctgcctcagtctcccgagtagctgggattgcaggcatgcgccaccacgtctggctaattttgtatttttagtagagacaagatttctctatgttggtcaggctggtctcgaactcctgacctcaggtgatccgcctgcgtcagcctccaaaagtgctgagattacaggtgtaagctaccatgcccggcctgattttgtttttaatgatgacaaccactctgtatggcagagtgagacatctgatagacttctgttacaattttcgaagaaagtaagtggaaactaataatgcagatatttttcatttgatccctgagtggagttcctagaatgctgcatcctttagtagccacatacccagtccttcttaccctccctgtctatcaaaataacactcctagtcattgctgccttttgaggtgttgtggaggctctcgtaacctgaaaggttgttcttttcatctcacgcccttatttatattcttgaggcttggcaagtcagccagcactgggtttttaaagtgtcattaagtatatgatttgaccacagagcaagggtggagattttatctactccaaagtatttcaaatgagtgagtccagattatttagtgagactcttttacttctccaataataatgccatcttatttgaataaagcagttattcaaagcctcttttagatactagacttaagaatctgctgaaatctaaggagctattcctgagaaaaatgcacataaataattttgcatataaactcagactatttgtggatctgcttcagaatatctggtacagagaattacccttcaamgtgttactgtacacactttgaatagttgaagccttcgtaggtttttaaaattttgttatatggcaaatttcttttcactggtatttgttatagtggaatatattcctgtgttcctccttactgatttaacctttaaaaatatttttctggggccgggcgcagtggctcacacctgtaatcccagcactttgggaggctgaggcaggtggatcacgagatgaggagtttgagactagcctggccaacatggagaaaccccatctctactaaaaatacaaaacttagctgggcgcggtggcacacacgtgtaatcccagctactcgggaggctgagtcaggagaatcacttgaacccgggaggcggaggttgtagtgagctgagatcacaccattgcactctagcttgggcaaccaagcgagactctatctaaaataaaaataaaaaataaaaaaaattaaatttttttctgttcctaaagcaacattcagaagtgaaactactggtttgtatacagtttttttttttacatttgctatctttgggattgtttgatttattaagtacctactcagtagttgaaaacactgtcagatatattacataattttcattcactgtagtaattatatggtataaatacagttgtccctcggtatcttcaggggattggttccaggacccttgtgtatacccaaattcatacatactcaagtcccaaagtccaccctgtggaaccagcatwtatggaaagtcagctctctgtattcaccggatgtgaaacatcacatctcacaaatacagtatttatttctttatttctcacaagctttttcctctttaaggagcaggcagacctgtattttttattgcttttggtataagtggatctgtgcaattcaaagctgtttccttcaagggtcaactgcagtagtattcccgtcttataaataaagacactggaggctgagaggttaagcaagctggctaagataatactaataggtaataggtcaagattggaacccagatcgtcccctcccacagtctgtggtcttttcagaaactaattttcattaaaaaaaaaaatacagatatctgtcttatcatagcaaagttcacctttaataataacaaaacacaaaatatatacacacaaacataactttaaagaaaattacgatgaaagagaaactgccaggcacagtggctcacgcatgtaatcccagcattttgggaggctgaggcgggcggatcacgaggtcaggagttcgagaccagcctggtcaacatgctgaaaccctgtctctactaagaatacaaaaattagccaggcgtggtgactcgtgcctgtaatcccagctactcgggaggctgaggcaggagaatcacttgagtccggggggtgtaggttgcagtgagccgagatcgtgccattgcactccagcctgggtgacaagaacaagactccgtctcaaaaaaaaaaaaaaaaaaagttaagatgaaagagaaactatacctaatgtcctgctaattctggcaaatcaaactaggaattttaccacatttcttcacaactcaatattaaacagaagccatggtggtatgaagggagaaaagctgctatgaaagaaggaacagaaaagtttagggaggtagctattaggataagtgtatatgttagagtgtgggactcaaacctgactgattcctggctttggctccaaaaagtctcttaaaaatccatttgttataggtaagtgttaacagcaaaacctcactggagaaaaatagtggactcgtgacttcttcctttatttggttacagggagacatgtgacctttgtcatccaccctatcacgtttgtgttgagcagtatgggttgtgggaaagagctcaagaatgcttggaattaacctaaactcctagaaaaggaactgaaaatataggagaaaagggtgaagaaaagaggaaaggaaatggaggtctgtattgaaccctgggtagcaactcttgagcgaagaaagaggaaaaaggggaaagaggggagctaaattatctctgaggcaactcagtctcatggttgcctgaactagtctatactgcgggaataaggtagacgccactggtttctttgaagtaccagtgcgcttcttgctttctattcctggtcacagacaaatttatcagtagtgcagtttcttctttttaagcttcatttaaataattattagtagcacttggaccttaggttaggaaatcactgtttaatgacttaaagattaaccggcatggaaatcccattctttatatgattggggagagttattgaacttgagattgttttactttgtagcaatgtctaaaggcagatttgttttgttttgttttgtttttgaggcggggtttcgctcttgttgcccaggctggagtgcaatggtgcaatcttgtctcacccgcaacctctgcctcccaggttgaagtagcagggattacaggcatgtgccaccacgcccagctaattttctatttttagtagagacgtggtttctccatattgatcaggctggtctcaaactcctgacctcaggtgagccacccacctcggcctcccaaagtgctgggattacaggtgtcagccaccgcacctggcctaaaggcagatttttaaaggtggaacataatgcaagtctgcctttcttaggatgatctaagttacatgttaataaagttcttggagatctagcatagaatgcattcagcactgtaaatcacaacttaatgtttgcctygatatgctctgttgctctgagcaagttgtgtgggctgttatctcctgagaaatccctgtaaatggtattagtaatactttataagcaggttgggagaatatagttttctaaggcattttgaaattcttagatgaaagggtctttatgyagcaaattggtgtcagcctattttccttcctctgagccagaagaaaataggcaccatagggtgggaagggttggcttatctgttagagttcttttgtaagtagcttttgttgaattttttttttgagatggagtctcgctctgtcgcccaggctggagtgcagtggcgcgatcttggctcactgcaagctccgtctcctgggttcaggctagtctcctgcctcagcctccagagtagctgggactacaggcgcctgcaaccacgcccggctaattttttgtatttttagtagagacggggtttcaccgtgttagccaggacggtcttgatctcctgacctcgtgatccgcccgcctcagcctcccaaagtgctgggattacaggcgtgagccaccgtgcccggctgcttttgttgaatttaaagtggatgtgagaagctcctaagaatatcgttcactgtaaaagcagacttttttggatttgggtcttggaattcttaactgtattttcacctaagatttaaaacaagttcaaatactagtttgtaattggccagacttgggacagataygatccttgaatgatcctgggtctcaacttacctttctttcatttttcctttattttagaagagggataagaactttttctgaagagcagtcaacttttcctttcagtgtgtaggattaattccacgaatctgtgaacttaaatctttgctgccaaataacttgcagtagatgctgggatagttttaaatctattttaagttatacattcagtacataagtgcatctccgtgtaaaaacagctatgtttggaagatctaaaacgcagcttttgtttttgagaagccaacaatctaatagggtaggatcatatatatgtacaactaaccgtaatgcatggtgttttgaaaaatgcacgtatctccctgaattacccctagttaataaaataattgggagcaaatggtaatataaggattttggagtaacttaatactactagattttgctgtttatacatttacaaaaaactttctgctaatgctaaagaaatagaacaagtctatatgcataaaggaaggtagggctaatttacttcctggtgctatgaaactggcaattggacaggtgcaattgtgggtgtctttttttttttaaggtgtacctgttgcaggtttgaaaagctgttgatgctcatgggttgtttgtgtgcatgttctctttaaaaaccagatgtattcattccctttttttttttttttttttttgagacggagtctcgctctatagcccaggctggagtgcagtggcccgatctcggctcactgcaaactccgcctcctgggttcacgccattcttctgcctcagcctaccgagtagctgggactataggcgcctgccaccgcgcccggctaattttttgtagttttagtagagacggggtttcaccgggttagccaagatggtctcgatctcctgacctcgtgatccgcccgcctyggcctcccaaagtgctgggattgcaggcgtgagccaccgcgcccggccattcccattgttatgtatactttgctatttgctgctggtgagacagataaggagtcacgtctttaactgcacttgagtttccagtgaccccattaaatccaatgggtaaattttcccacgcagattactcacccagtttacagattaagctttcatatccttagactgtatctgaaattttcatagctttgcccaccttttagggttcagagttactacccattcagtgtcggtggcctttagctgttggcaagcttccaagtaaatagctcttttgcagagatctctacccattctattcttccactcctgggtagtggagaaccaaagttcacctgagtaatgcccgtgcccagcacccagtttcctgcaggggttagcacggatattggaggctcccccgatcccacagatactcaggatgggtattggagggggcttggtttttaagaggacatgtgaaagtaattaacccgatttacatttgtataatgagtccaaacaccaccttgcaaaagaactgagagtttagcctkcttaatggagtttctgcttttcacggtccttggccttaccgacggtttacagtccagccagatttagttcacaaaaaaccaaaaccaggtcgacctcactgcagtatatgatggcagcgagcgttttaaagcgcaggacctttagtctcctcaatagttttgtgtaaagttgtccaaaagtgtttttttttaaagtgaggtgatccagtcggtaaacgctttgaaaaagaatagctgtcccctgagcgggcattagtcgcgtgtgaggtcagggcccatcattgcgcgtgttgggagcgccgcgctggtctatgagcgagcgcctcggcttgtggctgggccgggccggggcggggctgtcttcccgcggagcgtgctgggggcgggtcgcgccgggccgggccgctagtgcgcatgggcgggcgtcctcggctctaactgccgccactttccacacgctgggagggccgttacctcagagatacccgtggccggcatgttggttgaaaaagcttcccggaagggagacgaagagaaaggagaggagcagctcgtgatcatccccggtagcgagtacgcggcgaagtaggcggcggcggagggagcgctgatgaagatggatgtgtcagtgagggccgcgggctgctccgacgacctcagctctggggaggccgacgtagacccaaagctcctggagctcaccgctgacgaggagaagtgccgcagcatccgcaggcagtaccggcagctcatgtactgcgtgcggcagaaccgggaggacatcgtgagctcggcgaacaactccttaaccgaggctctggaggaagccaacgtcctctttgatggcgtgagccgaaccagagaagcagccctcgacgcccggtttcttgttatggcttctgatttgggtaaagaaaaggcaaagcagttaaactcagatatgaacttctttaatcagttagcattttgtgactttctgtttctgttcgtgggtctgaattggatggaaggcgatcctgacaagttgagtgattgtgatgatagcatagctctttccttctggaaggcaatagaaaaggaagcaacatcctggatggtaaaagctgagacattccattttgtttttggttcattcaagctagaacgttctgcaccaaagccccgacttgaacaccagaaaaaagttcgcaagatggaagaaaatggcaacatgcctacaaagttgcagaagttggacctgagtagttatccagaagcgacagaaaaaaacgtagaaaggattttgggattgttgcaaacctactttcgaaagtatcctgatactcctgtgtcctatwttgagtttgtgattgatccaaactctttttctcgtactgtggagaatatattttatgtttcttttattgtaagagatggttttgcaagaataaggcttgatgaagacaggctgccaatattagagccgatgaatgttaaccaratgggtgagggaaatgattccagttgccatggcaggaaacagggagttatatctttgactttacaggagtggaaaaacattgtggcagcttttgaaatttctgaggctatgattacatactcctcatactaaagatttcttagtatagcatcctttttgtgttttttttctgaagttagatggagagtaaaatgtaaactgaagcacatattgtatctcttgtaaagtgaaaaagtattttcaagaacatcagacattgttttactgtgcagcatatttttcttagtaatttataaggtcatgatcttctgttattaaaacaaattcactggcatatttatgggaacgttttattgaatgccctttaagactattaataaaaacaagttttggataccaaattaagggatatttgataatttgcaaaacataataatttacgaaaatcagtgatgatgctctgtgatgcgttgctttctctgtcatagggaaccaagagaatcccagaaagggttcctaaccaggttgggcaaagagtgggtaaaaaacaaaagttaaaaaaaaaacctgtctgtaaggcagtgaatatgcaacattaagactaaaaaagtcattgcaaggaagacttaggatttatgagtgagtatccatattctaaacaatttctgttattgtactcagcaaaagtagtgtctctgctgtagtagttgaggtatcagctaagggtgaaaggtgagtagaaacacgaagaaggaaaaggcattctaggcaagagaatagcaaggtcaaatgcatggaattgttagaagttaggcacgagaggaccattagatttatggaaaaactattatatttgataagctgggcaacaattgaataacttcatctattaatatcctgagaagatgtttttgtcaaactattatacattgaacacaagatcttgctatccagttgtagtttttatctactgaatttcttctctggcccctagtgtccctttgtggtctttgctagtacatagaatgtccttcacaatctacgctttttcatcatgtaacaactttgaatatttgtcccactttaattttgcatttctatctttttttttccccctcgagacagagtatcactcttgcccaggctggggtgcagtggtgcaatctcggcccactgcaacctctgcctgcggggttcaggcgattcttgtgcctcagcctcccaagtagcygggattacaggtgtgtgccatcacacccagcaaatacttgtatttttagtaggaacagagtttcgccatggtagccaggctggtctcgaacacctggccccaagtgatccacccgcctcggcctccggaaatgctgggattacaagtgtgagccaaattttgcatttcttaatagggctttaaatgccaggaaactgaccttgctgaaactaaaacatgttagtttatctggatgttcttcacttagtgtaaagccataaaggcttttttctttccgttgcataaattacaaccttatttggagattattgccaaaagtttgggtcattaagaaagtaacttgagaaggtgcagtaagcatacccataagctttcttccccttgatccctataggagcttaatttttggtagtcgtggaattttgccattaaacaatactttggcaaatgtttaggtatctgttatgcatagcagtggcaaactttcctagtaagtctagtggtacaggaaagggaaatccaaagactcaacaaatgacaccaagactgagaggaaggatttttcatgtatggagatgaggttcttcaccaataatagagtagaggttttagcaaaaatagaactttctcatgaaacttggcaaattattttctaaattagttactcctttcacatatgaaagagcgctgacccttgctagtgtctagtatcctttgatttatagtagcagtcatggaagcaccatttgatctcactcatcctcatttccagcatgtctctaccaaccaagttccttgggttttgcagagatctgctgttggaagaaaaagtactcttaatgacagcaaaaagatcccgccccagtactttactgacattcagttgctctgttgaatgtctcatgtctttactaggagtatttgacagtgatgatttaaaagcattaatagagaatctggaggcttaggagaggtaatttttttggtcttctctaaagttaatagctgttaaaatataaagttgaccacttctgtttctatttttactggttggcatgacaccaaccagtaaaatgatgaggatgatggattgcctcatcatttttgaaattttgaaattaaactgactgcttaccttgaagaaaaaaggagattaaaaatttatagaggttaagaatcaaactgcaaatctgcttgtttcttgctaatacgtttgtatactgaatagaaataacattatgctagtctgtctatatactggatcaagatttgttaggaagagggcatttcaaaatagtggagattgacgcagggaagctcagcggaggacaccagtgtaaatacattccagcacttcttgacttagttccaggcaatttcccttcttcaggagatggagaattagtaacttaaagggattaattcctaccagccactatgctaacatgcattatctttcttaaactcagccatttgatgaggtcaggaacctgttagcttcgttaaggattaggtgattggtcgaagtcacctggccttgtgagtggtagagcaagtattttaacgcaggttatttctgcatcagagccatctataatggtaggggaaataaaagtacaaatctggcaaaggatagaaactatgtttaggggaaaagtcaggattgcttattccaattttaaaagactgccacagttgaattgctttctgttttgtgccctttttgggggagcctggagcagtgttttactaggagtgggtctggggaaagggattactatgacaggcaggtggatgaaaaggaaggctatctaatgtgtaagccttgccaacaagtgacagttgcctgcaggtcatctcatattctatagcattggttctcaaagtgtatgaggcccttttggcatactttaaggtcagaattattttcataatagtaagatgctgtttgcccttttctttcttttttttttttttgagatggagtctcactctgtagcccaggctggagtgcagtggcatgatcttggctcactgtgagctccgcctcccgggttcacgccattctcctgcctcagcctctcgagtagctgggactacaggcgcctgccaccacgyccagctaattttttatatttgtagtagagacggggtttcaccgtgttagccaggatggtctcgatctccagacctcatgatccacccgccttggcctctcaaagtgctgggattacaggcgtgagccaccacgcctcgctgcccttttcactcttaattctcttgcatgtaaactgtgaagttttccagaggttatatgacaggtgatgtggcaacagattgaatggagaaacagatatgagctgtcttttgttgtcagacattaaagagaatcgcaaagatacaaaacagtgccattcttctaattaaaaaattttttaaaataaaaatacgttaacatttaataaatatattatttttaatttgttaatgaatattttaagtttcttcttagttttaatttctaayatagtaaatagataaaacccacattaacaagctctttggagtctcaattttaaagctctgtttaagattgtaaaggagtcctgagatgaaagagtttgagaacctctgtagcagccaccacagtcagcggacataatttcaagcagttgtagttggaggaggatgggggaatttttctcctttccttatcccatctctgtgctaccttctactgtttggggcagctgttttctactgtctgtcttatttatatttcaggtgaagtaccacttaaatggaactgaatgatagcactttcaattttaagtttggttaaaattttaaaaacaatgtttctttttttttttttttttgagacggagtcttgctctgtcacccaggctggagtgcagtgccatgatcttggctcactgcaatctctgcctcctgggttcaagcagttctcctgcctcagcctcccgaatagctgggactacaggtgcacgcctccacgcccggctaattttttttgtattttggtagagacggggtttcaccgtgttgcccaggctgattgtgaactcctgagctcaggcagccctcccgcttcggcctcccaaagtgctgggattacaggcatgagccacctcactcagtctcataatgtttcattctaaggtcaactgaatgcttcaattgcctgtgtcttgccaattggtaaattttacctacagtgcttaaaaatggtgaggttcattcagagcttttttggtaaaatctgtgcactggttgatacaatttgacttgaagcttgaaccaggagaagccaggttacatacagaatttcagtaaggaacggattgtaaacattggtgaagggaatatgtgacttttcagcatgaggatacrttttctggtatttgttctagtaggtatgttggaggagggggattcctagaaccatggttttcatttagacagccagttattgtgttctgtcaccatctttgctaatttcatgcagataaaatgaggttgagataaaaaatgattgtatgttatttttccagcagaacatctaactggatttattagttaactcttaaaccaggaagtcatgctctttgagacccagtagggagtcacactagttacttgaagcataattgatcctttgatcgaatggctattattaccaaattgtttttcccccacagtgctttgtattgaaggaggaaccttggccataatgccagttgatgactactggctgtgtttaccagcctcttgtgctagaccttttgtgcagactgtcagagtggtgcagtcttgcccccactgttgctggtttccaggtgttctcccttcagtccctgagccactacgtatgcccgccatgctgccaacaggtagccacagtgctgtgcttcctccttcacattgctccaccgcacccccttccacatcccaagaaccttcttcttccgctgaccccaagctctgcctttcaccccctrcatctgatagtaggcaagagagaaatgtgcagtttgggctggtaagtttgggggcttttttttgttattaaagttaaggctttttgtttgtttgttttttaaaatgagatggagtctcacagagtgagactggagtgcagtggcgcratcttggctcactgcaacgtctgcctcccgggttcaagcgcttctcctgcctcagcctccggagtagctgagattacaggcacccgccactacacctggctaatttttgtatttttagtagagacagggttcaccccgttggccaggctgatctcaaactcctgacttcaagtgatcctcccgccttggcctcccgaagtgctgggattacaggcgtgagccactgtgcctggcctacttgattttttgaaaacattttattgtgcttgttaacaactttctcagtcattatctcttgttaacatagatttttattttagtaagcgataatattaaatatatcaccaaaatattgtatgaaacgaatatgaaatataattaatgtgtatcagaattatattagtggaatgaaatgattttttaaaaattaagtctaacacctaaattataaaagtctgttacttgctaagtatatggaaagtaaatattaaatatgggagacttcatgcatatgcaaattaaaggaatgagctttgcagagttgtgcctatttaaaatatcctacaaaagcagcaactttcacgtttaacttttcatgcaggtcagtatcaattgacagttttgttctgaatttttagatgttatgccccagccaaacagtatagaaatgtcttaaataaatatttggctggtcttttaaaattgttatattgagattaagctatgcccatatttaccaagcccctatctttaaaacctagtttaaaaattctaggaaaaaaaggctaatgattaaacctgatttagacctaagttggtttacttatgtagaggtactatacgaacacttcaaagtagttagcagtgaccgtctttggggttaataaactargataaagcaagcagttcacaactttaaggaaggttgaatatttccatctgtatgctgtaattaaacagcatcttccctttgaaaattccttttgtttttctttaagaaaagattttcttacaaagctttttggacattgctgattttamgttaaattattttctcttctgttatttttctttaggcttatcaggagggcagacttcaaaagctactaaaaatgaacggccctgaagatcttcccaagtcctatgactatgaccttatcatcattggaggtggctcaggaggtctggcagctgctaaggcaaggctccttgtgttgtctgttgtctgttgtctgggtggtgattagaatattaacatccctgacagggttctctcctctctctgtggaatttatttgatccactcctgtgacattttgcacattaacttgggcaggacatggacatcgtaagggaccactttataaatcatttttccagattaaaatatacattccttatattaaagtatagggcccagtattttggaacaygwttccgttcactttaagtttaattgatttttcagagataataagggtgttgtgcctggtgtggtgactcacgcctgtaatcccagcactttgggagtccgaggtgggcggatcacctgaggtcaggagttcaagascagcctggccaatgtggtgaaactccatctctactaaaaatacaaaaattagccaggcgtggtggtgggcacctgtaatcccagttacttgggaggctgaggcaggagaatggcttgaaccttggaggccgagtttgcagtgagctgagatcgcaccattgcactccagcctggtcaacaggagcaaaactctgtctttaaaaaatatatatatatatgtgtatatatatgtatatatacacacatatatatgggtattgtgtggaaatggtctgaaattaagcaaatatatttcttagttaatatttcttagttaatatttgtctttttcacttgaatgatttccctgttcataaccccttctctccaatataaaaaaagatggggagcaattgggtttcttaaacccatttattaaaaatgatttgctttttgtatatgtgaggttatctaataaccactaactctgtggtctgagggtgattgggaagaggatgtataaataaagaaggttaggagtgaggctcctggttctgaatcaagataaatttcccatgtgaggaccccttgggcctgtcatccttacccaacaggttcctttaaaagatgaagtggttataattccctaaggtatagcttgtgctgaatcagtaatgggtagaagctgcccaaatactgcagaccagtatgtagcatgaagcaatgctttactgaaagtaattgaggaataatacctgatgtattttactccagtggtggtgtgtttgaaagacgtgtagactcagtcctttcaaataacctttggaggtctagttgccaatattcaaagcttattctctgagaatgataaaagatattctgcaaaacaaacttctaactcttgtttccctccctaaaaatatatttggaaatatcatagatgttgtcaactttttcatgagcgcctcatgtgaaaattttaggaaatcttgtaatacagaagaaaaacttcttcagtattctgccttagaaaccaaattagattaaactttaaaatgatttttaaaatatcaccttataggatacaggttgcattaagggctgtagactatcagtaaacctgctttttcagctacttggcaacttgcttggaaatggccactttcttttttcaggttattgctgaatctgttattgtttgagtggaattatgtgagagaagtctaaggtttccagctgattctaacaattttactactctattctgcataattttaaaatctactctcagaactatctgaatatctgttaatttttatcctggagtttaactaatcatcatggtgtgtgaagtacccaggtattaattattcgttatgctttaagctctatagcttaaaaaaaaatcatggatttttaacagcccatttccaatctgtcatgttaacctttccaactcactttaataattttattttccaggaggcagcccaatatggcaagaaggtgatggtcctggactttgtcactcccacccctcttggaactagatggggtaagcttttaagatactctagaagtgatgttgcygaagtagttttcccctggcartaatctaactggttcctaaagcctaattwaaaaaatcaaaaactaagttaaagaaaaaacagccccaaaacatatatatcttttatttgagccaagttaaaatggatcaggttaaatgctaaaaatttaggttctttggcacagagtcaagaagtaagaaccctgtctacaagctatgatttaaaggtaaatatttgagtaatctagcatatataggggcttaataactgaaaatttaaacttttcatatgtggatttgttttaaatctacctcctacattcaacaagagttggaatcagataccctactgtatagcccttgctgcttctgagtcttgatgaattatatgttcataatatttactgaacatttattatgaaccaaggcaatgacgatatagcagtgaactyggcatattcaaagttcatgcccttgtgaagcttatattctaagtggggagacaaaagatacctaagaactttaggagttgtggtaagcggtattgaaaaaattaatatagtggcatagagaggaagtggataaaggagaatttaacttcgagaagattatcaaggaagacatctgaagaggtgacatttagaagaggccaaagaatgagaatgagccagctgtcaaaaggtgaggcagaaccttccaggcagcttctctttctttgaggatagcacatacaaaggccctgaggtaggtaaaagtccttcatggttgtggcatggataatgggagctggaggtggtagtgtgagatgagaccagagaggaaggcaggtgtcactattgagggctttgtaggccaagatgaggaatttggactaatcaaagcatataatttggactaaattggactaatcagagcatataaatgagcctttgaagactctaaggcaggggagccatgtgataatataagattttttaaagattacttggctgcttgcattagaaggaaccaagaagcaggaagtccagataaggcgatgtcacaatttctgattcatccattcagcagatatttaatgtgtcaatctgtgtcagacactgctcttggtactaggtatatcccttctgacctgtggagcatatactccagagtgacaactggtagtattctactcagaggacttactttgagctgtgaagtctgttgccatctttcactcttatgtcattttggtcacctgcctgtgttttgttctaatggaaacaagctgtcaccatattctttaagcttagggatactaaacctatttttagggagcaagggaagtcatgcatcctttaaaaaaccaagtgaatgctgtaggccacctccttaaaaaaatgcacatatacaccaaaatttttttctttttttttttttttttttttgagatggagtctcgctctgtcgcccgggctggagtgcagyggcgctatctcggctcactgcaacctccacctcctgggtacaagcagttctcctgcctcagcctccttagtagctgggattacagacacgtaccaccatgcccagctaattttctgtgcttttagtagagacagggtttcaccgttttggccaggctggtctcgaactcctgacctcaaatgatccacccgcctcrgcctcccaaagtgctgggattacaggcgtgagccaccacgcccagccaatatacaccaaattttatatgcagtttaagacccactgcactctaatcatccccagcatagcaacccctttatcagttacctctgcatagattcaatggcaagtgcagatgctgcttgaattacaatgggggactacatcctgataaaatcctttgtaagttgaaaacaagtcaaaaatgcatttaatacacctaacctcccgaacatcatagcttagcctggtctaccttaaacatgctccgaaaacttacattaacctacagttgggcaaaatcatctaacacaaagcctattttataataaagtgttgaatatctcatataatttactgaatactgaactgaaagtgaaacacagtatgggtgtatgggtatcaacataaagagaaaaatcgtaagtcgggtcgtctgtatagggttgtgtacatagtaagatttcaatttctggcatctttatcagcagtcagttaattttgtatctttgaagtatacggaaattgtggaaatctgcccctctttttgttttgttttaggatgatgttaccgtgtttggtatgtaagggtctctgaacttatggatgttgtaagagttaggaataaactttattactgaccacattaagcaaatataatacaatatttcttagagttgtaataattgttgactttgttctttgaatgtttgtaaggcttggaaagcaggttataaactgatttctcaatgttgttgtaggtctyggaggaacatgtgtgaatgtgggttgcatacctaaaaaactgatgcatcaagcagctttgttaggacaagccctgcaagactctcgaaattatggatggaaagtcgaggagacaggtatgagagggaaaagctactcttctgtttgtgcttttgggggtttgagctgcaatttttgtgatgcgtcgtccattttcatgaagatagcaaatagcctagttgtttttattgtttacatttttgatggatataatcactggagttatcctttgtcaagtatttacatagttgttatggtaacaacagatactgcatttggactatggtatttctktaatataaaattagagttcttttgaatatattgtcatgtagtatttgtgagaaatcatacaatgtttataatttgtaaggaagtactaattgcatttgctttctttcatgttgcatttttctccctccaaagaagtctgtttcatgagctgatgtttgtggggggtgggggttgtttgttcaggagggggtggttaggctttgttggattaaaactatttagagtaccctagaaaccctagatgagtttaagagattggaattgttaattttatttttatttatttatttatttgagacggagtctcactctgtcgcccaggctggagtgcagtggcacgatctcagctcactgcaagctccgcctcccgggttcacaccattctcctgcctcagcctcccgagtagctgggattacgggcgcctgccaccacgcctggctaattttttgcatttttagtagaggtggggttttaccatgttagccaggatggtctcgatctcctgacctcatgatccacctgcctcagcctcccaaagtgctgggattacaggtgtgagccaccgtgcctggyrgaattgttaattttagaaagtagattgcattatttagtagaagaataaaatgagatctggcatagcttcctggctaatttatgacatatgtcactctgttgtgaagagtgaaactccaacccctatgtgatttgaggtttgagacctatgcattatggagcatttgagggaaaatattccagccagtagccaggataaacattttgtggcttttttggggttttaattgtttattaaatgtaaagataaggcataaatgtatacttggaaaaattttgctctcactcaaactagttatgcttctcttgttgatgcttttacttcctacttaaaataatagtaccttttccaagtctggaatcttagaaaatcactaacttttaaagttttataatgttggggtcacattgtttgctcagacccttaagagagagagggatataggaggaaattttgtaaaacattgataattactgcagcttagatgattagcacatgtgggtgagctatatactattctattccactcctagcagagaaacagcaagtcctgagccttttgtagtggtggtagacagaggccaggcagggaggttagtccaagcttcctgcagccttccctacccacaagctacctggtcctctagaaccataaccgcagtggcatctgcagttactttttttttttttttttttttcagttgaaccaatttcttaaggtttgctctaattctaacattatgatcatatgaattcaatatccatgatctatctgttctcttagaggctataaatcaattttttgtgctgtcattcccacttccagaggctggccagtaagtgttataagcctattttcaaaacttactgtatagccagccaggatcatgcctgtaatcccaacagtttaggaggccaaggggaaaggatcagtttgagaccagaagttcgagactaccttggacaacaaagcaagagcctgtctctacaaagaataattagtcgggcctggaagccctctcctatagtcccagcttctcaggaggctgaagcagggggataatttgagcccaggagttcaaggctgcagtgagctgtgattgattgcaccactgcactccagcctgggcaacagagtgagaccctgtctctaaagaagagattattgaggctgggtgcaatgactcatgcctgtaatcccagcactttgggaggctgaagtcggcagagcacttgaggtcgggagtttgagaccagcctggccaacatggcaaaactgcgtctctactaaaaatataaacaattagctgggcatgatggcccacacttgtagtcccagctactcttgaggctgaggcacgagaatagcttgaaccctgggttgaggggtacggaggttgcagtgagcccagattgagccactgcattccagtctgggcagtctgggcaaccaaagggttgatttttatcctttgaaatttaatattactttagtgtcctgacttaaaggattaatttaattatgacagaatcaaaaagaataaaaaagttttctctttgataagatatgggagtttggaggaaatgtgataagactcttaaaatcctgtctaaatgaatagtcagtgaattttttccgtaaaaggccatatggtaaatattttaggattcttggggcatagggtctctagtagctacttaactctgcttatgtagtgtgaaagtagcactagaaaatatcgaaataaataagcatggctgtattttaataaagctttatttacaaaaagctgatgggctggattggcccatggtgcagtttgccagcccctgacataaacactgttactagtgtagtaactccatactcggctacatcagaatctcttggattttcttacaaacacagaatcctaagccttaatatatcccagaaatcagtaaaattcaagttcgtttctagataaagaaggaaaaagtttgtgtattgttattttagtttaaaattgtcaggggatctgtcttgtattatttaattgtattagtcttataagagaatacttgaagatgaaaaagtggcatatgtgctcaaaatggaggatttgccctttcagattgccttttagagctctgctccctgtatttcacttgagtggttattgagaaatgatctttgccagcagttgaaaagccaaacaagattttgttttattttcttatacagttaagcatgattgggacagaatgatagaagctgtacagaatcacattggctctttgaattggggctaccgagtagctctgcgggagaaaaaagtcgtctatgagaatgcttatgggcaatttattggtcctcacaggattaaggtaattgtgtgacatcctgactagctttttttttttcttttttctctttttaaaagctttggttagaaaatgttaaagtattataataaaagtaatagccactgtgacccagactatccagtttggtgattttgctatcatatcatcctatggggccttgtgtggaggtatggyaaagtgtaagtatgctggaccagaccgcctggttttgaggcttggctccagcacttactaacattgtgactttgagtaagtctgttaactactcagtcttaatttatcctttttactatattattgtcctcattatgaggatgaaatgagacaatgtagtgaatggcctttgttaactatgaagtttacaattctgaggaatgattacttaataaggttttcatattggttcctttgtaggcaacaaataataaaggcaaagaaaaaatttattcagcagagagwtttctcattgccactggtgaaagaccacgttacttgggcatccctggtgacaaagaatactgcatcagcaggtaaaggaaaaaagcagggtggaaaagaaaaacccattgtggatattgctttcgcatttttcttcaaacccactgcgtcaatttcttgggcttcagacagatttctttgccacattgtgccctctctgggggcaggggtttgggagaaagagaaaaaggaaaaatgattttaaaggagaacattttaaatattgaaaacttcaaacattggtcatcttgctacacagagtatcactaacatactagtatagatttacatttgtattcgaaatttatttatgcatgtatgagtatgaaagtatgtaataaaaccaaatggatattcacaaacattttgtaaaataggtatgatacatatatacatttagattttgtaaaatgaggatcatgtattaccctttaacacttgcagagtggctgctaaaagaattagaggctgtcaggccatttagatttatcagaatctagaccctactcaatgctgtttgaatggttgcagtgtcagtgtagaaggacctcctgaaacaagtcaagcaaggagatgttttgctgtgtggtttatttttgcccgtcaaatggtaacactgctgacattgttcaggagctttcaattatgaagtcattaagacagagtgttggtaaatgtgtcttcttggatgctttttgctcaggagtttctgattgtgttataaattactctactccttcaggctctttttggtatatgcttttatcctttctcacatggtgggagagggagaggcaggtctctggggccttttttatgaggacagtagccccattcatgagtgctctgccctcatggcctaatcacctcccaaaagcccaacccctaatatcattgccttggggtttaggatgttaatgtgtgcattttggggatacataaacattcagacaatagcaggctcccttccaatattttttaaaaactcattctctaacatgcttttatgatctctgtgtccctagctcaactagaagacttttgtcaggttctactccttatagttggcttttatattataagatattgaaagtttttttttttttctgcatcctagtccacattcttgataataattggtgtttcagctgaggacaagcaacacaggtttttccacctcagagctgagtggtggcatgaggatggaggttagggtttgcaaatctataatttgttccaaacagttcaaaatcatttagtgtgaagatgaattggactaactgactaatatcagaagttacacagtttgctgtgtttagctatgggtagcttgagctactcccaaagcaactgagtggcaagaaagggtatctaagaattataaaaacttctcatgtattatgtgtgtagctagtagaatgtttatcatcttgaaagtatgttcttgtcaaagtaaaaatgtgtacttggatttagtaattatttatataggaactttctttttcttctttcttccttttttttttttttcccccagtgatgatcttttctccttgccttactgcccgggtaagaccctggttgttggagcatcctatgtcgctttggagtgcgctggatttcttgctggtattggtttagrcgtcactgttatggttaggtccattcttcttagaggatttgaccaggacatggccaacaaaattggtgaacacatggaagaacatggcatcaagtttataagacagttcgtaccaattaaagtaagtgggtttgcctgtaggtttcttgattctacattcacagtaaaaggcaaaaagagagttgagttggtggtagaagcatcctttcagcattataaaccatcaggaatgctgattcccctactgttgtatactggtatataaacttgtacctccctaccatctaaacacctatatagctttgttcttatttgtagattaataatctcttcctttgtcaactttctaaattttggttttcttctcttctgtttaatgctttcctttatgcattcctttgtcatctttggtctcttaatactttgtttcttcatatgtaccagagatttaaataagagttcaacactaggccccacctgcactccctggctccccacaggacatttccccttggtatatgataacataaacactacataaacactacatacttctggcatccctgaaagtgattatctcatttatttatgtgtgctaacctttttcgctcttttaatcttttgaaaggagctaatactatgccaagtcacacctgggatttgttaccattatcacaaatgttttcatatatgagtgacaaaattgaacacttagtgtgtgtctcagactaatagrtaattttctctagtgcagggaaaatggtgggactattttgttaaagttaaggaattatagttgtcttttttttttttttcatctctcagtgggttgacttgagttgtgtatgtgactatggatctcctaatgctgatagataagaatatgaactttgggatcagaatgacctgaattcagataatattctgccagtttcttgctctatgactttggaagagttacctctctgaacccgtttcttctgtaaaatgaggttgaaaatagcatctaacaattcttgtgaggattgcattagccaacacttataaagtaattagaaaagtacctggtagagagtaagtttaaagtgaatcatctcataatattgttatgaagattaaggcacaaatttcctggaagctgtcagtgcttgattactgtagctgttttttatttttacctttttttttttttttttttttttgagacggagttttgctttgtcacccaggctggagtgcagtagcccaatctcagctgactgcaacctctgcctcccaagttcaagygattctggtgcctcagcctcctgagtaactggggccacaggtgcgtgccaccacacccggctaatttttatattttcagtagagagggctttcaccatgttggccaggctggtcttgaactcctgacctcaagtggtcctcccagtgcagtgtcccaaagtgctgagattacaggcctgagccactgcgcctggcctgtagctgttttttagagtagaggtatatatgctatatttgcattagagctatgattcataaacaacagctgtatgtatatgctgtactgatagaaagtaacatcttcctatatacaattttttttttttaatttatttttttattgataattcttgggtgtttctcacagagggggatttggcagggtcatgggacaatagtggagggaaggtcagcagataaacaagtgaacaaaggtctctggttttcctaggcagaggaccctgcggccttccgcggtgtttgtgtccctgattacttgagattagggagtggtgatgactcttaacgagcatgctgccttcaagcatctgtttaacaaagcacatcttgcacygcccttaatccatttaaccctgagtggacacagcacatgtttcagagagcacagggttgggggtaaggtcacagatcaacaggatcccaaggcagaggaatttttcttagtgcagaacaaaatgaaaagtctcccatgtctacttctttctacacagacacggcaaccatccgatttctcaatcttttccccacctttcccgcctttctattccacaaagccgccattgtcatcctggcccgttctcaatgagctgttgggcacacctcccagaaggggtggtggccgggcagaggggctcctcacttcccagtaggggcggccggggcggctggccgggcggggggctgaccccccacctccctcccggacggggcggctggccgggcagaggggctcctcacttcccagtaggggcggccgggcagaggcgcccctcacctcccggacggggcggctggccgggcggggggctgacacccccacctccctcccggacggggcggctggccgggcggggggctgacacccccacctccctcccagacggggcggctggccgggcaggggggctgacccccccacctccctcccggacggggcggctggccgggcggggggctgacacccccacctccctcccggacggggcggctggccgggcagaggggctcctcacttcccagtaggggcggccgggcagaggcgcccctcacctcccggacggcgcggctggccgggcggggggggctggccatnnnnnnnnnnnnnnnnnnnngggaaaataaagggggcgccgcagagtaacggaatataacggatacgaaagggcgggaggggaaaaatcaaagccaagggccggcgccagcgaatcggtagggatagcaaagaacagaaagtattttgtcccccgacgcgtttggggcacataatcataaatctccgcacacggcgtgcgatagaaaaacaaaggatcacccggatgcgcccgcgcgaataacataaataacgggggacacagagctgtcacttcctctaggcgcaatgttctcaacagctgattcataggagtagcacttgatatcgcttcacatgcaggcgaaagaagaaaatgtcaaccattctcactggcagtatattaactgcccctgtctcgctgatagagccttcagttgctaatatcagtcagtcgaacctcgaaggtttccttcctaccaagcaaatccatttttcccatatgtactttgctcttttttcaatgttacatttgttcgaatggcattgctagaataatgtggaaaataattttcccaccaataaacctgtcagtagttgaggtcataagtagggtgacagtgttttcggttcttttcatagataaatatagtaatagaaaagatggatatctgtcactgctcttttgtcatgagtaatataaggtaaaagcttgtagaacttcactatcaatccccccacctccctcccggacggggacctatatacaattttttaacatttggggagttgtggacccttttgaaaacctggtggactattcctagtaaaatagggttaccagagtatctgattcccacagctgggtattaaactcttgctgtattataaagtgaccgaatggaaggaaccttctgtggagagtggggagagggtacattttggacagagaatgtagtatgtgtacaaaggctctgtggggagaaatattgttctagataccaaaaaggcctgattgaagtacaaaagtgaataagggtggaggtgggatgaggcccttatcatttccaaacaaatcttaagcaatggaccaattaagctcttttccaaggattagaacattttgattaaaattaaacaagaaagacttctccagtatgttcagagaggctcatttaactatataagaaggaaagggaattcaggaaggaaatttttattatttattgatgtcaaataaaataaccctggatagtttcccaggtgggtttcgttttttttttttttttgagatggagtcttgctctgtcacctaggttggagtgcagtggcgtgatcttggctcactgcaagctccgcctcccgggttcacgccattcttctgcctcagcctcccaagtagctgggactacaggcgcccgccaccacgcccggctaatttttgtatttttagtagagacggggtttcactatgttggtcaggctggtctcgatctcctgacctcatgatcctcccgccttggcctcccaaagtgctgggattacaggcgtgagccaccgcacccgaccccaggtgggtttctaagtcattatacctagtctgtaggttgttgttgacatctatttgtagtaggttggtatatttattctcctctgccatcactcaagtatcagggcttgctcatttctttctgcatccttaacaactgaaaacaccccctggttctgataaacacccacatctccttgcccactccgatttttaagactttgtaactgttacccatatcactatggacctgctgtaatgtaatctatcctttgttgtcaatgaaagctgagcatctgtagtcaaaagagaatctctgaatttgggcaacagttgccctccatgggattaatgattctgggtgaatcacaagatagaaacctgggaaaagcagtaagtcattggtttgattttagggatggtagtgtgctttctgtagcttgcttttcccccccatttttctctgaattttattgtttgagaactctttcaaagaaagcccctctagcagacaacattgagcagcgaaaaagaaggaaataatcatttatmatcctaataatgttaagtgagggagatgggacataaaagacttttcaagcacgattttatattttaactttgggttaaccagatggaaggggaaggtagagaatccaacttgataaatgtctttatttcacagtaaaactttatcactcttacaggttgaacaaattgaagcagggacaccaggccgactcagagtagtagctcagtccaccaatagtgaggaaatcattgaaggagaatataatacggtaaggaatgggcccaggttaatactttatcagaaagcaaataacatgcttattgggtatcttataggaacttaaaatggctcttagtgatttccaaatgtactggttctatgccaattcttagacatctcaataacttatgatattaaaatttgttttggtggccaggtgtgttagctcacgcctgtaatcccagcactttgggaggccaaggcgggcagatcacgaggtcaagggatcgggaccatcctggccaacgtggtgaaaccccgactctactaaaaatacaaaaattagccgggcgtggtggcgtgcgcctgtagtcccagctattcgggacgttgaggcaggagaatcgcttgaacccaggagacctaggttgcagtgagccgagattgtgccactgcactccagcctgggtgacagagcgagactccatctcaaaaaaaaaaaaaaaaagttgttttggtaaacggatggcttcagattttttccactgtaacttaaagtattattagtcaaatggctatacaaaggcaacagaatttttaaatgagccagaatttctgtcccgtgttctttcctttcatctccccacgcaaccacttaaaaaataatttagttacagactatgatgtcattgtctttaaacttggataggtttattaaggcattatgaattctctttttcctaatcagaagtggaaaataatttctactatatcatatatgttcaaaggatttttttctgaagattttaatttatttaaactcttgcattactttcttactgaaatatttatttccaagtttgaaaaatgaaatcagattagcttaataagcagagaaaaatatgattaggtaataaatgcaaagcctttttgttattagtcactaatatattaataatttttcaggtgatgctggcaataggaagagatgcttgcacaagaaaaattggcttagaaaccgtaggggtgaagataaatgaaaagtaagaaaaaaatctttattatgtcatatttgtgggattttttttttttttttttttttgagatggagtttctctcttgtctcccaggctggagtacaatggcacgatctcggctcactgcaacctccgtcccctgggatcaagccattctcctgcctcagcctcccatgtagctgggattacaggcatgcaccaccacacctggctaatttttgtatttttagtagagatggggtttcgccatgttggtcaggctggtgtcgaactcctgacctcaggtgatccacctgccttggcctcccaaagtgctgggattacatgtgtgagccactgtgcctggcccattatgtcatatttaatactatttcagttatttacagcattggtcaattatagaattttagttttttgttggtatgtttgtttttttgagacagagtctcgctctgtcacccaggctggagtgcagtagtgcaatctcatgtcactgccacctctgcttcctgggttcaagtgattcttgtgcctcagcctccctggtagctggattacaggcgcctgccatcacacctataatcatgctggccaggctggtctccatcttttggcctctagtgatctacccacatcagcctcccaaagtgttgggattacaggtgtgagccactgtgcctggccgaattttagattttttaaacctaatttttaccatagttgagctcttcaactatgaagaaatgaaacttttcttccagtgccattcacattagtgtttcctgtttgttttcttttatccattttgaggggagttataatttagaatcctcactcttaaccactgtgttggagttcttccattctcagatttcttagagttttcttatttctttgattttcagaaccgtggacagaattgtcattatctgataagatttttgttcctttgagctgttttgttttatttttaacacattagaacattgccctcagctagagtcacaattttgggcttccctgaaaaaacggaagattttgttctccttaattaataatggtaattaatgatgatttttaactgaataaaattgcaggactggaaaaatacctgtcacagatgaagaacagaccaatgtgccttacatctatgccattggcgatatattggaggataaggtggagctcaccccagttgcaatccaggcaggaagattgctggctcagaggctctatgcaggttccactgtcaaggtgagtgttgtgcttgttgcccattagatactgttgtcagtaatactcccagttccttatttagggggcagttgggaagtttcgcagatcttgaataatttagttattttggtgatggcatcctagatgtcctttattagttgtattccagacaagatattattaaggctgctgtacattgtgactttattatgaagatcgacactccgccgggcacagtggctcatgcctgtaatcccaatactttgggaggctgaggcaggcagatcaccaggtcaggagttcaagaccagcctggccaacatggcgaaaccccatctctactaaaaatacaaaaattagctgggcatggtggcgcatgcctgtaatcccagctactcaggaggctgaggcaggagaattgcttgaacggggaactgggaggcagaggttgcmgtgagccaagattgtgccactctactcctgccatggctacagagcgagactccatctaaaaaaaaaaattraaaaaaaaaaaaagaaaattgacatcttggattcacattatgaataaaaagagcttgattaatcaagttttcagcactgttgttgaatagtgtactttatatccatatactctaaacagttgtattttatgtcaatttcatcattaccagtataaataaaatgttctgagtctttttatggcacttatctaggctataaaaggacttgaggatttaggtaatggtgtcagtgtacaaagtagcttaaaccactattcaggccttattacccagtccttagaaaatatctgtcttagaggccaggtgcgttggctcatgcctgtaatcccagcactttgggaggctgatgcaggcagatcacgaggtcaggagattgagaccattctggctaacatggtgaaaccctgtgtctactaaaaatacaaaaaattagccggccgtggtggtggcgggcgcctgtagtcccacctactctggaggctgaggcaggagaatggcctgaacccgggaggcggagcttgccgtgagccgagattgcaccactgcactccagcctgggtgacagagtgagactctgcctcaaaaaaaaaaaaaaaaaaaaggaaaatatctgttttaggatgttgaatatgttaaatgttatattgaattttaaaatgattttttaaaagtcagtataggatgttaaaactcttcagtatgtttcatgggactagatggccagaaaagaataaagacagctgttttttaaaaaggtttccagaaacattagttgtaaagaattttggcattacccattttccttacattggtttcagttggttacagtaatgggaatctcaaaaagtgatgctagcaaaatttgtgacctggggttatttgggatgtagcataataaaatctcatattttgaattaatggattgagggttaaaaaagattttgaatgccagattgactgattattgagggaatagcagttggttcgtattactatttagaataaatttaacaagactacctctttgaattacatcttgtatgcattgttgcagttgttgagtatctggtacctcaatatagcttgagattggatgcacttaatttattcttaaattcatgtctcagtggtttccttaaaaaaaaaaggctaaaacattgaatggagttgtactttaaagtaaggggtacagctgggcacagtggctcacacctgtaacccagcacattgggaggctgaggcaggaggatcacttgcccaggaattcgaaaccagcctgggcaacatggtgaaaccctatctctacaaaatatacaaaaaatgagatcggtgaggtggtgcgtgcctctagtcccagctacacagagcgctgaggtggaagaatcacccgaacttgggaggtgaaggctgcagtgagctgtgatcacacactgcagtccagcctgggcatcagagtaagaccctgtctccaaaaaaaaaaataaataaataaaataaattcatggatctttttgtttctgttggacatactcttctctgtctcagccgtaatctaggaagacctctacagacctcaagaactctctttatgcgtgcaattccatcctttctggttttctgccttgcaacttgaaaccaccttggcttccaggaaagaccctgggctctgtttgagctctccctctctgcactgaggcttagaaactgtctctgagcagtaagctggagcagtcacaggactcatctcatttgtttcccttcccgcagggatcacaggcttgcactgcctcttggtcgatgtcttaaaatgtgttgcttcatccctgtctggtttcctagttgtttaaagcaggagggtaaatgtggtccctgatacaccactgtggtataagtggttgtctgcctttacttttaaattagaattccaaggttctatgtatttttttttagagaaaatggattatatttattgtttctagaggggagcatattttaaagattttatctccctgttttagagagtgagaattgtacttctcttattttaaatgcagaatgttactttggatcgcctctgtgtataagtataactgctaggcttttaccagatggcattataaacccttggcatttacataatatattttttcacaattcacagcatattaaaagttctgagaaatctgatagaggaactcatttatttgcttaatccagttctttacaagttcatttgactatggaatccccttgtcatctatacctgttaacatcatacagtatgctttgaaaaatagtcctaagagttaacctttttttccccatggtcttctttaccattttaatggctgcatagtgcagttttacattaagggtgtgaactatagaaccatttcctaattgggatttttttttacttttttttgagacgaagactcactcttgtcccccaggctggagtgcaatggcgtgatcttggctcactgcaacctctgcctcccgggttcaagcgattctcctgcctcagcctcccgagtagctgagattacaggcgcctgccaccacgcccagctaatttttgtattttttagtagagatggggtttcaccatgttagccaggctggtctcgaactcctgacctcaggtgatccactagcctcagcctcccaaagtgctcggattacaggtgtgagccactgcgcccggccctaattgggatttttaagccattccaacattgccactattgagtactacagcaatgttcagttaatacatgtagccttttctgtatatcaaactattactatgttagtattgtatattatagtaaaatatagtaatatatcgtactatatatctatatgttaaattataatatctataatcttattatagatttctaaaggtgggattattgggccaaaaggataaaatgttttatggctgttaatattacctaattgatgttttaaagaaatcttttaattttttatcactgataatccaaaactatcagatttgggtacaccagtattatttttggctgctttattaaggggaaaaaagtgtgtcattgttgataacatcagttggttgatggatggagaagctgcatgaatctttttctcatagtcttaccagacttcacacttctatccactaaacttttcaaataagttaatggttctcaatgtagtagattaattaattaatatctcggattgagacttcacatactttggtagaaatttattactcttatatcctttgtcaattttgacttttttgaatacctttttttttaagttataactttgcctattataactccttacctccatttttaaacagtgtgactatgaaaatgttccaaccactgtatttactcctttggaatatggtgcttgyggcctttctgaggagaaagctgtggagaagtttggggaagaaaatattgaggtaagttcttttcctcttttctcctatgttatatcactacttttttttcttcagaatttaaaatatatagaagacttaaaaaatagtacaaagcattttcatatacccgttatccagattcatatattactaacattgtgccaatttattttatacayttttagtagtctctcattckgtgtgtgtgtgtgtgtgtttctgtgaatcatttgagagtaagttgaattctcctttacccctaaatactttattgtgtatttctatgaacgagggcattttcttatatagccgtagtgtagttaccactttcaggaaatttggtattggtgtaatatttttatctgatttaattttcattttctaattctgtcagttgacccaatcgtatttccttttactttttaaaatcacatttattgatttctctgggttaattataggaaaatgaaaagaaaaaataaaaatttttcactgctcctaccattagtactacttgtttctagcattactctctaatttgtactaacttttctgctcacattttatcatggagtcaaagaaaatgcacatgaaatacactgtttctgtatacacaaataatgccacccaaaaggactgctgttttaaatcattttagggaaaatttccaataaaaccttttgaaagaccaaatttgtgaataagtcaatttttaaaaataaaaagcctattttaaatctcttaataatctttttctttattacatgcactggtagtagcatgtaatatgttggtctattagtaacacattattaacctttttttctgattataagaatagtatatctggctggcatggtggctcatgcctgtaatctcagcactttgggaggccgaggtgggtggatcacctgaggccaggagtttgagaccagcctgaccaacgtggagaaaccccatctctactaaaaatacgaaattagccaggagtggtggtgcatgcctgtaatcccagctacttgggaagctgaggcaggagaatcgcttgaacccgggaggcggaggttgcagtgagccaagattgcgccattgcactccagcctgggcaacaagagagaaactccgtctcaaaaaaaaaaaaaaaaaaaaagaatagtatatctttattataggaagtttcaaaattaggaaaatatcaaaaaggaaattttaattcatgaagagataactgctattaatatttttgtgtatttccttccagtttctttttctctaaatattttgatgcgtttttatattttatgtatatatatatgtgtgtgtgattttgtgtgagtatgtatgtcttaatgtttttcaaagtttgatgaagttacagttttaggtccaagcttaatattaatgttatgtcatgaacatttcctgtctttaattctctaaaatctccatttaaaaaaaatgtgtaattcttcttttaaggggtgctatactgtaatttgttaagccattctttgattaggttgtttacagtttttcattattataaatagaattgacatcttcataattcattgtttctcagtttattttttgaagatagatttcctgtgtgagtgtgtatatacatgacatacatatataattaaaatttgaaatttttaatatatatttcatatttcttgatagacaatatttaagttttttaaaatttgctttgttattatagaagtataacgtgtttgagttgaagaaactttgaaaaatgtaagggaaagaggaaacaattacttatggagttagagctgtaacagcaattgttagcaatttggggtgattcctttaatttttttcctatataattgtgatactatgatactgtacattaaattttgtaacccatgtttatttttaaaattatattatttatcacaacatcgaagaacacttgttatgtcttcataatcagtttgctcgtaaaaggtagcgaatcatgttttgaactgaggctagcagctggaggaaaaaaaaaatccatttagtcaaccagcaattaaattagtaaggatgctgtcgttccacccttccttcctcctttccttccctatctccttccttctttccttccctatctccttccttcattgcttttagtgaataatgccaaaggaggaaatgtcttttggaagcatttagcaagagaactagataattaccttaattgatcctggcaccttatttgtttcttgcccaagttgtcattcacagtggataacaagatagtattgagtttgggtgtgtgtgtgttttcaatgtatgacagcaggtaattaaatggcttatttctctcattcccttgctcttttttgttattagttagggtgtactattttgaggtagagatatacataattaagggatgagcttatagcaaaagtgcctgacagcaaggagttgaaagtcatttaccttttgaccagattcctatttattccatgaattttattatttaatgaaagtctacttattaaagagtctctactgtctttcaccatatatgtttgacagacttaatgtttaaaataatgggtctaaattttgcttttgtatcttcttaggtttaccatagttacttttggccattggaatggacgattccgtcaagagataacaacaaatgttatgcaaaaataatctgtaatactaaagacaatgtaagtttaattctcaatcctttccagtaattttatttagttgttgttttttgttgttgttttttttttagatggagtcttgctctgttgcccaggctggagtgcagtggcgctatctctgctcactgcaacctccgcctcccgggttcaagtgattctcctgcctcagcctcccaactaactgggattacagacttgcgccaccacactggctaatttttgtagacrggggtttcaccatgttggccaggctggtcttgaacacctgacctcgtaatctgcctgtctcggcctcccaaggtgctggaatgtacaggcgtgagccaccatacccggctttagtttttaatatatagcttagttggtcacatggtgcagatggcattccttcagtatttcgcgtgccagttgtctcagctratagatatcagcagctggcaaggaccttggctgcactgcctgctgccccctcatcttcactggcacagggccctacacttagtcaacaggcagccaaaacttactgagtgaaggaaccaaaggcacaacttgagaactgtctatgtttgtgtttatagaagaggaacaataaagtcatcgactatctaaatataatgaataacaaaaaagaacaggagcaatgcacgtttgatcctcagcagctggcactactaagaaagagctcttaattgagttctaagatttcattgcctgatgctacatgtaatgctagtctggtgttattacgtgtaaatctaatgtattttaagtgctttttagtagtcctcccacagatatactttattcataccataaacccccaactgtccaggtgaataagagtacaatatgcaatatattacagtcctttttttttttttttttgagacggagtcttgctctgttgcccaggctggagtgcagtggcgtgatcttggttcactgcaaccttcgcctcccaggttcaagtgattttcctgcctcagcctcccaagtagctgggattacaggcacccaccaccatgcccagctattctgtatttttagtagagacggggtttcaccatgttggccaggctggtctcgaactcctgacctcaggtgatccgtctgccttggtctcccaaagtgctgggattacaggtgtgagccactgcgcccggcctattacagtacttttttagcagaaacctgtgaaagcctgtgagcaaactctatacctcacagggtttttttccatatatatgaaatgagggattggataattcatattttttaaagttttttgactgtgggacactggtatattcatatacacacactctctttaatattgactcttaagaaaactgatctttttaacttagctaacactttttaaagaaacgacctcagtaaaaatataaatgatgttaaagaatctgtatgttaaaagcctagtaaactgataatgttttaatcttgaaatttgaatataattaagccatgtatcctatttggaaactactgctttaggcagtaggacagttacaggttggttttttggtaaaaccaagggttttagaaaacattttcttgaatcctctgcaaaaaagattcaaatgaatatactaggataacccataatgagctacacagctaacataaataacaattgtatatatagttgtctttttctttttaggcaaattttctcaaaagtttatttatatgagtatacattagatatcacttttactgcagacaaaaggagaaaatgtcagccattctcactggcagtatattaactgcccctgtctcactgagagagacttcaattgctcatagcagtcagtgaaaccttgaaggtttccttcctaccaagcaaatccattttaaccatatgtattttgctcttttttcaatgttacatttgttcaaatggcattgctagaataatgtggaaaataattttcctaccaataaacctgtcagtagttgaggtcataagtagggtgacagtgttttcggttattttcatagataaagatagtaatagagaagatgaatatctgttactgctcttttgtcatgagtaatctgaggtaaaagcttgtagaacttcactatccctggggcgtgctttattcattttgaatcagtcacttgacttcagtgtctaaatgtccttgattctaaattgtacttacaatgtttattatctgctggcttttgttctctgctattttatttttttttacataaaatatttrtaataaagatgaagaaggtactcaccatccaaagtcaaggaatgttaacatttttgctgtatttgtttcagggcttttttcttataagagataaaccatcatatatgcagtttataacagcttatatttattgagcacttactgtgtaccaggcactatagagctctacaggtattaacttatttaatccttacacagtcctgtgaggtatatatgctattgtttccccctttttatagatgaggaaactgaagcacatggaagttaagtaactgtgctcaaatcatttacctagggaagggcagatctgtacatttattctcacacaatgtagataccatgctattaactattatcttatgcctatgcagtcttctgtcttccttcacttcaaaaggtaaaactttgaagtcgaagggtctcatgcttacgttcttatgtttgccacctatttatgaatgcatacacattatacagtgttcgtggtttaattgcaggtggcatcctcattatgtagagctctgcaactttttaataatctcttgttttttgagaccctttccacattattacatggaaatctattttaagtgctttttartagttcctcctatggatacgctttattcataccataaacccggaatcgtcagggcgaatatgtgtaagagtaccatatgcaatatattacagtccttttgtcaacagaacaacctcctgattgtttccagggagtgatggaaccttagacaagctctgcaccccacagcctgagttgcctcatctgttatgacgagattgcactagatagtctagtcagagtctgcgctgaaaatctatcagctcaacagtagagtgcatcagatttctctgcttttggcagaggtagccagagtttgagatttcaaatttatccaaaataatttctacacaggtattttagagtgccagacatttttcttttgctttcaaaaatgttttcagactttgctgggcacagtggctcacgcctgtaatcccagcactttgggaggccgaggtgggtgaactgcttaagctcacaagttcgggaccagcctagacaacatggcaaaaccccatgtctattaaaaacaaaacaaaacaaaaatgttttcagactttaatggtcttgcactatttatcctcaaaaccttatttaaaattacttttaaaattttatttgtattttattttttagagacagggtcttactttatcacccaggatagagtgcagtggtgtgatcatagctcactgcagcctcgacctcctgggctcaagcattcctcccacctcagcctcccaagtagctgggactacagatgtgagccactgtgcccagctaatttttttttttttttttttttcctgtagggacagagtctccctatgttgccaggctggtcttgaatgcctggcctcaggtgattctcctgcctcagcctcccaaagtgctgggattacaggcttgagctatgatgcccagtcaaaattttaatttgaatgactactcttaagggtcccagctattacagatagcctctgtggagctgagatgatcaaatacaggacgtgaggacaccctgccctttgataatattttccagaacattttggtgattaaagacttgtaggcatctttgccttttgtattttttctcataaaattgagtaaacacttgtagctgtcccttgtctctttgttcctgtttgaagtgaacatcatactctatgttttggttcatgttggggagtctttagcctaagtagctgttagcagcagtcattaaagtctctggccatttttccaggtgcggtggctcacacctgtaatcccagcactttgggaggccgaggtgcgtggatcacctgagatcaggcattcgagaccagcctggccaacatggcgaaaccccgtctctactaaaaatacaaaaaaattagccgggcatggtagcgcctgcctgtagtcccagctactcgggaggctgaggcaagagaatcgcttgaatccaggaggcggaggttgcggtgagtggagatcgcgccattgcactccagcctgggcaagaagagcaatactccatctcaaaaaaaaaaaaaagtctctggtcattttctttttttgagatggggtctcgcttgaagaactactgcagtgtgacctcgaatcatcnnnnnnnnnnnnnnnnnnnnatggagtctcgctctgtcgtctaggctggagtgcagtggcacgatctcggctcactgcaagctctgcctcctgggttcacgccattctcctgcctcagcctctcaagtagctggaactacaggcacccgccaccacgcccggctaattttttgtatttttagtagagacggggtttcaccgtgttaaccaggatggtctcgacctcctgacctcgtgatccacctgcctcggcctcccaaagtgctgggattacaggcgtgagccactgcgcccggccagtctctggtcatttttgagttggatttttaagaaacagactggagaaatgctctaagctgtgtaggaagaggaggggagaaaaatcagcttaattgcattattgtatttttttttgccttaggaacgtgttgtgggctttcacgtactgggtccaaatgctggagaagttacacaaggctttgcagctgcgctcaaatgtggactgaccaaaaagcagctggacagcacaattggaatccaccctgtctgtgcagaggtgggtcatctacacttatacagtttaaaatgtttaaaatgtgccacatagaagcacaccacccagcttatacatggcagatgtaggaccctgagtttgatgatgattcctcaraagagggctttgtctctaaaaattagtttttgtctttcaatactgattgctcatggtatgaactggaggcttccgtcatgtcgttaagtggtaaaaattatgagagtgatttatagagctgtgccttaaatattttatttatcatatcttctaaattattttcatggcaatcagttaatgatggaagagcttcaatcttagttattccacagctatcttgaggctaattgatactgtctgcctcttcagcttatggtatcagtgaatgagatttgaaaatgatgctttcaaaagatcaaatgacagtagaactagaaattgaccaatctaggcctctgggtgtcagtgtttcttcgctaccagtgatcatccaagagttgaatattgtaatacttaactgcataggaatggtaagccaaaaatgtgtttatattggagaacttgggaaggtgtgggaggaggcacgtcatactataccagcttatatatggagttgaaaattgcagtgattatctgttgtagccagtggcttccaaggtgtacattgcacttgcaaacacgcacacacacacatatgcacattgttgccagatttcatccagcagctccatgactggttgttctgtctgttcatggttgcttttgtacaactgaactcattgctgagtatgtggaatgtcagctttaagacctggaaaaacattttagctttcttttgctttgtcttctctgtgatcgagaatcctcctctattaataggcacctggctgggatataagcctaaaatattaacatgttgagagattagggcatcatttatttctttcatttatagaaagctgctgtttttgtgacggaaatagaattaagcttcaaaaaaatataaaaactgaagtcttgattaatgcctttaatgtgcaatagatcttttattcagtgtaatgactcaaactgcctgtgttgggaaggagccaattaactttgctttcttgagtacattagtttcccagggctattgtaacaaagtaccacaaactgggtggcttaaaaatagcagatatttcctccctctcagttctggaggcaaaaaagtccaaactcaagatgtcagcagggccaagctccctccaaaggcactagggaagaatcctcccttgcctcttcttctgtcttctagtagcaatggcaatccttggcgttccttggcttgcagatgtatcactttaatctctgcccccctcttcacatggcctcatcccttgtgtgtctgtgtccaaatttccctcctctttcttataaagaaactccagtcattggattagggcccactctaatccaacatgatctcattttcacttgattacatctgcaaataccctatttccaaattcacaaatactgggggttacgacttgatcatgccttttagggttatggggacacaattcaacccacaatagtgagtatatttaaaaatgtagatgccatttcaagatactcacaagcttcaatarccatttttgatagggacgaaggaaaagacgattttattgtcttttgtatatgagtgtctaattttttgtctgaattcagctctcagtgggcttgttgaaagactgctgtgtgctggcctctgaccccctcaggaggctattgtgctgtgatccagcagcagcgtacatggcagcatctggcagggtgactgccagctgagcagaaggatgcagtgaggacacaggacgtctcctgaagcccatggctgtggggaggtcagccaaaggcctgttctccttggtatgcctggcacatttgaggctgtgcatctccatctgttggtcctcttatgatgttgaagctcagaggctgaatgttctggtgctttgataggactctgatactttgttttccccaagctgttggctgattaagaagataaaaaaaattgggtgaaatcgcactctgtgaacacacttctcaagctgtgtacacagtgccgtgctggacactggggacacagcagggatttgagataagcttaggaggagaggaggcagctaggtgatgtgccagttaacaattctgcctgacgggtcctaggatcagggtagatataaagtgctggaggcactggggtgccacatttgtggtctttgcctcagggattcttgtgatctgtttttttactcacagagcacttctgaccccagatttgtgggggttttgctcacacgaccaattctccagctttctagacaccagctgggtgtctagaaacaaccaattgtctagaacaaccaattctccagctttctagacaccagctgggtgacctctaatgtaactcaattctgataccagctgcctggagttagcatcagatcctgcaagggctcattcccataagactgcctccactgcagaggccagtgtcaagcccaggcctcctgtacttctgacctaccagctataaagtcaaggggttcccatgataaattgctagcatggctcacagaactcaggaataaactttacttatatttacttgtttattataaaggttgcaactcaggaacagccaaatggaagagatacacagggcaaggtggttgtggggaggcgggggacaacagagcttccatgtcctctctaggtgtggcatcttcccagcaccttgatattcaccaacctggaagttctccaaaccccttatttaggggtgtttatagaggtcccattatgtaggcatgattgattaatcattgrccattggtaattacccaatctcctgctccctccccagatgtaggggaccagaactggggctaaaaattctacctctgatgacatggttggttcctctggcaaccagctgccatcttgaagctatctagggccccaccaagagtcacatcattagcataagctcaggtgtggttgaaaggggctcattatgaatagcaaaagatgctcatctcactagtgtcactcgggaaattccaagggttttagaagctcccttgccaggaaccagggacaggatggaagaccaaatacatatttcttctcatttcacaatatcgtaggatgttggggcaggatgattctggagggagttcttacctaagactagaacaatgtgtgagtgttagctagtgagagaacactgtacaaaaggcctgggtgggaaagcggatggctcattcaaggaactgaagaagaccctcaataytggcatagcttaaagagcttagagagttaaaaatatatatttattttttatttttttgtatatatatgctggagaaacaggtgggtaagtgatggtcttgtaaactaaggaagggtattttgactgcctttggggcattgtgattcagccaaaaggtctaaagcagggagtaatatgatcaggtacattgttcagaaacattcctccagctgcaccgtggaagcgggactgagcgagcaagtgaagtggcagatccagttatgtggctggtgaggtgcatgagaggagatgatagtggccggargtgtggcagtggaaatggagtgacacggttatatttgagggcagagttgatagtacttggcagctggctgggaatgggaagagggagagctgaagaccactcaggtttgtgtcctgcagcaggaagtaatagcaagagcagactcgaggtgacagcgaggacgaaaccactgatgtgtgtgagggcctgctgtgtgctgggtactgtgtccctgcctgttgactaacttagtcgttgtgagcaccccatgcggtggatgcggtagtatatctatttgacagacgaggaaaccaaggacaaagaggttgagtaacttgcccatggtaacccagcctggtcatggccgagctgggattcaaacccaggcagcccagaccccaaagcaccacattgtgcagctgatacttcatctccacagactgtcctaccatatttggcatagaatttaaaaatggaaatgattcttggtagcaacacgaatgtagtggagacacacagacctgggttgtaatctcactcagccaattcctctcagtgagacctggccataccacccaggttttcagaagcttagtttccacattaaataaagtaagaggccaggcgtggtggctcactcctataatcccagcactttgggagcctgaggcgagtggatcacttgaagcccggagtttgagaccagcctggccacatagcaaaaccccatctctaccaaaaataacaaaaaattaactgtgcattgtggcatatgcctgtaatcccagctatgttggagaccgaggcacaagaatcacttgaacccaggaggcagaggttgtactgagccaagatcacgccactgcactccagcctgggcgacagtgagaccctgtctcaaaaaaaaaaataaaacaaaatggcctggctcagtggctcacgcctgtaatcccagcactttaggaggccaaggtgggcagatcatctgaggtcaggagttcaagaccagcctggccaacatggcaaaaccttgtctctactaaaaatacgaaaatggcctgatgtggtggtgcatacctgtagtcccagctactcaggaggctgaggcatgagaattgcttgaatctgggaggtggaggtttcagtgagccgagatcacgacactgcactccagcctggagcgagactctatctcaaataaaaaaaaaagtaaaataaaataagggaatatctaactgtagggttgattaaaatgcaacctgtaaagtgtgtaggagagttcctggcatttaatagatgccgaatagctgcacctgttagctgttttttccccaggatattatagatgtggctgtggcttgggaggggagacgatgtggctggactgaaaggtcatcatgccagtatttttaatgggggttggagagagatacatattgtgaaaaagctccagtgattttttttttttttaaaccctggttgtgaactacttgcgttgatactggattttgaaaaaccaaaggctttaaactcctggttatggacattttaaaaaattatttttaattgacacaataattgtacatatttatggggtgcatagtgatgttttgaaacacagagtttatagtgatcagattagggtaattagcctatcaatcatctcaaacattgaccatttctttgtgttgagaacattccatatccttctagctatttgaaagtatgcattattgtttaactgtagttatcctaaggtgctatagaacatattcctcctatctagctgtagttttatatcctttaacaaatctctccctatctccttctcccaacccttaccagcctctagtaatctctgttctactttttacttctgtgagtaagctagcacagccactgtggtcaacagtatggaggttcctcaaaaatctgcaaatagagctaccatatgatccagcaatcccactacttaactgggcatttatcccaaggaagtcttttaggggttcataggaggaactcttttctctgccaaatgctgggttctgacttggatagtatttggatttgctactggacccactgtttttatcgtccagacatattctgtggggaatgtgatattctgtggggaatgcggttcagaagtggtccacagaatgtttgttattagtccataatgatagaaggctagaaacgaagaagaaagtttagaaattttaacaataatttgacagtgactgatctagtaataaacaatggtgttttaattttacatgccttttaaaatttcatttccccagtacattgtcagtgaatttcacaagtgttagtccagtggatgaattagaaataataataatttttaaaccagtcctgagtactactttaaactgagtgctcaaaaatagctgcagctccagagccagctgtggtaggctggcacagtgactcactttggtaaaaatcctgggcaattgagagcagtctttgactctgaggagtaattacttacaaaagttgacaaattccttagcaaagtaatttccaaagggaattactagaattctagaattgctgtaagaggagaggctactcttgtttgtcctgtgtgagagggattctcagcgcctggggcattagcaatgcatttgccgtattcagtgtgagatggggttggtggtcatttattctgaacacctgagccgcagtcattgagtaggaaacggattacacatagttatgaagttcacttgtagaggagaaaaacaatagttcaagaggaaagcatttgaaaatacttccttgtaatgtcttaaatgaattttagtgccaaatattaaaagtttttgtgttttttgtttgtttttaatttaatagtcaatataatcccactctaaagtgagggagccttctgcggctggaagtggtggggacagataagagtatgtgaggtggaaagcctccagcagctcctgacccttgtacgagtcctgtgtgttgggatggaagggcatggaggctgccccttctgctcattttttaaaaatacatgtttttataaaaattctaaaacagttgtgtacgaatgaaatctgtcaattgacccaagcagtttttttcatttatttgagatagggttcctgtcacccaggctggagtgcagtggtgtgatctcagttcactgcagccttgacctttcaagctcaagcgatgttcctgcctcagtctcctgagtagctgggaccacaggtacatgccactgtttccagctaatatatatatatatatttgagacagggtcgcattatgttgcccaggctggtctcaaactcctgggctcaagcaatcctcccgccttggcttcccaaagtgctgggattgcaggcgtgagccacggtgcctggccagttttttatttagactgatcaacgatggcagtttggcttcctccatctttttaacataagaacaacatcaatatgagaaaaaacagataagagctcattttggtggatttagttttgtatccacatctcctacaagttctatttctaaatcagtttctgagaaatagaacccaggcttgcaaattgataagcctggaatttgtttaaatgtattctttggctctttatttttttcctcattataaaaatggaaaagaaagcatgtttgaattgcccttaatacccctttctaacacagttatttttattatcatgtattgtttccccgtcctcatctgtactcctacattttttttaaacaaaggaattttattgcctttccaaaaaagttgtactagtttataatgtcaccagcattgcatataagagtgctaattaaaatgttgcaaaattcagtgtcaatgttttttctataatgagtataaaaaggataactattggccaggcacagtggctcatgcctgtaatctaagcactttgggaggccgaggcaggtgggtcacctgaggtcaggagtttgagacaagcctggtcaacgtggtgaaaccctgtctctactaaaaatccaaaaattatccgagcatggtggcaggtgcctgtaatcccacctactcgggaggctgaggcaggagaatcgcttgaacctaggaggcagaggttgcagtgagccaagattgtgccgctgcactccagcctgggtgacagagtgagactgtctcaaaaataaaaataataataaaataacgatttcaaggattttagcatatctttgctaacaatgatgagcctctttcttcttataatgatttttttttttggatatgaattatccatattttctaatgcatttgtattttaaaactttttaagatactggccattagtatttggtctggatttttttsagaagtaaaggctttgtcaccctctgaggctaaaacagactaaagacttttctcagtattgttcctcccttacacaaaactgttttcccccttattcacaagtatttttgtttttacgtacaggcaatcttgagcagtagcaagtaaagattgtctaaaactgtcaagtccacaaccatcaaatgtttgcaaggatatgaaacaaggagaacttgttagtcactgcaaatgagagtataggttggttcaggtaccttgaaaatctagtcaagccaaagtttcacctgccctctgactcagcagttgtactccagctctgtgtgcaaggagatgtgctggaatgtcacagcatcgtattgcaaagagcatattggcaacagcttggatggccagcagaaggagcccaaatgtgtgattcatattcactagtcgaataattgaatactacaatatacaccatatatactagactgtatgtgttgttctatactatagtgattgactcgaactccattcagtgaaaaaaatggaagaattagctatttgtatccatatgggatacaaaaaagcagggtaacaaaagaatctacatcatcttgccatttgcaggtaaagcttcttaaaaaaacaagagaaatgcaggaagaaatgcctaggaatgataagaccaactcggtggagggaaaggaggaaaaggccaatggggtggcacacacagggctaactgggcactttatacccttctttatatccaaaatattttatggtgaatttcttttagagggttgacaagcacctgtgggtacctgatctgttttaatcatcctcatgctaacaaaattcttcagtagatataacctaaattttttttctctttcatcttggttttaaaatgtcttccyccttttattctctggagaaatagaagatatccttgatcatactacttctctgttttattcattttggtagtcgcctaagatggttttaatgcatatggcattatctgaactgttccctgttacctcatttgctcaggcatctgaagatgttgtgctttctcttcccctgcaggtattcacaacattgtctgtgaccaagcgctctggggcaagcatcctccaggctggctgctgaggttaagccccagtgtggatgctgttgccaagactgcaaaccactggctcgtttccgtgcccaaatccaaggcgaagttttctagagggttcttgggctcttggcacctgcgtgtcytgtgcttacyaccgcccaaggyccccttggatctcttggataggagttggtgaatagaaggcaggcagcatcacactggggycactgacagacttgaagctgacatttggcagggcatcgaagggatgcatccatgaagtcaccagtctcaagcccatgtggtaggcggtgatggaacaactgtcaaatcagttttagcatgacctttccttgtggattttcttattctcgttgtcaagttttctagggttgaatttttttcttttttctccatggtgttaatgatattagagatgaaaaacgttagcagttgatttttgtccaaaagcaagtcatggctagagtatccatgcaaggtgtcttgttgcatggaagggatagtttggctcccttggaggctatgtaggcttgtcccgggaaagagaactgtcctgcagctgaaatggactgttctttactgacctgctcagcagtttcttctctcatatattcccaaaacaagtacatctgcgatcaactctagccaaatttgcccctgtgtgctacatgatggatgattattattttaaggtctgtttaggaagggaaatggctacttggccagccattgcctggcatttggtagtatagtatgattctcaccattatttgtcatggaggcagacayacaccagaaatgggggagaaacagtacatatctttctgtctttagtttattgtgtgctggtctaagcaagctgagatcatttgcaatggaaaacacgtaacttgtttaaaagtttttctggtagctttagctttatgctaaaaaaaataatgacattgggtatctatttctttctaagactacattagtaggaaaataagtcttttcatgcttatgatttagctgttttgtggtaattgctttttaaaggaagttattaatatcataagttattattaatattttgaacacaggtggatgtgaaggattttcatttaaaaaccaagtggttttgactttttctgttgaatgaacaactgtgccttgtggaatttttgcagaagtgtttatgctttgttagcatttcaacttgcattattataaagaggtattaatgcctcagttatgtgtttgtcaatgtactggctgaggattctatctcagctgtcttttctaactgtgtaggttgagttttgaacacgtgcttgtggacatcaggcctcctgccagcagttcttgaagcttctttttcattcctgctactctacctgtatttctcagttgcagcactgagtggtcaaaatacatttctgggccacctcagggaacccatgcatctgcctggcatttaggcagcagagcccctgaccgtccsccacagggctctgcctcacgtcctcatctcatttggctgtgtaaagaaatgggaaaagggaaaaggagagagcaattgaggcagttgaccatattcagttttatttatttatttttaatttgtttttttctccaagtccaccagtctctgaaattagaacagtaggcggtatgagataatcaggcctaatcatgttgtgattctyttttyttagtggagtggaatgttctatccccacaagaaggattatatcttatagacttgtcttgttcagattctgtatttacccattttattgaaayayatactaagttccatgtatttttgttacaaatcttctgaaaaaaaacaaaacaatgtgaaacattaaaattaaaaggcattaataatatccacgtgtgccttcttactgaatgatggtcttgggagtctttgcaagagtattgagtagatctctgatattgtgttgaaaagctagctgctgagtaggctccaatgatgctatgctgatttaagtatagaagaactaatcagttcattgccatttcccatcttctggcagtatcaggcacatagatggtcaataaatgtttccagaaatgttgattaccatgttcagattatgcattcacatgcacttaatcttcttaggtatcactttttaagcagaaactcctcttttatgtaatctttaccaaaaaccttcccagtttgtacttgtttttgtggtaagtagttgcagggtgctagtaataacaacagctaaatgagtgtttactgcaacacgtgcaggcactgtgcttgacacaccctggctgatgtgatccttacaacaatcctattagagaaggtgcttttgtacccatttatagatggagaaacaggctcagaagtgtaagtcactttcttaggattacacagccagttaatgcatcacgtttttgaggccagagttgggtctgtgacctcaaaggcgctacctcttagttacctcgcagtgcagcctcccattcatctctgacaaatggaagcttttaggtctgctgcatcaattcctgggacttcacattttcacatgccgtcaagcaatgctgtctacacgcttaataaataccttgtcttgagatgttctaacactttcctaactggactttccaccgccagtttacttcccactagagccaggctcttattgcctgaacttccctgtctcaagcctttgaggttttcccaaggcctgtaactagacccacagtcccctgccagaccctgaacctgttatctgcagctctagcctgcgctttcccttgcctgttctggctacacctgctctatgtccccatataactactagcctccctcaaaggtcacctgctctgcgtaacttccagctggttctctacctctactcccagggtactctgtattgtctctagagctctttgaattactctgcatggagtgtagtgtgtgtttctgtcaccaccactagataatgagggttctttacctctgtgtgccccacagcttctagcacaaggtctggcactacagaagcacttagaacattggtgtaattggattgacaggtagagccataactatcagagatggccatataggaagccttttaatttcttcctgttatgtcaggagccattgatttaaatgttaatgaaagtagaaagggcctaaacagaaaaaaagtcagcctcactagtgagggggaatgcaaattaaattgcagtgaaatgcaaatcaagctgaagtgagataccattttatacccactgtgagtggctactttttttttttctttgagacagggtcttgttctgtttcccaggctggagtgcagtggtgcgaacacagctcgctgcagcctctgaccttctgggctcaagccatcctcctacctcagcctcccaagtagctgggactacaggcatgcaccaccatgcccagctaattttttaagtttttgtggagattgggttttttgctctattgcccaggctggtcttgaactcctgggctcaagtgatcaccctgccttggcttcccaaagtgctaggattacaggcatgagccactgtcctagcctggatggttaattttatgtgtcaacttgactgggctaagggatgcccagagagctggtaaaatattcctggatgtttctgtgagggtgtttctgaaagagattaacactgattcgaatcaggagacagtaaagagggtcaccctcaccaatgtgggtaggcattgtctaatccttgaggcccaaatcaaacaaaaggcagaaaggtgaatttactctttgcccttgagcttggagatccatcttctcctgccctcagaccttgctgctctggttcttgggactttagactcagattaggatttgcacccttggttccctggtctcaggccttcaggtttggactgaaactccatgactcactctcctgggcctccagcctgcagatgggactgtgggacttttcaggctccataatcacatgagccaatccctcctaaaaatctctttccatattttatgtacacacatatgtataaaatccattgtttctgtggagagccctcatgcacccattgtatggcagatttaagagtgccagtatccagtgttggcaaagacatggagcaactggaacacttattattattgctggtggggatgtaaattattcaatcacttcggaaaacagtgaagatcagcatatcaaacatttcgaaaatgatttgaaatttttttacatgttttaacaaagccagtttattttgtagttttaataaaaaaggtgccctttttgtccctggattcacttagcattcataattttttttaatacaatgaatttaaattgctaaaagatcatggactggctttctggttggatttcaggtaagatgtgtttaaggccagagctcttcctcaatatttgtttttttcccaatatttgatttttaaaatatacacatagatgctacatttatagcttctggcttaaaattctgtcatatgtcacgtctagccttttagtatggtaaatcatgttttacttctacttaaacattaataatttggagtatctgttactagtaatagtaattctataattgtataattgagttttgtacttaacacacataggtcattcctcatctatcatttgcacccagtgcagtttcatttttcagataccatgatgcaaaatagagtttttcatcatttaggtgtaagcaaaaaccccccaaaccaaaaaatgatactggccgttacccagtagaattaaacgcatggatagctcatgacccagctgttacacgcttaggtgaatacccagcacaaatgcactgtctacgtacctaaagacttgtacaggagtgttcataacactgttattaattgcaaaacaaaataaatcccaaaaacaaacgtggaagcagcccaaatatccatcaccatgagaatgggcaaatgagttgtggtgtgtccatgtaacagaagactaacagcaggatatatgtaacaaaatagatctaagaaacagtattgagtgaaaaagtcaaaggagtatgtgcaatatgatttcattatgtgtacagagaggcaaagctaagaaatacagtgtttagagataaaattgtaataccctaagggaaagcaagagaattcaaaatgatgatcataaaatagaagctagtagttaccaatgaaggggtagaacagtggatggtgtattagtctgttttcatgctgccgataaagacatacccgagactgggtaatttataaagaaaaaaggtttaatggactcacagttccacgtggcgggggaggcttcacaatcatggcagaaggcaaaaggcacgtcttacgtggcagcagacaagacagaatgagaaccaagtgaaggggatctacccttataaaaccatcaggcctcgtaagacttactcactgccacgagaacggtatgagggaagctgcccatgattcaattatctcccaccaggtccctcccgcaacgcgtgggaattaggggagctacaattaagatgagatttgggtggggccaaacaatagaagatgggattaggaaggggcaaccatgactgaaaggtcgctcaggacttgtgcatttgtttatcagtattatctatctatctatatattttttatttggttctaccttaaactattaagggataatatctatatttttaataaactttttaaaacaagcagcttagaagaggtgggggtggagggtgcagcttggagtactggcagaatactaggtaataggaatatgtccatcaagttttcacatacagaaatagaccagactagaaagaaagatgctacagcagaaggcccttcctgaccatcacctaccatggttccaacatcagtctgaagtcgaggaatgggttaaacatgcactaaattttggggtaatttctgacacagcaatagataattaatacgtgggagttggagagggaggttacagaacaagtaggccaggccttataccccctttatatcacagcactcaacttttaacattttacaagattttatttaggaaaggaaaagggatgcattaagtttttaaatgtgaggttccgtagcaaggaagcagggtttccctgcagtacccttcctgctaatacacttcactgatgcgttgacacattgccttctgggcactttttttgtgccacaagatctcacaaggagctgagcagagcagactaggatgcttctgtgtcccttggccctcaaagtgagcatggtcttaccagtgaacgtcctttagtacagttgttcatctatccagcactatttcatagtatttgagattggaaagggaggtcagctcctccaagtctgtttgcagatgcagaaactgagagctaaataggcaaagctaccgagtcaacatcaagttcaaggttaaacagccaaacacagaagccagttttaacttccagttatctatttttccacgccaccatcctgcccatcatcatctttgtagattctcctacattcttaaacacacccagccacgtaagcacacttttgattgcagtgcaattgaagagcgtgaagaaagcatacattgcttataaaaaaaaaaaagccgacaggtccttggccctgcagtccacatgtggtaggtatgcgggaaacacatcctacagacctcaagtgaggcatcagaagtccatgccattggcttccttttgtgtatgatggtgataccctatttgtatgtcgggaaaatgaggtagaacctgcctaataattgcaaaagcaaacagtctgggtgagtgtgtgctaagtcagcagagtcaaggaagaaaattatggactatcctttatgtccagagcacagcggacacaaaatgaagaaacacaatctagggtgagtgtggtcaggtaaggtgggtgagtgtaaaagaattgttattccttcatttcttcaacaaatactatgcaccaggcacctttctaggcagtagagctgagcagtgaacaaacatcagacatcctcatcctgaaaggcttatgttatagtggaggtaaacaggcaaaactaacacaaataagtaaactatatagaagttagtgccatggagaaaaatctaagcagaggcggggttagggctgtggggcataggcagtggaattttaattaaggtggtcagggaagacctcagtgagaaggtgacatttggcttcttctatcaagcagatatctggggaaaagcgcattccaggcacagaggtcagcaagtgcaaaggccctgaggcagcacatgtctgggaggttggaggaatgtccagtacggtggagttgagtggggaaaggagtcaaggttggagacagaacagggagagaggggcaggtggttgggatcttgttgcactggcaccaytgggagccactggagggctctgagcagaggaggggtgtgcttctaacttacaggttctcaggagcactctggggctgggctgagggcagcctgagggtgaggaaagggtggaaggtgggagcccagcagggaggccgctgtagtaatctaagggagagaagatgatgcctaagccatggtagtagcagtggatggacattctgacctaatttgagagtagaatttatggttaaattggatgtggggtgggggagagagaggagttaaggatgactccagagttttggacttgaagaattggaaggactgaggttggaggtgtcatttcactgaggtggggaaactataggaagatgggtgggaattatcagatgcttgggttttgggcactgagtttgagatgcttatgagacgtctgagtag

SEQ ID NO: 94140 - DNA, 242337 bp, Homo sapiens
  misc_feature (1)...(242337): n = A,T,C or G
gaccaacatggagaaaccctgtctctactaaaaatacaaaattagctgggcatggtggtacatgcctgtaatcccagctactcaggaggctgaggcaggagaatgacttgaacccgggaggcggaggttgtggtgagctgagatcgcaccattgcactccagcctgggcaatgagtgaaactccatctcaaaaaccaaaaaacaaacgaaaagttaccacattgcaactaacacagtcatgactcattcaggtgggcgcttactgggtgtcttggtctgttttatgcttccgtaacagaatacctgagactgggtaatttataatgaacagaaatgtatttgccttatggttctggaggctgggaagtccaagattgaggagccacatctggtgagggccttctggctgcatcatctcatggtggaaagcagaagggcaagagggtgagcaagggaaagagaaaggaaggggccaaactcatccctttatcaggagcccactcccgcaataacagcagagcctttatgaccaaatcacccacctctcaacactgttgcactggggattacatttccaacacatgcacttggggaatacattcaaaccatagcactggggaataagatgccaaagcctcactccacagattacgtatgaattacaaacatatacaaggaacctttatagtggttcttctggaaaccaccttaaccatgtgaacaaagtcagcgtcatcaatttgaactgacatcctgtgccaaaaatgcataacctgaattggatttaggaaacattagacaaacacaaattgagggaccagctgcaatataatggggctaactttttttttttttttccccaagaccaagtctcactctgtcacccaggctggagtgcagtggcccgatcttggctcactgcaacctccacctcccaggtccaagcgattctcctgcctcagcctcctgagtacctgggactacaggtgtgcactaccacgcccagctaatttttgtatttttagtagagatggggttttactactttggccaggatggtctcgatctcttgatctcgtgatctgcccgcctcggcctcccaaagtgctgggattacaggcgtgagccaccgtgcccagcgaatttttgtatttttagtagagacggggtttcaccatgttggccaggatgatctcaaactcctgacctcaagtgatccgcccgccttggcctcccaaagtgctgggattacaggcgtgagccaccgcgcccagccggggctgacttttaaaagatgtcaaggtcatgaaagactaaggaactattccagattaaaagggaataaagagacatggcagctaaatgacatgtgtgtccttgcattgggaaaaataatactgctagcaagaatgttatttgggacaattgactaaatgtgaatagcagttattagcattggatggatgctgatacctgaatctgaatattgcagtgttaaattttctgcatctgatcattgcagtgtggttatgttggagaaatattcttgttcttaggaaatacagcttgaagtactagggtgaagggtcatggtttctgcaatttaatctcaaatggttctggaaagaaagttatactttgtaccactgaatggatatatagtaattgtccccttagctgtgctgttgctttccaaggtttcagttacctgtggccaactgcagtttgaaaatattaaatgaaaaaaaaaaaacaagaaaaagaaaatataaaatggaacattccagaacatttcataagatttatttgtttatttaattttgatagatttagagggtacaagtgcccctgttttgttacatgggtatattgggaagtggtgaagtctggattttgagtgcagccatcacccctgatcatgtacattgtacccattaagtaatttctcattgttcaccccttccacccttctgagcctccaatgcctgttattccactctctgtgtccatgtgtacacattattgagctcccacttagaagtgagaacataattcatgagttttaaattgtgtgcggttcggaacagcatgatgaaatctcacaccttcctgttctgtctcacctgggacacgaatcatctctttgtccagcagattctcccatttgtcacttagtagctctgttggtgatcagatcgactgttgtggtatcacagtgcttgtgttctagtcattcttactttatttaattttattattagtttattattaccctattttattattagttgttaatttgttattgtgcctaacgtataaactttgtcataggtaagtaataggaaaaaacaatatatatagggttcaggcgtccactgggggtcttggaacataccccttgtggataaggggggactactctaccacagtttgcttaatatgttccttattgaacatttaaaattttccaatttaaaaaaatcattcttggccaggtgtggtggcttatgtatatgattctagggctttgtgaggcaaaggtggttagatcgtttgaggccaggagttcgagaccagcctgggcaacatagcaagaacccatctctatacaaaatacaaaaataattagcaggcaatggtggtttgtgcatatagtatcagctacttgggaggctgaggcaggagggtcagttaagcacaggagtttgaggctacagtgagctatgatagcaccactgcactccagcctgtgatataccctgtcttaaaaaaaaaaattttttttttttttgagacggagtctctctgcgtcacccaggcttgagtgcagtgacaccatctcatctcactgcaagctctgcctcccgggttcacgccattctcctgcctcagcctcctgagtagttgggactacaggtgcccgccaccacgccgggctaattttttgtatttttagtagagactgggtttcaccatgttaaccaggatggtctcgatctcctgacctcgtgatctgcccgcctcagcctcccaaagtgttgggattacaggcgtgagccactgcgcccggccaaaaaaatcatttttataaggattgttgctattaaagccttcacaggctgggcgcagtggctcgtgcctgtaatcctagcactttgggaggtcgaggtgggcgggtcacttgaggtcaggggttcgagaccagcctggccaacatagtgaaaccccatctctactaaaaatacaaaaattagctgggtgtggtggtgggcacctgtagtcctagctacttcggaggctgaggcaggagaatcacttgaacccaggaggcgggggttgcagtgagccaagatcgtgcttctgcactccagcttgggtgacagagtgagactctgtctcattaaataaataaataaacaaacattaaaaaagaagaaaataaaaaagaggttgtatggaccgtgggaggcaagagcggtagattctgaaggcagctgcttatgctgttgtgcccaggattctcatatcactgcagacactctccacaccatgcttacgccagagtttttttgtttttgtttttgttttttttttgagacggagtctcgctgtgtcgcccaggctgtagtgcattggcacaatctcggctcactgcaacctccgcctccgccttctgggtttaagcaattctctgcctcagcttcccgagtagctgggattacaggtgcgtgccaccatggctggctaatttttgtatttttagtagagatggggtttcaccatcttggccaggctggtcttcaactcctgacctcgtgatccacctgcctcggtctcccaaagtgctaggattacaggcgtgatccactgcacttggcctgccagagtttttaagttaatgacacccctggcattgtcctaggattcatgggtctaatcccagctacaatgcgtaaatttagacgtggacaataggggatctgtaattagctggatcattgcctctaggagattttcttgactaagaaccacaatatgaagctttgtgtttgaggacctcataattctccaagacagtttgtgaaaatcagtataaatctaaaattgaaaggaaaatgtgtttgacctgaaaaatactgagtcaaaaacaaaagtcacttttaatgggagtgtacattggtataactgctttggaaaacagtttagcattatctcttaattctgcacattaattagcttgctggacgtatgcctggtgtagtaatgggtccacacccagagaaatgcttgcccaggggctccaggagacgagtggatgttcagaacaatattatttgttagaggaaacaaactggagataaccccatgttgatccccaggagaatggctaaacaaagtaggatatgatcacaaatagaatattagatagcagtgaacatgaataaaatgcagctttgcgaaattgtatgtgtgaatcttagaaacattgaatagaaagaatgcaaggcttggaaatctgcttattgaataatattcttataaagcaagaaaaaaaaaacaaccatacctagcctcagctcttgtgttatgagaaaccccagcagtgataggatgtctcatttgaaattttctttgtggtagggctattctgcacaacatccataaacacttcccgggcatcagacttgattcattttcctatttatttcctcctctttgggagagagtattctaattaacatcatgtgtgtcccaccacagattaaagaattcccccattcccctaaactgagaaggagaggctgcaagtctttgcttgaaatttttgtgctgaaagtgaagcattcagggttccagtggcagaattaggactccatccttagggtagcaggagaagtctggtagtgcctttagaaaaggaaggttaaggccggatgcagtggcttacagctgtaaccccagcactttgggaggctgaggtgggtggatcacctgaggtcaggagtttgagactagcctggccaacatggtgaaacactgtctctactaaaaatacaaaaattatctggacatggtggcgggcgcctgtaatcccaatacttaagaggctgaggcaggagaatcacttgaacctgggaggcggaggttatagtgagccaagatcgtgccactgcactccaggctgggtgacagagtgagactccgtctcaaaaaaaaaaaaaaaaaaaaaaaggaaggttaagagttaatagattaatagattcagctctcagttcctcatcagaattagggaggagtaacatggggaaagaaatccagaataactagttaagcccatacattgcacctccttcatcaaataacccatcaggagtgccaaatttggctacttttgtctgtcactcattttattcagcaaaaccttaagccaacttcattattttgccaggaaaacagacccatttcctgcccttgaaggtttgcagtctcaagggggaaagcagtacaacctttacaagcagttatcaaggtgggtgggtggtgttgcaggcgagcgtggaaggggcccacctggccagggggcaggccatacctccctgggaggtgacgtttgacctatgaggcaagccctaaaggacaggtagggatcccccgcggatgccgtgctggcgaggcagggcctgagcagccagtggagaagggcagcgggaagtgcgctgtgcaggagccagacgtctcagcccgtgtggccagaggtggcaggggcgcggcctgagcggggctggggcgcgggcaggatttggggctgcgccgaggggcgtcccgacctggccctttgccacggtaggttccggctcccatgcctccgctgccatctgcgctgtccttggcgactacgccttcacccccctgggtgcgtttcagcggtcccggagcctggcgggagcggggccaggagcgctccgcggccggtatcaggcctgcaggtagggacgcgcggccgcccggggctctggggactcgggtgtccaggtgccgaagtcgccgcttccacgggggactcaggcccgtgagtgggtttcctaagaacttaccagattccacggctcgggtttcctgccttggatcctgctttttattccccagggggagttatttatagacaggaatcgtgtgttcaaggcctggctcttcggactcggcgtttttcttgttcgaggtgcttcaatgggggctggatgccatcatcttccaggtctggaatcttgtagaaaacgagctgtacaggcaggagttcagttcagctgtatcatctgttcttggcctcttctggaaacgggctaattctctgtttagggctttatcattttataaccgagtaacatactagccctgtggttgagttgtttcttcctattttttttttttttaaatatagtcagggtctcactccattgctcaggctggatggagtgcattgatgtgatcgcagctyactgcagccttgaactcctgggctcaagcaatcctcccttttcagcctctgagtatctgggaccaccacacccagccttttttttttttttttttttttttttttgagatggggacttgctctgtcgcccaggctggagtacaagtggcgtgattgcggctcactgcagcctcgacctccccaggagtagctggaactacaggcacacascaccatgcctggctaattttctttacttttgtagagatgtggtttcaccatgttgcccaggctggtcttgaacttgagttcaagtgatttgcccgcttttgcctcccaaagtgttaggattacaggcgtgagccaccacacctggccgcctggctaatttttaattttctgtacagatggagtctccctatgttgcaaagaccggtctcaaactcctggcctgaagtgatccttctgctttggcctctcaaagtgctggcattataggtgtgagccactgtgcctggtccgtattgctgttttatcacmagctacctgcagtgcatttgggctaaacatgtcgtttgcataaaaccattytaaaaatcacaaattgacctgcaaagcaagrtgtatcaacagaggggcatggcagcttcatgggacccccctataggagactcaatcctgggtgcctctatagaaacataaattcagtgaaaacaaaggagctagttcycmtggctggagaatgtaaacggatgaaggtaatgccccccttctcccaccatagtctttccagggaatttatttccagctccattaaatttatagcatcargggtttataataggtagtttttttctttctttcttttttttttttttttgagactgagtcttgctctgtcacccaggcctggagggcagtggcgcgatcttggctcactgcaagctccgcctcctgggttcatgctattctcctgcctcagcctccccagtagctgggactacaggcgcccgccatcatgcccggctaatttttttttgaatttttagtagagacggggtttcactgtgttagccaggatggtctyratctcctgacctcatgatctgcccgcctcagcctcccaaagtgctgggattacaggcgtgagccaccgcrcctggccaatttttttttcttttaagcagtgtgattggttttcyctgagtacggaagtctcagtcccagaatatgttcagattggcagaggagaaattcggttgtcatgtgactcactggcccctcatggagcttttagccacaggagaggatgcatctgtgctggttttgccgcagtgtctggagttcccagctgagtccgctgttgaacagttctcttcatgtgctttgctcggtgacacgtacattcccaaggcgtctgctacagggtctctttaagggtctcccgacccttcagtcctgccagcttcgcactcttctctgccccagctagtctctggccttgcaccctggggctcttcttgcccccttctcagggctcagtgtgctctacaggatcccayccagcagtcctcaggctgcagtttaatcaggacgcttccagcctccttcccacactgtggggtcctattcttaattttctttttttttttttgtttgaggtgggagtcttgctctgtcgcccaggctggagtgcagtggcacaatcttggctcactgcaacctctgtttcctggattcaagtgattctcttgcctcagcctcctgagcagctgggactacgttgcaccaccatgcctggctaattttttgtatttttagtagagatggggtttcaccatgttggccaggctggtctcgaactcctgacctcaggtgatccacccgcctygatctcccaaagtgctgggattacaggcgtgaaccaccgcgtttggcccctattcttagttttataaattaatgggatgataaaagcagcagcgtaggacttggaaactgacttgtttaaactaacacagttggcagataaagtaacttaacctgaaggagcacttcaagtggttgggatttctggcaccatgattgaccagttgaggaaaattcaggcagatgggcttttccgtgcctgaaaaaggcaactcgatttactgggaaggaactccccaccccgactttgtgtaatagtttccccacgaagagcrctcatgaggatgaagtgaaagcgcgttgcccttctattcccttcctgttcactctgcccaggtgggcagttgctgggtcacaatagtctgcactcttagcctgtgtggctgttctctgtgaacccgcccacccacaccaggtggatgctattattattcctgcattggagctgtggaacgagaggcatttgccctggtcacatggccactgaatgtgtgcattttgttggggagttggggggtcagaggcagtatctgaacccagggtttctgattccagaccatggcctctattgcttcactacacaaacggcaactcacacaggctcaatattgggctgctgggcaggatgactggctaatgcctttttcatgtggttgtaaaagttttaatttctttccacattcatttatttgacctcttaaagctgcctctrtgcaaaccctttaaaagtgaaacatttgttcaagaaatgagtcacgattgttaggaagacaatgatgaacatattaggagtggggctcccccatttgcagagcaatctcccatccattgaggtggtttagacttttgagggtgttttggagggtgggggcagtggccccatgtgcttacctggaagcttatggtactgatcacccctctggagggcctgtctgataggcaggaaactgctcacagatttctcccttcgcccaaccaggacctgatttttacatgcctgaaatataaaggaccactcccctctgctggacgaagataaatttgcttttaacagagaaaaaatttgtgaccgcttcgctctctagtggtcaactaggtaaaagagctagcagttctacgtcactttacaaactgaggtatgaacctcagtttttgaggtagttgcaaaaactttcagtgagcacctactatgtataggcacaatgctaaataccagggatatgaaggtgaataagagagcmccaatatcaaatgtttgtagattgcatcatattgtaaatgtacgaggaccacagaatttgagagatggaggggaagttagagatgatctggcttgtgtccctctttttttttcctaagttgaaaaactgtgacctagagagatgagataatttgcttaagatcacatggctggttcggaagaggggaaaaaaggagtgctgatgaaattcagtggaatgtcaccttctaatttttatcacctattattttgaaataattttaggcttacaaaagagaaatagtacagagagttctttgaaacttcacccagcttcctctaatgctaacatcttacacaaccatggatttaccaaaactgacattggtgcaacattattattattattgttatttattttttgagacagtctggctctgttgcccaggctggagtgtagtgatgcaatcttggatcactgcaacctctgcctcccgggttcaaatgattctgctgcctcagcctcccgagtagctgggattgcaggtgcacaccaccacgcccagctaacttgtatttttctgtgtgtgtatgcgtgtgtgtgtgtgtgtgactgacttccttaaaacagtaatgacttaytgatagtcagctattgtacagaaagggtatcacaaacctctttgtcttttggatcatgcctctgttttcagagcaggttgttttcccaggtgattttgatgacatcccacctgcagctttttagatgtgtccaagttggggacaatcccggcctgttcaactgacctggatacaaaggctgtcagggctggcagtggtgcaccttgaaccttctgccactcttgcgtcttggatcttgagtttcatttctatttttgtcgggtatagagcattctttgctcttggttgcctagtttatccagagaaggactttggggccaaaaggacacaaattcaaacatcagtttccccacctaattatgggagctcaagttctaaaattcaactgttctaaaattcagtttcttcctttgcaagatggggacaataatggtcaccatgcagagttgttgagggattaaatgtatccagtaattggcatagcacctcgtgtgcaggaggtgcagaatgaacgtggaataagtgaatggctgccaatgagggagacccggttaggtgggtccaatggaaggtctttttcttttctttttagagatggggtctcttctgttgcccaggctggagtgcagtggtatgaacatggatcactacatcctggaactcccgggctccagcagttctcccgcctcagcctcccaagtagctggggctataggcacgtgccaccatgcctggctaatttttaaattttttgtagagrtggggtctcactatgttgcttaggctcagtggaaggtcttgaatgccaggcaagactgcctgcactttctggggtgggggcaggcactgcaggagtttgagaagcaggagtgatgggatgagcgctgtgctttaggcagtcaagtgcagagtgtgctggatgaggcagaaccgtgggaaacaggggacgggcaccgggaatcatccagcaggctgtcgtgctagtgcctgttctggtgagggctgagctgggcctggactagaaagaagggaccatgtgagactgtgcagaggtcccgcctaccaactgctatggaaataaacaagacacaggggctggagaagttgggactccaagatgcatgaattctgggtcctagtgaaaaggtgaacaagtcatgaacagagataagagaaatcaggataaagagataatttgtgggaggaaaaaatgcatttggttttattcatgttgcctttgagatgctgacagactatccaagcagagacaagtggaagagatgattgcggcgccagagcctgggagaggccagagctggccatgaggactgagcgtcactgccagaggtcaccaaggaagagaacatagaggaggccagaagttgggggcagaggctcacttatggccgacagttgagagaggggttakagacagagacggagaacttggatgtgctggttcgyaagggctgctataactaagtattgcagactggggcttcaacaacagaaattcatttccccagttctggaagctagaagtccaagatgaaggtgtgggcggggttggtttctcctgaggcctctctccttggcttggagatggctgtcttctccctttgtccttacaggattgtccccctgtgcatgtctgtgtctagtctcctctccttataaggataccagtcataacagattaggtgatgacctcatttcaccttaatgactattttatccttataaggataccagtcataacrgattaggtggtgacctcattttaccttaatgactattttaaagtacctgtctcctgatgcagtcccattctgaggtactgggggttagaacttcaacattagaatttggggggacacagttcagcccattaaccctggaacagaagcagaatattgaattttaaaagaacccaagggaggagtttcaggaaggccaggggctggcygtggcctgtttgtcttagacacacccttgcctcctgccgcctctctatctctctcctctggtccacaaggaggttcctggaggctcttctgccgtggggcctctagtgaagttccgccatggggcgttgggctggaggtgtggagcggctacagtatttttccgccttcttcccctgctgatgtctccagcagcagttgtttctctgtggctccatctcccacagcactgatctgtgggttccagcttccaccaggggaccctggatcccgggcgacggtaacttgacctgtgttgtgtgccctcagccctacagagggtcgcggcttctgctctttctattccctgggttgcctcactgtcccttctgtggtgtgtgtccgtttgtttatttatttatttatttcagacggagtttcactcttgttgcccaggctggagtgcaagggcatgatcttggctcactgcaacctccgcctcccaggttcaagcgattctcctgcctcagcctcccaagtagctgggattacaggtgcctgccaccatgcccggctaattttttgtatttttagtagagacggggtttcaccatgttggcyagctgatctcaaactcctgacctcaggtgatccacccgccttggcctcccgaagtgccgggattacaggcatgagccmcagtgccctcccttgtctggtgttttgtcatgttgtagccagctctctgtattaaatcccctctgagtatctagtagtttttgttgattggtagaaatagcatggtcaggaatgccaggtactgcagaaagatggaarggatggaaatggaaaatggtcagatctttgagcaatgggggtagagcccagaattccagggcttgagaaggggatttctgccaaaccgatgggtgtataccaattctcatgaaggtcttaatttggacctactttgagactgcatactttttcatrtttatcagacagctgggtacagtctgtttttgaagtgctttttcagctttagctgtcctccttttttggttttctgacttttcctcattgatttggagttctttgtatattctagatatgaatcctttatcagttatgtgtgttacaaatacctattctcattccagagctgctaaaaaaaaaaaaaaaaaaaaaaaaagacaggrtctttctctgtcgctgaggctggagaccagtggtgcgatcacagctcactgaagccttgaccttctgggctcaagtgatcctcctacctcagcctccygagaagctgtcaccacaggcatgcaccaccatgcttggctaatttaaaaaaatgttttgttttttttttcatagagatggggtttccctgtgttgcccacgctggtcatgaacttctggactcaaatgatcctcccactttggcctcccaaactgttgggattrcaggcatgagccactgtgtctgcccccaagtcctttttaaattaaatttcctttttatacatttcagtggcctgattatgtaattcttatcaatctagcagattcagtatattaatatggcaaacctaataatattcccttagatgtttcaatactattcataaactcagtaagatttcaatatagaagtacccatttcaaattagttataagaatgtacttaaaacagccacatactctaacacacttcaagtatatataagaccaaaaatatgcatagattccttattaatacagaaatataaatctatggctttgcttctttcaagcctttctatatgtaactcagttttactggattaggagatggatactgtacagttactgtcctagttaactgaggccattgtccatcagaggtttcactgggtttctttcctcagtctttaaggagacagtgaatcctacttattgtcattctgtcaacaattctgaaatctcaaggagggtgaggccaggcacgacacatgcctgtaatcccaatgctttgggaggctgaggcaggaggacagcttgaggttaggggttcaagagcagcctgggtggtagggcaagaccctgtcttttaaaataataataaaaaaattaaattcaaaagaaggaagatgatctcttagcctcttttagttgaagttagaacattacttacctctgcttgctcatagaagtctgtagctcccacatagactgataaattctcaggatgaatttaatttttacaatctttggaatgaataaaatcttgtaccatgtcctgtttttaggctgatccaactctgaaggagtcttaaaccagatgcgatgagctttggttctctcccgcgactctgtgcttcggaatcccagctttagggtctttgtattgatgccctcttgggtcacaaacaaccttctaaaggaagaatttgccacctactaatctttatcaatacaacaaatgaatcaatacaaacataaccaaataacgagactcagcagtaacacattttatcctacattcttttcgaatatttaaattttattgaggatraccatggatttcatggctcttcatttttttttttttttttgagatggagtctttttctgtcacccaggcttgagtgcagtggtgcaatctcggctcactgcaacctctgtctcctgggttcaagtgattctcctggctcagcctccygagtaggtgggactgcaggtgtatgccactgcgcctggctaagttttgtatttttagtagagatggggtttcgccatgttgcccaggctggtcttgaactcttgatttcaggtgatctgcccgcctcagtctcccagagtggtaggattacaggtgtgagccaccgcgcccagccggctcttgaaaattgggtaccttcataattgggtgtatttcaatttgatactcaaatcgtcctgatttggcacttctagcttgtctcctgcatccttctgcctggacctatttttctttgaagcttctcctgcttcctagcataagatgttccagcttatctggtatctcttgaacaccagaatcagtgatttctccaaggatttctagttccttgtaatgaggagaagagcacccattcaagaatctgagcactcaggtgcatcttggggtaaggctactctgaggccatctcagtgaaagagctaggaaagataattattttcctcttaaagayatgagttcaaatgcatatttccaatagttmaagatgttctaatttaaattcttttgatgctstaaatattgtctacttttctctttattttgattaacaaaataaaattactttttgcttgatttgacgattgttccaaaaacaagaacatgttaatatacgtattaaagttactgaatagagatcaagattttcttttctttytttttttttttttgagatggagtcttgctctgtcgcccaggctggagtgcagtggcrcaatcttggctcactacaagctccgcctcctgggttcacgccattctcctgcctcagcctcctcagtagctgggattacaggcgcccgccaccacgcctggctaacttttttgtattttttaatagagacggggtttcactgtgttagccaggatggtctcgatctcctgacctcgtgatctgcccatcttggcctcccaaagtgctgggattataggcgtgagccactgtgcccggcgaagattttctacatagttccttggttcttagaaagtatcccaggctgggcacggtggctcacgcttgtaatcccggtactttgggaggccgaggcgggtagattgcttgaatccaggagttcgagacaagcctgggcaacatggcaaaatcctgtctctacaaaaaaatataaaaattagccaggtgtggtggcatgtgcctgtaatcccacaactttgggaggctaaggtgggcagatggcttgagctcaggagttggaaaccagcctgggcaacagggtaaaaccttgtctctacaaaaaatacaaaaattagccaggtgtggtggctcatgcctgtaatcccaacactttgggaaactgaggagggaggattgcttgagcccacgaggtcgaggctgcagtgagtcgggattgcaccactgccctccagcctgggtgacatagcaagaccctgtctcaaaaacaaacaaaacaagctatccttctcagctctggccatttgactgatgagaattctgaatgctctccaagttcaaacaggtactgagttaatgtcagtatgataggctttccctggggaagttctgccatgtatttaatgggggataggacagtaaacactctactcyctcttgtccccaaactattattcccagggcatgccttcctaagggcaagaaactagagactttttgagtctgtggagacttttcctatagaaagccggtcatgttgatgggtttcagaggtggtcttcagtggctagctgggtcattcttgttcctttctgcagtgttcttataaatgacaaagtcttgcttctaaatccctagtctgaccgggcgcggtggctcacgcctgtaatcccagcacgttgggaggcygaggtgggacgatcacctgaggttaggagtttgagaccagcctggccaacatggtgaaaccccatctctactaaaaatacacaaattagccaggtgtggtggcatgtgcttgtaatcccagctactcgggaggctgaggcaggagaatcacttgaacttgggaggcggacgttgcagtgagctgagatcgcgctgcactccaacctgggcaagtgagacttcatctaaaaaaaaaaaaaaaaatccctagtctgtggtcttattttccacatcattttggaaatgtcttattagagtctagagtagcccagacccagggaatgacagaggaagatgttagcagtgcttctctaactttaatgtgtttgtgagtctcctgggattttgtcaaaatgcagacgctgatttggggttgggtggggcctaggattccgcttttcttgcgagcttccaagtgatgctgctgctgctgctctaaggaccacactttgagcagtgagggactacaggatgaggatcaggtgcatacacattaatatcccttggtgtattatttttgcatccttcccctattcctttgttatataggggtgatgaaactcaactctatccttgacctttgcaaaatgaaatcattttagggcgggatcataaacagagcttgttatgtgactgtttcacttctcactgtgcccttcatatcttcctccctctattccttccccaggcatgaatggtatcagtactcttcaatgcaagggtcagctcatgttgaaccatggtggtccccatgcttttaacctagaattggtatacaggattgaccccaaaatgtaattttcccatgatgtattctgagaccatatctcgaaacacctaagggtaaacctagaaaattcctattggccaggtggagttasagtacctgtgggaaggtgtggtctcaaaacccttagggaatttggaaaaactggagatgttggtcaccttcagatagaggagatgacctctccatacctagcaggggtggggagtggtccttatagccataattcagcaaacttcaagaaggctatctgaaaggttgttcagtgaaacatttaggatttatcactgttgagcacttttcatcttcaaattcctgacttgtagtcctgtgttgtcctggagtggccaagtctctcctcagcgggaactgcacgtccttctccagtgacacaattttaaggtcttgttaccatgcaggaacccactttccrgctgccactgtcctgtagagaagtgtaggatatggctttagtcctgtttatcactttgtttttcttctatttctggtccacagagatgcttgcttttaagcccagttatttctttttggattttctctcttttaaaaatctatcgctatatgcaagggggaaaatatactatgttatctaaccaaaagtctgaagttctgggagtgggtrttctatgcagctatattaaagcasatgaacaaatggccaaggtactttaaaaatctatctttatggctaggcgccatggctcaaacttgtaatcccagcactttgggagatccaggcaggagtttgactgctygagaccaggagtttgagaccagcctgggygacacagcgagaccctgtctctatgaaaaataatttctaaaaaattagctgggcatggtggccaggaagatcacttcagctcagagttcgaagctgcagagagctgtgattatgccackgcactccagcctgggcgacagaacgaraccttgtctcttaaaaaaaatctatcctagctgggcgcggtggttcacgcctgtaatcccagcactttgggaggcagaggcgggtggatcacctgaggtcaggagttcgagaccaccctggccaacgtggtgaaaccctgtctctactaaaaatacaraagttagccaggcatggtgacgggcacctgtaatcccagctactcgggaggctgaggcaggagaatcgcttgaacccaggaggcagagyttgcagtgagccgagattgcaccactgcactccagcctgggtgacagagagagactgtctcaaaaacaaacaaacaaaaactatccttagattaagacatggacgtggtgtacatgattgcttttgctgcatcttgccacctattttcagcgagggccagaataggaagccactggatggaattctttgctgtgcttcgcagctgttcagaacacgttctttacataatgccttttaaagaaatgaggttctatgggagaagcctctgtgtcaggactaattatgcttcccttggagacaagaacaccaaatcatggtgatgttttccttttcccactggtgttaggatgcttacagtcaaactgttgacccacatgtagcaagaacaccatagggagccttcctggcacagcctttttagaggcagccttcttggtgcttatctgtcttcaatttctgtttcctgtccttatttwaaaaaacattattgcatcccgtgaatgtatgtgattgaccttaaaatcttttgcatgaaggcttagtataatttaataaaaacggccttatcttattttcccaagtcgactgggtagcggctgtggagcgctctgggactcccggtgtgctgctggttagtaaaggttggccttggcagctatgaacataggcagagccccctcctcaatccgcctcccacccctccaaggaagggaggccggacttggcttaaacaggtcgggcagccactggagcctcccctcccccgcatccacaacatacccatcccactcctcagccctggcgcggccccgcaccccggcctccactccctcgagccccctctccgggtgcagccccggcgtcccctgaccccggtgcacaccccccgccccagcgctgcccctcgccgccgccaccagccctgggcgcggcctccggagctccccatcacacagccgggcgcggcctcacccccccccgcccctcccgccgcagcctccagttgcccgcgtcaccttccgggtccccgcctcccccgccgtccccacccccgcgccgcctggcccgggggggcggcgcggcccttccggccggggcggggccgggcctggggcgctggggcgggcgggcaaggcgggctcgccctgccggcggcgcggccatgctcatcacgctgtgctacctgtacctgtgggcgcgctggggtcgccggccggctgagctcgtgcgcgccacggtgcggcggctgcgtgcctcgcgctgttccttcaccttctgcggcgcggccgcgsagcccccgggcgcccgcgtgtgcctgagccgtggcggccgcgtcttctgcgtcagcgacagccaggtgggcgggtcgggcgggcgggcgacccgggccccgcgagccggaagtgcccccgtccctgcgcctcgtccccgccggsagcccgggagttcrggagccccggagtggcgccctcagtgcggcctgtgcggcccgggaggggctgttgccccggggcccagagagaggccggaggtgcgggactcggaccacggacccggtcgcctcttcccggccagccgggcggtgctggacgcgtgactctaggcgcgcacctgtgaggacgtgagctgtggattgacagccggacgccagcagtgcccacctggggtcgcccccaacctcctctcccacacttcgagccggcgtttgggtgaccgtgaaccaggagagacagctgtggcgggccgggagcggtggcttatgcctgtaatcmctgcactctgggaggcctaggaggaaggacagctttgagcccaggagatggagaccagcctgggcaacatagctagacccctytctacaaaaaacaaaacaaaacaaaaaaaacacttaggtcggcgtggtggcacgcgcctgtagtcccagctactctggagggtgaggcgggagggtcacttgatcccgggaggttcacttgagccccggagtttgaagctacagtgagctatgattgagccattgcactccagtctgggtgacaaagcaagaccctgtcttmagaaaaaaaaaaaaaaatcccaaacaaaaaactcccacctgtgtcatcagctttttgtcagatgtccccaaatttacaaaaactgcccttttcyctctccatcttctgtcagttggttgcatcattcaccaasttgggcacccgactgatggtctttgcgtcttttaaatttcagttgacagtcagcctttgttttttttgacccagtgcttaggatggtggttacgtgttcagcccactctgtcacctaccttgtgacttgggccagtcaattaatctctgtaaaaagtctgctgccttgctgtaaagggaacaatagatctttccattcagctgtttttggaaatgggcttagcttcacagtgcagtactgcacaaaatttcatggacatcggtagcattgttctcattaatatttaaacgtgttttgcttttaatctgtttcttgtccctttcctctgttttctggaatattgcctcacttttagcactaaaatgacgttttctgcatatgtcacaccgtaaagcccctgtggggaattgaatcttatctcaggtttgaacattgcctggaggctgtgcttagatatgggttgaaattgtgccactagcaaataaaaaatactctttcttgttagtaccatrtatgtattatgtcacactgaatatgaatgactgttttctcaggtcycccaaggtactagttatgcaaataactagtaccacctccacataactgacactacccagacaaaaggggaagaagttcatgcattacatacaatgtatggcttagagcgttgggaattaacctgattgagaaarataactcaataaaatggcaaaaaattgrggggtgagctttttgtagtagtttccaaattggatcaattacatttaggatttaagtcagaatagaaattttsgacatataaaaacatggagatgggaatgtctgattttcttggacagttttacttttgaacattttcatgactccgctggccttctgttaactacactaaccataactagtgattttcagcccttgcctacctgtgcaggccggagtaggagtggcctggtgctttcatggattctgtaactctgctctgtcactctgcacagtaagctttgcctacagatttggttagatattgctgcgtcatttcctagttttccagactagatgggatggccatgctctgcatcccygtagcctttaaatcacagttcctattctagttcgtatctttttcttattaggaaatgagactgtttagcatagcagcttgacctgaaatagtaaatttaatagttgttgggtttaagctgtgatgttgaaggtctacaggtggaaagcttgaccatttatttgtgsttggctactgttattttgagatttaaaatatgatcaggttgatgatttggtggatatctcagtctgcttgggtctacttttgagggatacctcagtctacttgggctgaaataaggacacacctgaatctcatgcccatatgttgagatggatctcattctgtcacccaggctggagtgcagtggcgcgatctccgctcactgcaatctccacctcccaggttcaagtgattctcctcctttggcgtcctgagtagctgggattacaggcatgagccaccacgcctggctaatttttgtatttttagtagagacagggtttcaccaaagtgttggccaggctggtctcaaactcctgacctcaggtgatccgcccaccttggcctcccaaagtgctgggattacaggtgtgagcyaccaagcctggcgtgttctcatatgttatacacttaaaatcaaatgcatgaatactgaatatgtgtgtttataattgaatgccctacaatcaattgataagtttaaccaaagacagtttatacaaattggcagtatcaagctttttgtctgtttaatgtacacattctatgcttggataaagtggacatactttttttttgagatggagttttgctcttgttgcccaggctagagtgcaatggcacgatctcggctccccgcaacttctgcctcccgggttcaaatgattctcctgcyttagcctcccgagtagctgggattacaggcatgcaccaccatgcccggctaattttgtatttttagtagagacagggtttcttcatgttggtcaggctggtctccaattcccaaccttaggtgcctcagcctcccaaagtgctgggattacaggcgtgagccaccgcgcccggcctaagtggacatactttttaaccactatattgataattatgtttactgagggagggrcaaattctcccctaaattttcattcattatttagttcaataggtttttatcaagcagatttgaactgatatgcagcacagtggagcctgcctagttaccttcgttctgggtgatggtgaaagcctcctgcataccccgctcagatttcatctttttcttctctggctatatcctgtatgtgaaagccttttcaaatcaatttgctgtttttcttagagagatttcaggaaagaaaacgagagataactgggtatttctgatttgctaaccaatcttgattctaatcttctttttgaaaaactacaatcactcctgactggagtttacattccattaaagtatgtctgattgcgtctgcatatggtaaatgcctttccctgaaatagcttttctctctggatttaactgctgtgtgagcatccagagacttgcacacttcccagatctccgggagaggagcagggttgatttcactataaggaaggtgtaaagaaaaactgcctggtgccctgtgctgtgatggctgtagggaatgaaggaacagcccttcaggcttctgtgagtaaggagcttctgttggtgggtacgtacttctaggcctcctcatcttttttttttttttttttttttgagatagggtctcactctgtcacccaaggctggagtgcagtggcatgatctcatctcactgcaacctcgggctcccaggctcgagtgatcctcccacctcagcctcctgagtagctgggactacaggcacccacccccatgcccaactcatttttttggtatgttttttgtagagataaggtttcaccatgttggccagggtggtcttgaactcctgggctcaagcgatcygcccaccttggcctcccaaagtgctaggattacaggcgtgagccactgtgccggccagcctcctcatctttaaatgtacttcccggttagctactgtgtgstaagcagtgaggaatggcggggataggccccgtttcagaattcatggcttgaaaacagtggtctagagatattaaagctgtcctgagtcatcgatgggcttttgcaggtgcttaaacagtcacagctaaacaagaaacacacggttcctgcggcctgcagaggagcatcagataagcttatttccatgtcacttggaattataggggagggtatgtttcagagggggttgaaatttatggcagttgtggtatgaagtgacaatctcattatatttctttccctctatacagtccattgaagacttgaacaagtgggccctatttcttgtgtctccttttatacttgaagcagaacacatagcatttgtgacggagagcatttgggtacaaagtgagaatttacagagatcatcctcttcagaaacagtgagtaccatgtttacttgtgtcccataaggaactgatgtgtcttaktcaaaaccaaatttgctttttttttttttttcctgagacagagtcttgctctgtcacccaggctggagtgcagtggtgtgatctcggctcactgggacctccgcctcctgggttcaagtgattctcatgcctcagcctccagagtagctaggactacaggcgtgtgccaccacaccaggctaatttttgtatttttagtagagtcagggttttgccatgttggctaggctggtcttgaactcctgacctcaagtgatccacctgcctcggcctcccaaagtgctgggattacaggtgtgagccaccacgcccggcctcaaatttgtctttttatgagtgctctttcctagcctttgtggctccctttctctttggatattttgggttaaatatattagtaaaattattttcacctgtttctttttatgtttttaatgtggctgctagaaaaatttattgttattatttttcagacagggtcttattgtgtcacctaggctggagtacagtggtcattatagctcactgaagcctcaaactcagggctccagggatcctacctcctcagcctcccaaaatacttggattagagatgttagccaccacgcctggtcactgctaggaaagttaaaaccacgtgtgtggcttgtatttgtggctcacgttatatttttattgagcagcactctctctcaggtcatctcatccattcctacaatttcttgcttcctaaatcaacctgagtggctggggtatatcaccacctacgtcctaaacgtctttccttgagtattctgaaaatacttcaacctcagccacatgtccaaaatgagttgtgtttgtattcttctgcttcaaagagagaaaatcccaaattaacacgccagccggcttttcctcgcacctcctcctcgcttccgtgaagttatgagttgtaacagcactccctaaattgttagctcctctccttcatctccactgctcctcattccatcctcatgttcattatcttttgtctgagctgtgaaaataccctgtctcatgtcccttctttgggcattcctcttgatggccagagttagtcattctggacccacatccagttgggacagtgttgcataagcttttggtggatgtcatccctccaggtgcagtccatgccctgaggctcctggaggtctgaccccagtgtacccttgcagcttccttcccctcacttgtgggtcctcacccgccattgttccctgctatgtagatcatccagtggggattttgctgatgctagccatgtttactggattcccatttcatgaagattatctgtaagatgctgtattgagagaagaagaaaaatggggaagtaaacaagaagtaattgactggaattcagggtgaaccaaaataaggggaggcaggtgcagatagtataggatagcgagagactttctgatgggggccctggagcgggcagagcatcaggcagatgggcctggagcagtgcagtgtgttaagacagtackttctctcctgaaggtttgtaatgtttcgtttagccctgtagacacttatgataataataagccatttattgagcccttgctaggtattttataaacrttacccctaatgtcacaggatccttggggtgtcgtttcaccagacagaaacctctgtggctagcggtgccttctgcctaagtattgcttgtgcccactggtcttattccacccacttggcctggcaggctgcactcagctcattctaccagctcagattgcacacctaccaggggcaagctgggtgcagagcggcaaggggtgtgtgggtgagaagtgcagggtcggggggggggggtgggtggctccatgcaaggctgtggctggaccaggtgtactgaatgaggcttttgctgtgggcacctgtgtctggacaaggggaacatggtggcacctggaagcatggagacgctgggaaccgcagagccccaaagagggtgtttacagccttggcttggggagcccctagatcttggcttcttaaagggccacagttcttctctccttcttgttgcctgcaatgtagtgagtacggggacatgtttcagccctggtttgtcttacagctcttttagtactgccattcggtgggtcctgagttattgtcctgcatccaggaagaatgaggtatgtggagggtgagcaaggcagagaggaacttcactgagtggcagaacagctctcaggagacctgaagtgggtagctcctttctgcagctggtagtcccagcctctgtgtgagtctggctgggtctgaggttttcatgggctcagaagggaggaagcgcgtgctgattggtccatgggcagccatgggcgggccagaaaaagcactctaagttctcactctgggccacaggcttcacctggaactgacagccaggtccccaggttttgggctggtcttggcttgaaggcagggcgtcaccagggacccrcccctttctacctatgagcctgtctgccttctgctgtcagtcatgttgtccaaggtgyccaggctgtttgtgctgaggggtgcctacaggcctgcaaccagccgtcctcagcccctcctcggcctccctcccatcctcgtggtccagagtggctcctaaagtmtagaggggggctgaggtggcagggggctggtgtgtcagcgccatcctgagcagcacycacctggccgggttgcgacaccgcccaggctcagcttcaattttgctccagaatcagagcgggcacagggagcaggaagaggccaggcagcgggatcaggcacttccaagcctgtggggaagcgggggcctctgggacccctgagagtgcagggatgcccaggtccgcagctgtggctgggaggctgcagttatgcctgggagcactgggctcctgccctgccaactcagaagcgggaagggctcctgcctgctcccagctccccctggttccacagagcgcgtatccctggccgcgcctaccctgctccagactggctgcagctgtcatcactaatacttaacggctctacaaagtattatcattattattattgccattttgaagataagaaaacttaggttataagattaaatgacattcctaaagtgataggaatatcattgctaagtgacagacaaagttttctttcttttttttttggagwtggagtcttgctgtgttgcccaggctggagtgcagtggtgcgatctcagctcactgcaacctccacctcccgggttcaagcaattctcctgcctcaccctcccaagtagctgggactacaggcgcacgctgccacgcccagctaattgtttgtattttagcagagaccgggtttcaccgtgttgcccaggctggtctcgaactcctgagctcaggcaatctgcctgcctcaggctcccaaagtgctaggattacaggcgtgagccactgttcccggcctagacaaggttttaaccagctgctaagtgagagataagattttaaccaatgcttctatcctttctagtaactagagaacgaattaatggttttaaagagatctagatcattgagattccaaaataaagcttttattaacctaggtccagtcaaacagtacttgtgtctcttatgtttggtagaagamgaccagctgttgatacgacggttttggtgaactcagggctaattttctttctttctttctttctttyttttttttttttgagacagtctcactctgtcgcccaggctggagtgcagtggcgcgatctcggctcactgcaagctccgcctcccaggttgacgccatcctcctgcctcagccacccgagtagctgggactacaggcacatgctgccacatccggctaatttatttatttatttatttattgtatttttagtagagacggtgtttcaccatgttagccaggatggtttcgatctcctgaccttgggatccacctgcctcggcctcccaaagtgctgggattacaggcgtgagccaccgcgcccggcctcttttttttttttttcgagacgcagtcttgctcagttgcccaggccgaagtgcagtggcgcgatctcggctcactgcaagctctgcctcccgggttcatgccattctccttcctcagcctcccgagtagctgggactgcaggcgcgtgccacaacgcccaggtaattttttgtatttttagtggagacggggtttcaccatgttagtcrggatgatttcctgacctcgtgatccgcctgcctctgcctcccaaaatgctgggattacaggcatgagccactgcgcccagccaattcagggctaattttcatatgcagaaaagacgattcataaactttatttttattttaaaaatgattttgaatttattgaaaatataaattaaataatcaagtaggtcaaatcacatgaaattgctaatatctggcttttctttttgaactacaaagaggccttgtcatatggtaactgtattaggcagttcttgcattgctataaagaaatacctggagctggataatttataaagaagaggttctgcgagccatacaggaagagtggtgccagcatgtgcttctggtgagggccttgaggaacagtcatggcagaaagtgacagaggtgcaggtgtgtcacatggcaagaatgagagtgagactgagctgggggaggtgccacacatttttaaacaaccaggtcttgtgagaactcactcactatagggaggacagcaccacactattcatgagggatctgttcccattacccaaacacttcccccacaggccccacctcaaccactggggattacatttcaacgtgagatttggaggggacaaacttccrgattctatcagtaaccaattccttgggctttttttttttttttttttgagacggagtctggctctgttgtccaggctggactgcagtggtgcaatcttggctcactgcaacatctacctcctgggttcaagcgattcttctgcctcagcctcccaagtagctggaattacaggcacctgccaccatacccggctaattttttgtatttttagtagagacggggttttaccatgttggccagkgtgggtcttgaactcctgacctcaggtgatctgcccgcctcagcctcccgaagtgctgtgatacagccatgagccaccattctggctccttggacttttatttattttttatttatttatttatttttgagacggagtctcgctctgttgcctaggctagagtgcagtggcacgatctcggctcactgccaaccctgcctcccgggttcatgccattctcctgcctcagcctcccgagtagctgggactacaggcgcccaccaccacaccctgctaattttttttgtatgtttagtagagatggggtttcaccgtgttagccagaatggtcttgatctcctgaccttgtgatttgcccacctcggcctcccaaagtgctgggattacaagtgtgagccaccacacctggcctacaaactcaaatatcttaaaatatttcatttcattttaggactctaggtacacagaattgggttaaccatactccttgttccaaatgtactctcatcgttggtttatgcatggatctcattcacctgtggatttgaaataatacaataaatacccatgaactcaccgctagaactacacgtgcctccccaccccctgagtccatctacttgctcctgctccttcctcatgactccccctacccctcctcccagtttctttttagatttttaagttgtctggattaacagacaccacgtttttgaacacttacataattcgtatacattatagttaatgtgttgcttcacgacagatacacattgtgagaaatgcgtccttaggtgatttcatcatgcaaacatcatagagtgtacttayacaartctagatgctgtagcctactttacacctgggatttatggggtagcctattgctcctaggctataaacctgtacagcatgttactgcattggatactgtaggcagctgtaacacagtggtaagtatttgtgtatctaaacatagaaaaggcacagtaaagatacagtataaaagataaaaaacagtacacctgtctagggcacttgctatgaatggagcttacaggactgaaagtggctcagggcgagtcagtgagtgagtggcgtgtgaatgtgaaagcctaggacacaacagtcactactttagactttataaacactgtacacttaggctacactgaatttataacagccttcttcttcgataataaattaatcttagcttactatcatatttttactttataaacttgattttttaaaatttttgattctttcgtaataacagcttaaaacaaacacattgtacagctgtaaaaaatattttctttctatccttattctaaaagcttttttctaagattttatatatttaaaaaaaaattttgtttttaaaattttattcttattttcatttatttatctctacaaatttgtgaacatacaaattgctatgtttcctagactgatctccaactcctggcttcaagcagtcctctcacctcagccctcaccaagcactggaattatagttgtgagccaccatgtccagcctgtttcttactttttaaactttttttgctaaaaactaacgtagaaacacacacattagtctaggctgcccagggtcaggatcatcagtatcactgactttcactgcacatgtgtcctcctggaaggtcttcaygggcagtaacgtgcatggagcagtgaactcctgtgataacaatgccttcccccacagtagctcctgaaggacctgcctcaggctgttacagttaactgttttgttgggttttttttgagacagaatctcactctgctgcccaggctagagttcaatggcactatcttggctcattgcaacctccggccccaggttccagcaattctcctgcctcagcctcccaagtagctgggattacaggtgcctgccaccacacctggctaatttttatatttttagcagagatgaggtttcacatggtggccagactggtctcaaacccttgacctcaagtgatccccccgcctcggcctcccaaagtgctgggattacaggcatgaggcaccacacccagctgttttttttgttttgttttgttttgttttgtttttttaataagtagaaggagtacactctaaaataatagaaaacatagaaaacacataaaccagtaacagttgtttattatcaggtactgtgtactgtatgtaattgtctgtgctatacttttttttctttttttgagactgagtcttgctctgtcgcccaggctggagtgcagtggcgcatctcggctcgctgcaagctccacctcccaggttcacgccattctcctgcctcagcctcccaagtagctgggactacaggcgcccgccaccacgcctggttaattttttgtatttttttagtagagacagggtttcaccatgttagccaggatggtctcgatctcctgacctcgtgatctgcctgcctcagcctcccaaagtgctgagattatgggtgtgagccactgcacctggcctatactttttattttattttattttatttttgagatggaatctcgctctgtcgccaggctggagtgcagtggtgtgatagctcactgcaacctctgcctcccgggttcaagtgattctcctgcctcagcctccctagtagctgggaatacaggcgcgagccaccatgcccggctaatttttgtatttttagtagaggcggggtttcaccatgttgcctaggatggtctcgatctcttgacctcaggtgatccaccctcctcggcctcccaaagtgctgggattacaggcatcagccactgcgtctggccttgtctgtgctatacttttatatgactgacagcccagtaggtttgtgtacaccggcatcaccagaaatacgtgagtactgtgctgtactacaatgtcattagaccatgggaattttttacctccattgtaatcttatgagggacagccatcatatatatggtccatcgttgggcgagacattatgtggtrcatgactgtattaaatttacaaatatggtaarcttgaagttttcttatatattctaatattatatataaatttagtaagatttcaacttaaagccaagatcagactttccaaaatattgcaattatataaaatatcaaatatgttcaggttcctttttagcataaaataatgactgccgtgcttttaatttcctaaattgttaattatatgtctttatggggctaaaagatgtacagcgtcttaaggaacatagttactatattatgtaggatacaggctaagttgtataacagtgggacccagagctacaggggctcaaacaagctagaagttaaatttctctctctgggcagtggttttgctttggaagtccatccagggacccatttttttcctcatcttcttccttggttccttctcctgtcttccctcctctatcctaggtagtggttctctcttgctagagtctggctcccgtgctactccaccagtgtcagcttcatctagccttcagagtgggggaagagagaaggttgggagacaaccagtttcctctttaaaactgtgatccatcttggcatggtggctcccgcctgtggtcccagctacttgagaggctggggtgggaggatcactttaggccagaagtttgaggttgcagtgagctttgattgccattgtattagagtgaaacctcatctctaaaaaattagtaaattaaaaaaaatactgttgtgattcagaaatttcacgtggcgacttctgctcccatttcattgtacagaactttgtcacatagcccccttggtcacttaggtgcagggtagtctgcaaaatgcattccctagctggacagtcatggattcagcagaaactgggagttctgttcttgtaagggagaaagaaaggctagattttgggagataattagcatctctrtcacagctatcatttcagttaactgactttccaaggaagatttaattaagaccttcttgctgaatggtggttacttaattctttttttttttttttttttttttgagacggagtctcactctgtcaccaggctggagtgcagtggcacgatctcagctcactgcaacctccgacttcctggttcaagsaattctcctgcctcagcctcccgggtagttggagttgcaggcctgcaccaccacaaccagctaattttttatttttagtagagacggagtttcaccatgttggccaggatggtctccatctcctgacctcatgatctgcccgccttggcctcccaaagtgctgggattacgggcgtgagccaccgcgctcggccgtggttacttaattcttaattttctggggtaggagaatgccttcccaacaaggaggattgccacagtccagttaactaatttcacttrtgatcagagacatcagtgggtcttgcaaccaggagctagagacgtccagagccattcatgttgaccactctggctgttaccccgagctccattttataaattaggattcaaaacttaaaaagggattgatctcatagctcactgtcttctagccaagttgacagttcccatttgggttgactgcttgatgggattttgcattttggggggttcttatgaatctgtgtgtgtatgttctacctgacttcacagccatttgaatttaacagggtcctaaggtattaaatagaaaaatatattatggaagaaggacatttgaattgatgggatcttwtattttttcacatctttaagactatacaactcttaaagatatttaaaatatctttttgaattttggatatttcaaatggctttgatctgtggtmattctacagattaccaacaacagataaatggatcttaaaattcagttttaaaaaatgtagcattcacatactcatattttcgcttattcattcattaacatttattgaacagctacgtttcacttattttgcttgatgcagtaataccaacaagtgatggcagattcagctcagttttcaatattttctatacttatattagcaattgcatttagtaagaattgttgacccaaagaacttaatacaattctttttttccacaggaaatttgcttatgttccttgtacttgatcaaggcattcattgaaggtttattgagtgcctgktatatgccagattgtgtgctaggtagggttggaggcatgtgttacatggagatgaaagattcattcagagatgacattccctgtttgtaaggagttcacagtgtgggagagcagagagctaagtaaatgaacaattaaaggtcaccatgttaagtactatagaaggcatggatagggattatgggggggacctacttagatgcgtgaggtcaggaaggactttccagggtagatgatgtctgaggtttaaggtaaaaataggtgaaaggaggaaaggacttcccaggtagaacagcatgtgcagatgcacagaaagcatttgcacctggcccctgcacacagctcagtacatttggagtctgcattcacctgagttggggaatggccctagataaggccagagrggaaagcaggggctggaatgttgtgtgggaaattaccytgatatggtggtagcttccaagaacatggccaagcagcctattccagcagtcacagaatagagaggctcataggctgagttaagacgctcgaatcacattgtttatcacatcaattcaaaacatgcagcaagaaataaggggagagttctgggattggttaacacttaggatcaggtgcctatggaatggaagcagcacaayctgaatcctgggccatgcaatgttcatacatggagtcctrtctctctgctgcatcagccttccctgccaatggtgtcagcacaaggactagagctgaagttacacaagggcccagaaggtggaaggtgctttgttggagatatttggatatatatgtctgcaatagctgtggcttaccagagacctgctgggatgctgtgtgtgttttttcatgtgtttctagacagtatataaatggggtcaaaatgggtggccaaattaaggatgatataactgtcaagtggcatagtttgtgtcttactaatatttaagatttgataagattggccctggtcagcctgggcagcayagcaagatgctgtctctacaagaaattaaaaaaaaaaaatttagccaggcatggtagcgtatgcctttggtcccatctacttgggaggctgaggtgggaggattgcttgagcccaggaggtcgaggctgcaatgagtcctgattgcgctattgaactctaggctgggtgacaaagctgtgagaccctgtcttcctctaaaaaaaaaaaagattggttctcccgtgactttctgcctaggactaacactctggttttgtcctttttatctatgttcaatgcacgtatgttccacttattttgtctgtcttgagcgtgtcttacaagcttttgactcactatgagtttcatccatgctattggttttcttgttttctatgtagcagaattgaatatactcaaattggacataatatatacatcaaacaaggcttatatgtgttaaccaggaatttggacttgatcccagggacagtaggctaaaactatttttttttttaaagcagaatgatcagatttgcactttaggaaggtcacaattcaggcagattgcagaagggattggaggggagcaaacctggaacagattgtggccacrtgggaaaakataatgggcttgatgagtgttgggagtaggaacgctgagatagagacatgtccatactggttaggaggtgatggcctgtgggtggatggtgggtcacttgtgcagatggggaatgtagcaggaagggcttagaaggctgttgtcaggaatgcagttttgcacattgtgttaatcagattgctgaagtaacagataagcttagaatcccagtggcttctaacagtgaatcctagtttcttgggtatgttactcatgctcagcaggttcgctgcgctgtttccagctgtgactctgctttgagctctctgctctctacatctctcttgtgcagggtcctgggccaaaggagcatgcccatttagggacatgtcattctcatgcagaaggggaagactaattgctggcacaaacttgttgcagcgcattgaagatggctgcaaattctttcctcctattgagaggyggagtcacttccccctcccttgaatctgaactgaccttagtgatttgtgtgtccattgggatatggtagaagtgacattctgaaaattctcaggccagatcatgagaaaccttggagcctccatctgggcttttggaacatgccatctgggagtccagctcccatactgtgaggaagctcaagctgccctgtggcgagatccacatgaagkagaaggacatgtggctcttcgtggacagccctggctgagctcccagctgacaggcagctccagckcagtgacagaggcatcttgaaagtaggtcatccagccctggtttagtcactctacctgatgccacatggagcagagttaagctgttcctgcccagtcctgtccaaattgagatttgtgagcaaaataaatgattagttttaagccactgaattttggggtggtttgttacacatgagtgggtaactaaaccacttgggatacctcttaaaactcctcttcttcctcagcttacatcagtggaatggggggatgaggtgggaggtaactgtggatgtgaatgcagcacaccttagcaggcctcggcggtgtatcggctgtctacagaacacaataataacattcttctgtgtggcaacaaagatatttattctcataatatttgtattattttctcagttattcagcgagacctgccctttccctgagcatcttgtcagtcatggtttcgcaattcctcttttcagctccatctgggttagttgactatttcagctcctgcttgcagtgactttgtgataactcttacgctgttacttgattttccaatacccttaaaagtgccatagggtatattgtcttttttttttttttttttttttttttgagacagggtctcattctgtcatccaggctggagtgcagtggcatgatcatggctcactgcagcctttacttcctgggctcaatccatcctcccacctaatcttcccaagtagctgggaatacaggygtgtgccaccacacccagctagtcttttgtttttagtagagatggggtttcaccttgttgcccaggctggtcttgaactcctgggcttaagcgatccttcctgcctcggcctccccaagtgctgggattacaggcatgagccactgcatctggcctgtctttttacataatatcaagtgaaagtcaattttgtagctctcctttatcctctctatttccaaacacaaaagacagcaaggatagccaaaagttaaaaataactttttccctttagtcttgtattttcaaattcttttttttttttttttttctagacggagtgtcgttctgtcgtccaggctggagtgcagtggtgtggtctcggctcaccacaacctctgcctactgggttccagtgattctcctgcctcagcatcccgagtagctgggactacaggtgcacgctaccatgcccggctaatttttgtatttttagtagaggcgggggtttcaccatgccatccaggctggtttcgaactcctgacctcgtgatccacctgtctcggcctcccaaagtgctgggattacaggtgtgagccaccgcgcctggccctgtattttcaaattctttacctctgcgtttccagccttgctccatccaatttgttactagagctttttaacaatttcacgttgaattaagatgatttggaagaggagaaacaagagtcagaaaaattagcagcatccgtgatctgactctgggtaccagtgggttgttgagatttctgttccccactcactgcagagctgctgcctgccaatgccccctgttgggcagggccacctgtgctagtttaacctggggtctttcactcccggactgcttcttggatgtgagttttaagttgagcmsagaagatatgccttgcctgctgccatacattgtaacatcaagtcaagagctttagttacttaacagatttctgctggctgctattataggaggaaactcctttgtttagggacagccagggcttccttagctttgatctttgggagtgagccttttgcttgacttcccttctcttttccatgcctttgtttccatctcgaagtgcaaatttaaagtgtcctgtttgcctttatccactggaaggcaaacaccctggaygacgtatcagtgacagcgcggttctgctttgatcggagcacccagcgctgcttgaaggcgtttgcatggtccatggctcatggaccacgctcctagaaaacggaaatgcacttaggtgaggaaacagttggcagagtggagaaacttgatccgggatgtgtggatgtattctttgggctcttccggtccttcctcttcctttgtttatctcctgcctcattcctcttcagaggtgtgtgggaatttcatcattggctccttttacactgccagtgcctgctaccgcagggggctaaatcaatgtttttacagctaaattccgggttgagtctccattggctgagsggttctcctcctcctttgattgctctgaggacaatggtgcctttagcttcccgcgggaggttgccctgttcgtttccctgtttcccacgcaccttcatcccagaagtctgccctgccacggtgttagtttatcttctcatcttcctgaactgacgtcctttcccccattcccaaagctgaaatcaacgaactctctgtcctgaatcaaagatgtcatttctgaaatgtagaactctgctgaaacattgggtgggcctgaccctctaggtgaattctgcttcccttggctgtgtgtctgcgaggaggtgggagaagtaggtggtaaagtggaaggaaagatacaagtagagctaaatgaaaattctggagtttctctttgtccaaatattctacacaggttagtgagttggccataaaggcctgcgtttattcttttcccctcaaasgcaatgtttctcaagtttttttttttcatgattgtttttccgaggagaataattaaattcamgttcactctgagaagagaaatgagctactaaggaataagattttgttgtggggggccggacatggtggctcacacctgtaatcccagcactttgggaggttgaggcaggagggtcgcttgagctcaggagtttgagaccagcttgggcaacatagcgaattctcgtctctacaaaaaatacaaaaattagcccgtcatagtggtgcatgcctgtcgtcccagctactcgggaggctgagttgggaggattgctggagcccaggaagtcgaggctgcaatgagccatgactgcaccactccagcctgggtgataaagtaagaccctgtctcaaaaaaaataaaaataaaaaataaaaaagttgagggataggattgagccttggagggccacaaactgttgtaatgtctaagatttttttcacctccccattccctgccaggttcggtttttgcccactagggatgatgtggtttctcatgaggttacttgctctaaaggactttatattttggaaccataagagcacccttgtggcccaggcactttatggatgatcccttttagtgctcccagtaaccttccaaggtaggtgctcttatctctaccttacagacaggacattgaagcatggggaatttgagtagcttgctcaggtcacacgctcttaaccagrggagccaggattgaagtttgggaagttgggctgactaggctgtgctggaagagtgtagagacaaacaaactgcctggactcttttctttttgttttaaaaaattgagatataattcacatgaaactcacccttgaaaaacaattcagtagtttttagtatattcacaaagttgtgcaatcattagcattatctaattctaaaacattttcagcacaccagaaagaaaccacacacttgtcagcattcactgtctgctccctgacacctcagctcctggcaaccgcgaatctactttctgactctagatttgtctattttagatacttcatgtaaatagcctcatagaatatgggacctttagttgttggcttctttcacttaatgtaatgtattcgagattcgtccacgttgtaacatgcatcagtagttcattctcattcctttttatggttgaataatagtcctctgtatagmtatatacattttatttatctgttcatctgttgatggacatttgggttgtttctaccttttggctattgtgaataatgctgctgtgaacatctgcatacaagctttatatgtgggcatatttttttttcctgaatgatgaaaaatggccatgaaagtatttttttagttgtatatatttatggggtacaacatatgatgtggttttttctttgagacaaaaaaaaaccaaaaaaaaacctgtagtcaccatgacgtacagtagatcttcagaacttattcatggaaggattttaagcagaggaatagtgcaacatttttatttttttgagatagagtctcgctctgttgcccaggctggagtgcagtggtgtgatcttggctcactgcaagytccgcttcctgggttcacgccattctcctgcctcagcctcctgagtagttgggactacaggcgcctgtcaccatgcctggctaattttttgtatttttagtagagacagggtttcaccgttaactaggatggtctcgatctcctgacctcgtgatccacccgcctcagcctcccaaagtgttaggattacaggcgtgagccaccgtgccaggccaaggaatagtgcaacatttttaaaggaataataacattaccctggtgactacgtgaagaacgtcttggggagagccaaaatgaatgaagggagcttgacgaggtcattcaagtatgatgatggagggaggtgacccaaaaacaggatttagaaacataagccaactgtcsacttagtgatgctgactaaatctcattagctgaacaaatggaacaacaacaacaattaaaaaaccaaaaccaaaatcaaaacraagaagcaggaaaaaaaataaagaaattgtccttactagttttgttgtatattaatttttaattgaggtataatttatataaaataaaatgcacagattttagatgcacagttctgtgtgttttgatgaatttatacacctaggtaactgcctaggtcattaagacatgaaacattaccatcaccccaatgcatttgtcttgcgcctctttctattcaattctttctacttgggccacgaatctttttgacatggtaaattagtttctcctgttctaggaattcatagaaatggaattatacagcatgtatcctttggcatcttttttctccactcaacataatgtttttgaaatccatccatgttgtgcatatctcaagtttgtttcttcctgctgaaaagtattcttttgtatgagaatcatcataaaccattacaatatgtgaccttttgtgtctgatgtctctattttgtagagatgaggaaccaaaagaattaaaatggaagcttggagaatgaacttgggattctgaagtgtctagaagcmgtatatgttcagatcttggcagcagccaaaatgaactattttggggccactggggtggtctatagggtccctaccactggggcctaagtttagttggaatgagggtgcctgatgatctgtgtaaactctaggatgggcctcatttggggatgtgggtagtgtgtccatatttccctgagaaggattggtcttgagtctaccctcagattttttttttttttttagacagggtctcactctgttgcccaggctggagtgtagtggcatgatcacagctcactgcagcctcaacttcccaggctcaagcgatcatcccacctcagcctcctgagtagcggggactacaggtgcccatcaacacacctggctcctggctattttttgtagtttttcatagagacagggttttgccatgttgcccaggttggtcttgaattcctgatccttctgcctcagccccgcaaagtgctgggatttacaggagtgagccaccgcacccagcctcattctcagatatttgctgttgttgagcttcttgtttttgccaaatatgcttgcatttggctttcttgagttttgctccaaggtttttgagccaaacctacagtacttttggatctatttccattttggagaccatatctttctgaaggctggggtttgggtatacgttcttattgaacaagttcagatcttccagttgtttctcagtgaacgtagtttgtttcttttgtgaaggcctctggggcttgcctttgggaagatcctctgagcctmatctagatgtgttcgtatgttcaggtccagttatcttaggtatatactggggagtagaattactagatcatatggtaactctatgtttaactctttgaggaactcccaaagtcttccaaggcagctgcagcaccttaatttctaccagcagtgtattagagttccagtttttccttgtccttgttggtatcttttttgattccagccatcctagtgggtatgactttgtgtctcactgtggttttgagatgcatttccttcgtgactgatgttgagcagtgtttcttgtgcttattgggcgtttgtatattttcttttctttctttttttttttaagatggagtctcgctctgtcgcccaggctggcgtgcagtggtgcaatcttggctcactgcaagctctgcctccggggttcacgccattctcctgcctcagcctccctagtagctgggactacaggtgcctttgccgggtgccttacatcctttgcccatttttaaattggattgtctttttattgttgagttgtaggagttcttatatgatttgccaatactttctcctatttttctgtgttgtctttgcattttcttgatatcttttgaagcacaagaatgtttgatgaagttcaatttatctatttcttcttttgttgcttctgtttttggtgtcttatctaagaagtcattggttgatcaaaagtcatgacaatttatgcctgtgttttycttctctgaattttgtagttttagctcttatattgaggtctttgatccagtttgagttaatttttgtacgtggtttgcatgatgtgaggaagaggtttatcctcattctttttttttttttttttttttttttttttgagacggagtcttgctctgtcgcccaggctggactgcaatggcgcaatctcagctcaccacaacctccacctctcaggtgggattgcaggcgtgagcctccgagcctggccagtttctcctttttctaaaagaggtctttaacgcttctctatctgtggtttttttctttttctgtatcaatttaatgcaaatctgagtcttttaaagtttaataggttttttttgagactgtcgccaggctggagtgcccaggctggagtgccaggctggagtgttggctcactgcaacctctgcctcctgagttgaagcaattctcctagcttcagcctcctgagtagctgggattacaggtgcctgctcccacctagctaaattttgtatttttttttttgagacagtttcgctctcattgcccaggctggagtgcaatggtgcgatctcggctcactgcaacctctgcctcccgggttcaagtggttcttctgccttagcctcctgagtagctgggattacaggcacccgccagcacgcccagctaattttttgtattttttagtagagacaaggtttcactatgttggccaagctggtctcgagctcctgacctcaggcagtccacctgccttggcctcccaaagggctgtggttacaggcgtgagacaccgcgcccagccaatttttgtatttttagtrgagatggggtttcaccatgttggtcaggctggtctcaaactcctggtggtctacctgcctcggcctcccaaagtgttgggattacaggcatgagccaccatgcccagcctatgttcattcttttacacgtcagtatgtagttgtaccagtaccattcgttgaaaagactattatttccttattgagttgtcttggcacccttgtccaaattcagttgtccatgaatctgtttatttctatactgtcagctctgttctcttggtctatatgtgttagtctgttttcacactgctagaaagaactgcccaagactgggtaatttttaaaggaaagaggtttaattgactcacagttcttcatggctggagaagcctcaggaaatttaccatcatggcagaaggcaaagggggaagcaaggtatgtcttacatggtggcaggtgagagacagagacagagaggaaactaccaaacactttattgattgattgattgagacagagtcttgctctttcacccaggctggagtgcaatggcatgatctcggcttactgcaacctccaactcctgggtttaagcgattctcctgcctcagcctcctgaatagctgggattataggcacccacaacaacgcctggctaatttttgtgtttttagtagagacggggttttaccatgttgcccaggctagtcatgaactcctgagctcaggtgatttgcccaccttggcctcccaaaatgctgggattacaggtatgaaccaccgcgcccagcccaaacacttcaaaagtatcagatctcatgagaactcactatcacgagaacagcatgggggaaactgcccccaggatcctgtcacctcccaccaggtccgtcccttgacacatggggattacagttcgagatgaaatttgggtggggacccagccaaaccatatctctatatgtctatgcttatgccagttggacgatgacttttgaaacccaagttgcttggatgagcaaggaccctgggggcagaagtggcgtgtcttgcaggaatacccctttcctctgtaggttcaggatttatcccacacttggcctggaagttcactattatctagtctgttcttccagacttttaaggtaatgctttattcatttattttatctagcatttaaaaaatagtttttaggaggagttagttctaaaatcctagcccaccaatatctaaaatagaattcaagcccagtgtggtggcccgagcctgttgtcccagctactcgggaggctgaggcgggagaattactcaaggccaggagttcaagaccagcctgggtgatagagcgagtactcatctcaaaaaataaataaatacaaataaataaaaatggaataaaaaattatttatctataattatgaaattcggggcagtgtgtccctgagaaggtatctttaggaagtagagcaatcgttcatggcatcttagaaaaagactgtgctgctcactgctgcttttaaagccacatttgtgacagctaataaaagcagctgtcggtaattgagtactttattccagtcaatctaagctttttactgggggcattacgtatactctttgatctcatgaacacaaccaacctttaaattatatttatttatttatgtttttgagatggagtcttgctctgtcacccaggctggagtgcagtggcacgatctcagctcactgcaacctctgcctcttgggttcaagcgattctcctgcctcagccccccgagtagctgggactacaggtgtgcgacaccacgcccggctaatttttgtatttttagtagagtattcttgttttacaaattaggatgctgtgagggtcggaagcttgcccgaggacagacagtgatgattagttgcctttgactcggcctcagacccctgactgcagcgccgggctcttcacctcacaggctgtcttctccatgggaaccctcagagagagcatgggtgttccaggccccagtgtcacrgtcttctgtagtaagaactggaaggctaagccgggtgttttgcctgctctctttctccctgtcccccttgtggtaggaacgtgaacctccttacagggaggaactgtctggagagtctttttggattgttctcacagttcgagtgcaggaaccccaggggaagcatgttttaaatcctgattcctggacttcaactccagaaagtccagtgcaccagatagggagggagttgtgctcgggactctgaaggtctcatgtgctccctgggaggtcagttgcacttggtctcggaccacactttgagaaaagcgggtccacaggttacattgaaagtaactgggtattgtggacttcttgttctctcctcttctctgtttttaaagggcagcatggtgtttttccagtgtctggggaatgtccctttatcttttaattccttaaaaaggtggagacttcagttacttttaaatgagagagttatatttagtgtttcgtaagcactgttgtcaggtagagatgagaatgctgaattcaaaacaactctgatattagtaaaatgtaatatccagtaatttgttattaatgactgtaatttagtggtaggagcctcaagggaaaaataaagtatgtggttattttagagaagaaaaatctcaacctgtcttttcccacctcctccctctcctgctttttctcagattgtcaagtggtcagactgttgtttgccattagcttgcagacctggggatccttatcggctaattgctgaagcaagtgtggacaacttcagcaagctgggggtggcgttcatggaagatagactccacatggataatggactggtaccccaaaagattgtgtgtaagtaactttagaaaatgtttttattggccaggcatagtggctcatgcctgtaatcccagcactttggaaggccgaggcaggaggatcgcttggagcccaggagttcgagaccagcctgagcagcatagacccctatctccaaaaaaacaaacaaacaaaaaaattagctgggtgtggtggtgcatgcctgtggtcccggctacttgggaggctgagatgggaggatcacttgagctgggaggttgaggccacagtgagccatgatcacgccactgcattcccatgtgggtgacaaagtgagaccctgtttttatcatagtgggacactataagttattagcttaaggactgttgagcactcttactggtatgacataaaggctatgcttggtttcagtttaattcagtccacaggtttgattttactgtaataatatacaattcatgcatgtgtcaagatttttttggggggctgcagggtacattttcagtgcttattaaatttcttaaacaagaagttttcatgactgcattgctcatgaggtggcattcaaattcagaacccatataatatttatttcacatagtttaatacagtataactagtgtctagactacagttctgattgagtgggaagcatagctagtgttactatgaagttctaaatcaaaccgctttttacttaaaatatatgtatcacaatttcttgggacaaatcgtttttcaggaaacacacaaactgttcttccttaattagacttaaaagcaggctttttatgtctatgaatgtcttctttcatctgatgggcaaataaatgtcccttatcagctttggaagtttatgtaaatcccttaatatccagaatcacctcgtacatgtctctaataccatgtccgacatgtagcaagtgctcaataaatgtttttgaattagtgattgtcaacttatgttccagtcctgagacaagatactgggaagaatcttctcccattgatcctatggcatgtcttgagagtgacatttcactggggcgtgctggggtagactctagatatgtgtcctttttattgctcagtttcattattgtgaaggagaataacacccaagaaatagaatctgtaagtaaggaggcaaaggcacctctctgaatctcactttcttcaccattccgtaagagggtcttaggttctccaataggtataaaagatgttgggcaaactgctgatttcacttggggtcttcaggtgggaacaattagtgtttccaaaggatgcccccgagttgaggggggatgcaggtgggagccgtgccagaggctgtcctggaatgtaagtcccagaatgcagagagggtgrtgagattcttgagatgagctatgtgtcatacaagaagtgttgattaattttctgtctctctctcctattcatgccttagcggtgcacttgcaggactccactctgaaggaagttaaggatcaggtctcaaacaagcaagcccagatcctagakccgaagcctgaaccttctcttgagattaagcctgagcaggacggtatggagcatgttggcagagatgacccaaaggctcttggtgaagaacccaaacaaaggagaggcagtgcctctgggagtgagcctgctggggacagtgacaggggagggggcccyrttgagcattatcacctccatctgtctagttgccacgagtgtctggaacttgagaacagcaccattgagtcagtcaagtttgcgtctgccgagaacattccagaccttccctacgattatagcagcagtttggagagtgttgctgatgagacctcccccgaaagagaagggaggagagtcaacctcacgggaaaggcacccaacatcctcctctatgtgggctccgactcccaggaagccctcggccggttccacgaggtccsgtctgtgctggccgactgtgtggacattgacagttatattctctaccacctgctggaggacagtgctctcagagacccgtggacggacaactgtctgckgttggtcattgctaccagggagtccattcccgaagacctgtaccagaagttcatggcctatcyttctcagggagggaaggtgttgggcctgtcttcatccttcacctttggtggctttcaggtgacaagcaagggtgcactgcacaagacagtccagaacttggttttctccaaggctgaccagagygaggtgaagctcagcgtcttgagcagtggctgcaggtaccaggaaggccccgtccggctcagccccggcaggctccagggccacctggagaatgaggacaaggacaggatgattgtgcatgtgccttttggaactcrcgggggagaagctgttctttgccaggtactcagggcagcatggatttggtgatctttgggtatctgtgggtatttttgcgagggaatatgtcttttaaaggtacacgcttaaaagtttcaggagttcgtgtgctgcgggctgtttttgactattggctgggagcttttgctgatagtgagcagaaagtttagtttagttcagggctttcttgaataccctgrttaaccaaaagacttgtgagggaggaacaaggcagctgtcagggttaaatgagcttgctggttaactgaggcttagtcagaaaattctcgttttgttctttactagtaatgatctttctcaaattcatcggtctgctttcttgccttagagcaccccttggttaatataattgagtctttatttaaggtaggaagttgaaaccatcagggtagtgattctagacgtcagtgaccactgcgatgaaatactgcagttgattgccaaggtagttggtgttgaaaacatcttcaggttcccaattcctttcttatgttttgtcactcttccaagtgctgaaaagaaaaacttcaaataagagaatattgaagctacttagatttgtggcrtactaatacataggtagggggaaaatggaaagaggatgaaaggaaaatgctagtttctttttcttgcgtaggagatcctttggctcatcttctttttccttttagctttttgtttgtttaagcaaacggtagcggataaactatttcagaattccttgtcattgactccaaatcttttaatccttaggggaaaaggttttcattagagttagatgaacattcacttgccctaaaggatttgatgctctaatgagaaaactacgcagatgtagatattttgtccagaagagttcccaagataagtgtaatcgattttgttttattatagggatctttttattgagatagagaattgtttccttttttgttttgttttcattttgtaatgccttgtctttttccagttctcctggaagctaagtttcttgaattttctggccaaacatttttttccagagtatatatttgtttctttactattctaaagccgactcacttgttcttaagataatactcaagcagagatgcttaaaattaaggaatttggacattaggacagatgaacacgtacagcccaagcaggtttcctgcagtgctgcaggccacatgaattagcttttggaggcrtaataaatgttcctcttatctttttctctgcaaatattgtaactatagtaactgcatattctcagaaaatccacttaaaaacccgacttcctagagccatatttcagttttgaagagtgaattttaccacccctgagcacagacttgtactagaaaattgatttggcactgttgtgatccatttctccgagttacatagcaaatctgcttgctgcaccatttaaattgaccccattactatcataaaatttgatactgcagtgcattgccctagaaaaaaaaggcaatatgatgcagcttcacaaatcagattcagaggattagaatgtcatttttgattttaaatgacttccagtcttctgtgtgacagggtcactgttttctccacaggcctgtgtctctgtgataccttactgagatcaaaaaataaatattatcacaggctggttagtttcctctttccctgttcaatttcatagtcttcacctttgtaataaatctagtaatgatgtaacccaataagaggaggtaaagtatttcaagggcagaacacagctgcaccctaggcactggtgtcccagccragtaagctgcagatttgatgcctttgccattcataataataaagaaagagaggaaatgtttgtatgctcgctgtactgatcaagtttgcagggaaaacttaaggctgtggattaatgctgacatttgactgtcaaatggaccaggaatttgccatgaagttgtccacagaaaatctttaaaagggattttaaaagattttgttttcttgtttagcttagcacatggcagcagtgggtcgcctttgatgacagagtttctcaaccatggcactattgacattttgggtcagagaattcttcgtggcaacaacagtcttgtgcattttcggctgcggaatagcatccctggtctctccccactggatgccagtatcaccctctccacgcatttgtggctggagacatttttttagttccggttttcggtccaactaaaaagtcttatttttacaagaagccaagttacagaaatagacctgtcattatggtaacagggttacactcagagaatgagattctagtccagtacctctgtggacgaggagtacaaatctaccacccacacactccggtgtgccatttctccctgctaattgggagcgtagaaccagaggtggcctcttttcttgtttccattgtagaagcacctacatcttgaaaccctaagacagtgaagccaagcagttctcggggtttcagcggccatcttcccccttgtctccaggaactccgcccgcttgtagcgccatcctgttttccgtcctggcatcgttctcatgtgaaaacgagttcatacaattcactgcgtgtgcrtcttggctactctgtgtattcaccctgaccagtgagtccacatgcattcagtcgagcacccctctcatcccttcggctctagtgggaacagaacttgacttatttcatttctgccacctgtaagggttaatctccgggatagccgtgtgctcaagtgaattaaacgggtctcgccgctatgctgtttgtctatactggcatggctttgtccaccggagaggagaggtacacatttagggtagaagtgcactgagtaggatacagattgtttttttttttttttttttttgagacggagtttcattcttactgcctaggatggagtgcagtggtacgatctcggctcactgcaacctctgcttcccgggttcaagtgattctcctgcctcagcctcccaagtaactgggattacaagcatgcgctatcaggcccggctaattttttttgtatttttagtagagacggtttcaccatgttggtcaggctggtttcgaactcctgacatcaggtgaggatatggattctttagagggttttgcttttctgcctcttcccctctccagggctgtctacaaacaggcccacctgacctgttgtcccatgattggcatcctcagtcttggaggaagcagccagcctgcagccaatcagctgtggtttggggaccatgttggacggtgccctgcagaccttttctgattggcctcaacctttatttttttgagccggagtctcactctgtcacccaggctggagtgcactggcaccatctcagctcactgcaacctctgcctcccaggttcaagtgattcttgtgcctcagcctctcaagtaactgggattacaggcgtgcgccaccatgcctggctgatttttgtatttttagtggcagtggggtttcaccatgttgtccaggctggtctcaaactcctggcctcaaatgatcctcccgcctcggcctgccaaagtgctgggattataggcgtgagccaccacacccagctaagcctcaacttctaacatttggttagtatatttggcttggttaaggtaggaattgagagattctaagtcgcctgaaagctggcattatgctttttattttcataatacttctataatatcaggctagaagctttgcatacagtaggcaaagctgaaacaaaataaggcagacgagctcagtttgcttttctgggtactcagtgttctggcaacctccaggcttcaatgctcatttaaaatctgatctcaggggagctagaggttccagtaagttccttcatacccagacaaaggctgctgataggtggagatattttaattttaactagacaacaaagcctgaagtaactaggtgaagttccaaatcttaaaattcaatcaggggaaggagggtgggaggaaaggcctttctggtgtccaagaaatcgtatgccttcctcagtaagtcctcacttaaagttgttgatagattcttggaaactgcacccttaagtgaaatgacaaacaatgaaaccaatgttaccataggctaattgatataaacaagaagtcagttcccatagtgtatttctggtcacaaagacatcaccagacttctaaataaaggccaaaacactgaaacactgaaataaatatgaattatatgtacatttaagaaagattaataaaaacaaagataattatttacctgattatttcagttcagcatggtgggtggccgcgtggctggarctcatccaggaagctcagggtactactggtkggggagtcagccctggccaggatgccctcccatcacagggcacactcacacccgtactcacacttgctcagatcaggaccatgtagacgcatcggttcacctaatgtgcacagcttggggatgtggggggaaaacggagaaacagagaaaacccgtgcagacatggggagagcgtacggacccacagacagtggccccggctgggaagtgatttctttttcccctcatcaacatcataacaaaatgactttgagtgaaacaacattattcaaggacctgctgttttgaattcctgcaaactctctctctcttttttttttytttttaaatggtcgcactttgttgcccaggctggagtgcagtggcacgatcatggctgactgcagcctcaacctcctgggttcaagggatcctcccagctcagcctcccaagtagttgggactacagccgcaccacccacgcctggctaatttttgtattttttgtagagacagggtttcactatgttgtccaggctggtctgaaactcctaggctcaagcaatcctcccatcttggtcttccaaagtgttgggattacaggtgtgagcctttatacccagcctcctgcaaacgctcttaaaatgatgaataacgctgctctcttcctaggtattgttttccagttatggctaataggcaaaatggaagtttccagcatgacccatttgcctccctgaactcactagcaattaggttttcagcataactgtctttctaggtctttttttttttttttttttttttttgcgatggagtttcactcttgttgcccaggttggagtgcaatggagctatctcagctcaccgcaacttccgcctcctgggttcaagcgattctcctgcctcaacttcccgagtagctgggattacaggytcatgcaaccacgcctggctaattttgtatttttagtagagacagggtttctccatgttggtcaggctggtcttgaactcccgacctcaggtgatctgcccgccttggcttcccaaagtgctgggattacaggcgtgagccaccgctcccggccctagatattttgttcctataatcaagttaagtaacttgcggaaggtcatatgactgatgagtgtggaacatcagtacctggagagagatgatgactgtccagggtcatttccaccgtggcctctcagcctgacaaccaaaatttgagtaggctctttggaatcgttcttttgttggccatgactttccagatatacagcttcagagtttatatgctattgataattagaaaaattcatgttcaagttttctcttgtgggttatactgtgtcccttaattttcagaggagagcaaagctatgagctatctgggtgtgatgtgctcacttggagaagaaaactggtaaagaaattttttggccagatgtggtggctcatacatgtaatcccagcactttgggaggctgaggtgggaggattgtttgagcccaggagttcaagaccagcctgggcaacataatgagatcctgtctctaaatttaaaaaaaaaaagaaaaagaaraaagaaactgtttttctcattgcctgtgagtrccctcagtttacatagtgctatctttccccttcaggtgcacttagaactacctcccagctccaacatagtgcaaactccagaagattttaacttgctcaagtcaagcaattttagaagmtacgaagwccttagagagattctgacaacccttggcctcagctgtgacatgaaacaagttcctgccttaactcctctttacttgctgtcagctgcggaggtgagttgtgggctcagctgggcagagcgcgctgtgacgtggccctcttcacagtggcgacccgttgctttaattgttttattttggttggttttgattttccatttctgttttgacttcgggtttggaaatcatcttcaagatgtgcaaatattcattttgttgggggaggattatatataagagagggccaactagtagagtttagaaaggtgttaagtctgcaggtgtggccctttccacgttagggggaagagggtccctgtgtcaagagtatattcagactgtaactttattcatttgggattgaaaacatttgttttgayttgagccactttcagcaaatctttggaacaatcacatttgtgctaatgtctgccatcttgtggcaacagcgctctgggtttcacgtctgtgagtcrtgtctgacaggaaaatgcccacggagctgggaatgtgttcgggaattctcttggcccatgcctgcacttgctgcctgtgattgatacctggttttgggcaggtcgccagattctccaggtgtaggttcttgctaatccccctgcttggccatactatcagtttcatagtcattgtgacaaattattttgtctatttctgttgtcttctctgaacagacaaatttgtgagttgaatgacataaccatgtagtttctgcaaacacccaatagtctaggtgactttaaacactaaacttacctactttctcttgaaacaaacaaattatacctctcatcccaacattttttaaaaaggaggcactttcttttgtgttacactgtgtcccttagtttttggaggagagcagagctatgagctatctgggtgtgatgggctcacttggagaagacagatagaaaatctgagagcactgccagtcccctagaccttctctgtcgccttttcctggggatggagggctggggctggctaccttagccagtgcctgctctgaggctcccagctggggaagtccgggagtgaggtggcctggccttgcccttggcagagctccctgccctttctcggagttctgatcatgctggtcttcggacttgacctccggactcttggacagagtagtggataggaagagtggccctgccccaggttattctcttgtgagtggaagtttggaactcttggcatttctggtgtatttaggatgagtataacctgaaatacccatgtcagggctttgtatcatgtgtctgcttatattcaagcacacaacagatgcttcacatttttgtccttccagttttttaaacagcctggggcagtgggaggtgatactttttcacctgttcattgatcaattgagggagtattgatttcccctttcacaaactttgggaatgaaatgcttgaacatgattaaagcaaatatttgctctgtatacacatacatggacactccctactaagccccttattacataataactttggaaaataattattttcagaaatgttcacttcccattgcgggccctccacttggccttgttgattttcttggatatctgtgctgtggactactttcctctcagctgcttatttctgactgaattctgctttactttgggagcccaaggaatggaatgagtacgtgtatgttgtacatatcctcatttcttaatgtttatttttagtttttgaggcagggtcttgctctgttgcccaggctggagtgtagtggtgcaatcatggctcactgcagcctccacctcccaagctcaagcgatcctcccacctcagccccccgagtagctgggactacaggtgtgcatcaccatgcctggctaatttttaatactttttgtagagacagggtttcgccatgttgcccaggctggtcttgaactcccgagttcaagcaatctgcctgccttggctttccaaagtgttgggattacaggcatggcgctcccggcctcttaatgtttattaactctgcttaggtgtccttgaatctgctgtagaaggaaatggcagaagtcaaggttttatatgatgttttcttggaatacaagttctctaaaggattatagtgcaaatgaatttgaaggtggatatgcactgcctgaggtggtctttccggaggcagctgaattcctcctgcatctagtcactgtgctatgggtcagtatttatagatctgsaccacagagactgggaatggaattgggtttgtgctttgtatttggttttctttctggcatccctacttaacagatctcagtcatcctcacggaattaagttccatggagaggatcttggcacccagtcatctgctaaatcctgccygtccatttggctcatcgcctgccttagggattggatgcctgggctggctttctgcttcctgtgccctgcaagacactctgttgctgggagtcaaagatctctcaccacagggtgtcgctgctgagctaggctgcctcgcatacaggaccctagaactataaagttgttcttcagagatttaatttttttctgtctatatcagtttcacatagtataattttatagttttccattatattggtggcactttcttttgggtctgcagaaattatttcaatgtcccagttaataatattcatctttcattcaacgtttactgtgtcctaggtactattatagtatgggatatgaaagaacaaaataaatatgctagttatctaaatagttttactgcgtaccagctgtgtttacacagtttggtgccttgacacttgctctttatgacgaatagcgcagaagatttatgtgcttctccgttactgtgatataactggaaagaatagyagcaagacccaaagagaaaaaacactcgcctcagcgacggtcagcccttggcatttgggaaggatgtgctcggagaccttcatcgacacccagacaccatggtagcgtgtgattcccactataaaacccagtcatgtgtggctccatcagtgtcactgtgcacgataccaagaggaagcagggcttggctgagatgcaggctgtgggcggctgagctgggcttcctccgaccaaggctttcacgtttaattgaacctcccaggagcaggattgaaatttgggtctcagcaaaatgacaaaaagttaaaccataaaacaaacacacaaacacacgtttaccacacacctatctccgtagaaagaagactgggccaggtgcagtggctcaagcctgtaatcccaatgccttgggaggctgaggcaggtggatcgctcaagcccaggaattcgagaccagcctgggcaacctggcagaatttcgtattctttacagaagatacaaaaattagccaggcatggtggcgcatacctgtagtcccagctactcgggaggctgaggcaggaggattgcctgagccagggaggttgaggctgtagtgagctatgattgtgccactgcactccagcctgggcaacagagtgagaccctgtctcaaaaaaaaaaaaaaaaaaaggaaacaagactggaaggaaatctgktatatatgggacttatttgtggtggagtgcttaagggtgattttaataatcttttaaaactttctctgtattttccaaattttctataatgattatatatataataagccaaattagttattagttattttataatgagccaaattggttatttgttatgagttattttataatgagccaaattagttattaaaaactaaaaacaaatgactgcgtgtcattggactttgaaggcatctcacacatggtcacacttgaatgttaaaaggcagggaatctcataggtgttgatactttggttaatattaatatttgacatattatttagaaagggttcgctctgatagtaaaacacgtgactcttgttcatggcctgtggcagctgtgacttccaggkttaactgtgagctctgagttggtgtgtgggggcctccgagctgaagctgtccctttgcttctgtgggtggaaggtacccctgggtgccctacccctgcttggatgttccagtttcttggcagagccctttgaactgtttctccaagaccatatatatggggacctctccatggcttcctctctgcagatgttggtgggtgagagactgatacaccacatggctcactgtggggtgtcckgggtgcgatcacctggtggccaccacatcttcycgccaccagtgggtgacaggcartcagcagcaatacatctttactgtgctgggacatgaatgtttttgagaaacactgattttatagaagaaacataatcctttcccttacagaacaccagaaaaaacataattcttttatattttatagaaacattttaatagattttattttctatcgaatctgatgttctagagaaaatgtaattctttcccagttgagaagctagctgccttgtttctgtttctctgggttccattttcctttttatctctgccagagcaatggcagaaagaaagcacaggctgccacgctctgcagggtctcactgggaggggcagctggcgggttaggaccggctgggacctgaatctgtgtgtggggcagagccagccccccaccctccacccctgcagagttgcctgccagtggaccccttttggtccccccagtgagtccagaggaagcagaagaaggtgggatgtgccacccctaggaaggtcggcacctttaccttggggaactggacgtgctgcccccaggaaggtcggcacctttaccttggggaactagagagcttgtgcattgctcccgtagcctgggacatctgcttaggatctggggagcacaagaatttttccaaaatgaaaaagcttgggaaccttgtgggtgttcatcgtggccaacggtggctaayagtgtgtaggtgacctgagaaacacaagccggctggactcttagcaggggtcctgtgtccagctgggatcaagatgtagctgtcacaagaagtgacaactgrgtttgttactgaaatgatcgggcaaaatcaccatgaggtgtgtttgtgtgattttggtagtggggagttatggaatgggtaatacgtacttaaaaacagaaactagttatgacatttcattttgatttaaccccaaatttttactgtgaaactttttccccccataaaaagcaggttttgttggtaaggatagtttagatacttgtaaacatatcaaaaaacgggtacaggcccttctactccgggaagtcctttatgttacttttttttaaattgtatatatttaaggtatgcagcatgatgatttgatatacatgaacatactgagatggagctgcttttcagacgttgatagctttatgaagaaacttagactcagtcatacataccacacagttgttcctccttctctaactggccccttcatgtagcaaacatctgtgtgcctactaagtacaagcccttgctgcagaagtttctggaaaacgagggataattcctcgtctttgtggcatgcgttctagttaaccaagcttttttacctgtgtcgccatctcatttgggtctcayagtgaccctgataagtagggcagggcggggaaggagtccttgcccccgggagaggaagctggcgtacaggacagtgaagaggcttatgtatttttcgtttctgttgtttttctttttgagatggagtcttgctcttgtcgcctaggctggagtgcagtggtgcaatctctgctcactgcagcctctgcttcctgggttcaagcgattctcctgcctcagcctcccaagtagctggggttacaggtgcccatcaccatgcctggctaatttttgtatttttagtagagacagggtttcaccatgttagtcaggctggtctcaaactcctgacctcaggtsatccacctgcctcagccccgcaaagtgctgggattacaggcrtgagccactgcacctggcttaatgtatttttctaatgagttaattagaattctccactaaaaaaaatctttgcctgccattttttaacatagtacttgatgtggagtcctccccttctcctatttttaatcctagttctgagtctcgaatgtatagatagggcgaagctttgggcataactttaaaatacagcttaaaaataatttttagagatccaaattagagaggaagtcagaattccaggtgcaccttgaatagcttttgacatgtggctgctgtggtcttgtgyggctgttttacaatacggcaccggctaaaggcagctagcagattaaagcaaacatttaaaagcttttatagctatgaatgcttttaagggtctttcatatacctctttctctcgtttctttcttccttcgcccttcacctacgctggaaattttttgttcattttgactgacttcctgttatcaaacataatacccatggcaaaaggtgacatgatgggttttgatgttgaattgcaaaagaaatcatacttggggggttttcctgtgctccctttagaatgttttatttttgtgggaagaaggcytttcagctactgtgtgtcctgtctttttacttgaatcttgtttccacaagtgtgcctcaaagcagcgcctgcagagtaaatacccggggcagagatgtgtgcttgtgggaaatctgcacaaacgcttttgttgttttccacgtttaattagttttgtgatgattctggcttctgtgcgttgcggtctttgctgtctggcctggtgaaggggtgataaggtctctgaggccgagggaacattcccgctcagcactttccttcttgggatagcatcccgtctaagaagcgtggttttctttcctccgtctatttatatccaccgtttatgcagtcacaaacttgtggatgggaaacggcctcttttggaataaaaaaaatcctccaagaccacatgctttttgtctcctacccgggcttcctaatagctgccatgtgtgagcgggtatggattctggcctcacctcccrgggaagtcggtggaggctgtctccagaagggcttagaacattctcacacgcggatttttgtctcccagttcaaaaaacacatcccaggaataagcccatactggtgccgggttagagagcatgatcaaagggctcctgtggtcaggtgcagggccaaggaccagagctggcggtgggtgcggcggtggggcgcccggcgatgacggaaccgttgagtctggcgctcccgggccgcggagctggtggtgtcagctcaggaatgtcggggtctgagacccgaatcccatttgataaatgttctccttcagttcttgggatgtgaattatagctggggagcacattttgtttccatgcatgctaatgatttgagaatgccgcctggagatttgcactgactgtcttggaaaaatgtttatagtgtttcgggggtttcaaaactgacaggcagtttgtggacctgagtggtgtttaatcccccatttcccccacctgagtggtaaggggagaaacaacttggggtgcaaggagagcgctcctgtgctggagctcggccgatgctgggcagcaccaggaggattttgcgggcttcctcgtgaaagcaggaagactcagccaaggttagtccgtctgtcggtccctcaggcactttctcctggagataagaagggaagactccttttttctgagagatcttcctaatttgtttgttttgttgtagctgcctgtgtatggctgcgtctccccaggtacagcatgccgagtttggccacacagctatccaggtactaccatgtttccagtacaattctacattatccctctgctggtgtcgtgggtcttttctttcttaaaatgtttttaggctttggtttaataatagaatcagtggaaggaatattggagtttctgttccgtaacatacacatatatcaaagcatcatgtggtataccagaaatgtacatactttttacttgtcaattaaaataaatatttttttctaaaaaggagatattggagttaaagactatgatttcaattctcattgatcattggagctactgtcctttacaaaaaaattctataactcaaattttatttcgtgaattgaggaacgtggctttaatttaaaaaaacagagtcttttaatcgatacttttaagggtatttgagtttttaaaatttcaaccatatgaatacatattatgataatatatatgcatatacatttatatatttatttatttaagtgcatatgtctgttttaaccagaactacagaaaaacttaagattgctgagatagaacgtgcctttgtggagtggtcatttctcccagagagtgagagaagacttagagtagcgggtctggagatttctggtaaaagggaaatgcactttcccttgacacgaggttcacagcacaattttgttgtgtaggtgtttgtgtctctggtgggtctctggcatgtgtgtctgagtgcaggggacaggggctctgggtgaagaggagggctgctttggcactgtgctgctgcgcctccgaggctgagattcagattctaggtgtgagcgaaaggagaacagcgttgcccatcagcagtcagctagatcgctgggtcctgaacatgcgtatcataggaccattgtcagtttcacccaccatgaggctttcctgagccactggtctataaaaacttttagtttaattcaacctgcctcctacatgcattaaggaaaagtttagaaaattaaaattaaagttgaaagtgaatattcttttttctttttctttgagacagagtctcactcttacccaggctggagtgcagtggcacgatctcggctcactgcaacctccacctcccgggttcaagcgattctcctgcctcagcctcctgagtagctggaattataggcacacaccaccacgcccagctagtttttgtatttttagtagagacggggtttcaccatgttggtcaggctggtcttggactcctgaccttgtgatccgcctgcctcggctccccaaagtgctgggattacaggcgtgagccactgtgcccggctgaaagtgaatattcttctcagaaaacttactgagtttgcttttgtatgccctaggtaaacatttggtaagttgctctcttctctgaacaaaaatgaatcctacgtagagtagttcactgaagagtgattgaatgatggcaccactgatccctcttcctgtttttaatttccgtaaataagaaaatacaccttttaaaagaaacatcaaacagtagtttcataaattaaaaaatgatggttaatttgggggtggggggatagccagactctgcctaggattgtctagattacttttcataggcaaccttgatgcatttcaggatttaagtttttctgtagctttttagttmataaaatgctttaaaggtcaaaggtctataattttgaaggttttgctctgtgtattttttccttctgtgatgttggggttaggtgtagtgtctcagattggccaaatgagtttttcttggtagacggctttaaaaawtttttttaattttaatttaataggtacatagtaggtgtatacatttatgggatgcatgagatgctttgatacaggcgtgctgtgcataataatcacatcatataaaatggggtacctatcttctcaagcatttatcctttatattacaaacaaattatattattttagttatttgagcatgtacagttaaattattattaactgtagtcaccctgttgtgctatcaaatactaggtcttattcgttctttttatttatttttattttttgcatccattaaccattcccatctctgccccaccttcccactagggtgggtgtctttttttttttttcttttttcttgagacagggtctcgttctgtcactcaggttggagtgcagtggcatgatcatggctcactgcagccttgaactcctgagctcaggtaatctcccacctcagcctcccaagcagcggggactacaggcacatatcgccatacctggctattttacttttgtgttttgtagagatggagtcttactttttgcccaaactggtctcaaatttctgggctcagacaattcttccgcctcagcttcccaaagtacttggcctcacaggtatgagctaccgtgcctggtgcgtcaccaaattctcatgaccaaacccttctctgttctgttgggagggagggtagacaagatgacctttctcatcctttgcaggactctctgcagtatttatgctggtcttggcaaagcaagtagactaaaaaaaattttttttaactttttaagcagttcctttgaatgcattcttttctaagaatttgtgattattaccattttcatctttatattggaacaagttaaaatcatagatacatcttcacagttaatttcagcacaatgaaataatgttttgctatctgctttatttttatttatttcaggctaattctctaattttactgttaatttaagaattatcaatacactatatagcagcctcaratttacaaagaaattgtgttttcaaaatttgtgtgctaacttgtcttttaacaatttggtccccattatttatgacagttgggttttcctagcatctcacgtatgtcctcttgccccatactgcaattaaaccatgggaaaccgtcttatctgtttctgtgtcacattctggcttgctggagcacgtatgcagtgggaacactttgagcatctctttctacttctccatcgttcaactcaggacataacaaccatatctcggacattgctcaaaaacgttaaattggatacctagcaataccatggcatatgacttaattaatttgcctcggtaggttaatacttctcttatatttaagaaaactttttttctttcaaagtaactgttgaactttacacacaagtaaaagcaaacatttcatagaaaatttcaaatatgcaaaagtaaatataaataatgagtgaattcttctgtactcatcactctctttcacagttatccatttatggccaatcttatttcacttctttctacccacttctctgccagtattatttggaaggaattcccagatactgtttcagttttctcatctgcaaatattttagtatgtgtctctgaaagawgcgagctctgtttaaaaacataatcacaattccaccgtcatacctwaaatgaaacaatctcttcatataatctcatgtccagtcagccttccagtttccaattagacatatttaaagatggactgtagtatctgtgcattgtgtataataagcacatgtgtatgatgagcacgttggtcctgttgcaaaacaaatgtgagagagaaacaactgatgttaacccctgtaacttttagggcaaagttgatttctgtgtccttgttgaatgccacattttagcccccattacaaggccattctgcaaatagcagcaagtcgccaattggaataatatgcagaagaaccctgaatgttgaaatatgggggttttgttccaactcttactctttcagaactaaacatgagttcctcaccctctcttttctgcatgctaagtcctgggtctctttagcagggacggtattgatttttgttctgtatgctttcagctcgggttgatgtttagcctttgacccagccactttcttacaataaacagtttgttgatgagagcagctgctcagcagattgtttccagattgttctctgacagctgaggacagagtgcaccttacgaagaagttggcttgaagctgatggcgtctccttcttaccctctctgcctttgaagccaactgtcagcctctgatcattcctctatttatatccagtgaaatggtgtgaatctgtggcwctagaaatcaggcctcacctacaatcctgaatatttaattttgttctctgaatgaatggttgcagcattttctagaagtttctgccatatggagcaattccttactttgcaggaagaatttccggcactcagtacataggagttagtgtaccatggggtgctatgtaagaaagcagacaggctgggctttattttgttcaggaatctgtgctccttgaatatttaaaggctttctatgcaagtaaggaatgagattactttcaaactgagtatgtattatctgccttgtgacttgagcccttttaaaacagttctctttatttatttttctacttttgaaagagagtacttcattttttttttttttaatgcaagagacagatcatccaatgacttggtgatttacgtggtccaaagtcacaccttcgtttggatttctgcagcttccccagtcacctccagctgttacctagaatggcctgtctgcttgcagcgaccttcattaagaagggaaggtccgagctttcagcatgagagccaacactttttactaaactggccaccagaggctgctgtcagaatggtgaggctgagctcacctccccggaggcaagtttactttttctacaaccagtaaattttgttaagctaccaatcctggtttcaaaactcaggtctcactacacagcctccagtcaccaagcatgcttacggctgtagcccttacagccaggtatgacgtaggaactggacaaaattcaagacctaagattaagacttgtgtgtttttcattcggtgccaataagctgttattaatgcactgattctgcatatactgaacagcttcatgaaacgcactggggtttgtactcggggaaagtgcgccctgcatttgggctgtacaagatctgggtctgtggagggatggctccatgaggatggaaatctgtggtttttcagggaggtgttcttgcctcagaatggttcagcagcccttccccggcaaaggcagcatgaaggcttgttcagatcaaaagctaaaaggtgttcttcattgctgttttgctttttgattctttatgaaggctgtttctttgatgattccacgattaacagcagaacaaaaatctacagatcatgtaggagctggcagggcctttcaagcttctggggaaaatcctttatttctcccccaattttttgttaaaaaaaattggaactgaagaaaaggtaaaagagtcatacaccaaccctataagccctgtggagccttcacccagatttaccactggtgaaccttttgccacattttcctgataaagagggccttttgtttttgttttgaagatgcaaatgttacttcctttaagtaaaccacaaagcccagaccctattgtgggttgtttctaagagtgagaggctttgacatctttgcttccaggagaacggctctagtttctacttggcccggggagtatttgttttatttgaagtaaaagcagtagcctactagtttgtgatggttccgtatggctgtgtatcaccctacagggttgagggggatattccatcttcatatgaaccagcatttataaagcacatgtgtataaagttcttagagtagtaagattttaagttttaaattggtcaggtgcagcggctcatgcccgtaatctcagcacttcgggaggctgaggtgggaggatcgcttgagtccaggtgttgaagaccaggttgggcaacacagcgagactccacctctacaaaagataaaaaaaaaaaaaaaaaaaaaaaaaaattagctaggcatgatggtgtgcacctataatcccagctacttgggaggctgagatgagaggttctcttgagcccgggagttgagtttgtgatcgcgccactgcactccagcctgaggaacatgttgagcaagcaagaccctatctcttaaaagaaaagtcttaaattacagaacataaaaaaatcttacagccggatgctatgaggacagatagttgatcttttatactcaacaaagggattctacccctctgatctaggaaaattccactgatgatcrtgtcacgggtataggatttgaattttttcttgcaatttcctaacccaagtatcgtgacttggaaccttagatctagtcacttccataagattttttttaggtggtttgtataagtgctattgttgtattatttgtataaatatctgttttccccattaaactgtcatgcaagctgatttgaaagcaaggaccatatgttgttaatctttgtatccctttcccagtattttgcttatagtagacatttagtaagcacattttatttggacacttgcaaagtgttttggtttttccccctaatggattgggagctgcttccttggctcctgtgcrccgagagcccccagagaccccagggacaggccggcagtgcacagccctctctgcccgagcggctgcccgcacagtccagctctgtattctgggaaagcaggataaataacctaacaggttgttaggttattcttaacaatcatgttaaacagtttctagaagaatcagctgtgggcatgccggaggaaactggccagatggagtttcagggaaaagttggaattgttttgtgtgttattaaaaacacttttcagtagaaactctgcttttctcctatgaacgaatgcaccttctgagccggagcttcttagaccgtggccttgagtgtgtgggsttagacccgccctctccttgcacacgtagggcagtgttggacgccgctcccctctctcctgccaggcctggccaggtgttattccctgggattctctgaatgttcccaagtgtcatggtgacagccagttggaccagtgaacctttgctaagataaggtcctggagcagaaagctcttggcctcttgatatggggccgcttctctctttccaggtaacatatattttaacataacatgatgttaaaatttcaactgagaattaaacagtggaggctaaacattgaatcttgaagctccgttttaccagagagagatgttctcgttttctcgttagaaaaatgaagaagctgcggtcagcccagggagtgcctcttgcggcctcacagctgatggtggcagagctgagggcaggatcccrtgccagagtcccctgcccccacaagaagcccaggtggggctggcaggtaacaggcaaatagctgaggatggtggggcggggggacatgtcagcatcagaaggaagggaacgtgtgaatggtcacgttggtgtgcatgtcggctaggatgggcacctctgggtgcaccaggcagggctgcctatgggcccccagggctcagccccagcgttttccatgccctccacccccacgctgcctgctctgtcagaagcctgtttgtgttgggctgagacaaatggcgggcgttttccttgggcaggcttaatgaaggccccagagactcctgtgggtgtcggtcccgcacccacgagaccagtgagtggaagttcgcgtctctcattgtggaggcagtggctgagctgccccatagagccgccctcgccgttagagccaaccctggctttctctttggtctctgcacttgcagaatagattccgcytctacagtgagcctgtttggcttggtggaggtgtgatgcctataaaaccagccttrttagaaatgacttattcactccctgcttttactgttctactcaagccttttgtggtcttcgctagttggcaggtaacaaaaaaatgcagtaaatcctgggcctttcagcgtctgagcctgagctatcactttacattataaaaggaagaccgcttaacagacatttattgagtgcctactgtgtcccaggcattggggatctagaaagccctgtggcaagttcagccctggaggaactcatattcctgggggttagatagccaatgacatcaatcctaagtcctttggagttgctgaatcgatttgggctcatcgctagatcaggctgtgtagaagttcatgttgttgctgggactaagtcagagttgtgcagggctggatgtgagaggggacgcataaccagcaagcccacccagccagatgtgctggcccctggaccgttcacctgtcggcccatccctgggctcccgtgctcctaactctggatgtttctcatcactggctgcactggcaggagattgatgggcaggatttgagagaggtcaaggtattaatattatttcccattagcagctccccctcttgctccttcagtcccttgctggttccaagtgctttggcaccccttccttgttcttgggttctcttacctctgcccacagtccttccattacagaacccttgtgaatatgacacctctttcctgcagaaaccagataggggtgaggtcagcagtagctcacttacatgataaaacctttatttctttgtgaaagtgtcctctcacagccttgtctaagtaggcacagctagtgggtggtagcttcaaggttcacattcaagtttctttttttttaagatggagtctttgttgcccaggctggagtgttgcagtggcccaccatctcggctcactgcaaccttcacttcctgggtttaagtgaatcttctgcctcagcttcccaagtagctgggactacaggcacccaccaccatgccctgctaatttttgtatttttagtagagacggagtttcacgatgttggccaggctggtctcaaactcctggcctcaggtgatctgcctgcctgggcctcccaaagtgctgggattacagcgtgagccaccacaccccgccaaattgaagtttttcttatcaaacactctgctcccacccctgcccactgcccttctccctcctaccccacccccagctctgagccatacacatccattttatgtttattcatagttgcatattgagtttatatctttgtgataccatcagcattttgattatagaaaataggcatttcctaatttgctgcattttgggttaggtaggtctctttgtgaggaccgtgggataggaattagagcaaggatttgggagccagacagatttggtttcatgggttcaaattccagctctgcggtatactgcctgtgtggtttgggcagtcgttaatgctgtctggggtcccatttcttctgctgtggacggtgctaatgatgcagaggtgtcgcctggaaaggactggggatcttgggtccacagcacccagcagtgcttggcagtggatggatgtgcagaaagtggtggctttcatactcttgttgtagctaagtgggtgcctaagcagaacttaaaatcatttagctggagaagtgggtggaaagtcaccttggaaatgacttttgttctgagaggtcctttgagtggcctctcttagtgatactcagggacagcaaggagggacccagaggagagcacagcgagacccctcggttgcctgtgcaagctgtccctttgctccccctggtctgcagggctaattgatggcaggggttggggggggtggctaattgcatagaggacagggagctttgtgagagtaaaggaactgagatcctgactccttctctctctccctttctctctttaatgtgataaaatatatataaaataagtttactgttagaaccacctttaagtctccgattcagtggtgtaaattacacccayactattttacaaccattttcactctatatttccaaaactttttttttaagcgtcctaaatagaaactctgtaacagtgaataaataattccccttcccctctccctgtggctcctggtaacctctgttctactttccatttttatgaattttcctattctggatatttcatacaagtgacatcatacaatatttgtccttttgtgtctggcttttatttaacttagtgtaatgttttcaaggtccatccatgttataacatgtatcagaacttcataccttgttttttttttttggctgaataatatccccttaattgtatatgccacattttgtttatccatttgtctattgagggacacctgggttatttccagccttggctgttgtgaataatgctgccatgatcattggcacacacatatctgggtccctgctgtcagttctttygggtttatacctgggagtggaattgctggatcatgtattaattctctgtttaattttttttttttttttttgagacggagttttgctcttgttgcccaggctggagtgcaatggcatgatcttggctcactatagcctccgcctcctgggttcaagcgattcttctgtctccgcctcccaagtagctgagattacaggtgctcaccaccacgcctggctaatttttgtatttttggtagagacagggtttcaccatgttggtcaggctggtctcaaacttctgacctcaggtgatccacccacctcggcccctcccaaagtgttgggagtacaggtgagagccacygcgcccggccctctctgtttaatgtttttttttttttttttttttttgagacggagtctcgctctatcgcccaggctggagtgcagtggcgcgatctcggctcactgcaagctccgcctcccgagtccacaccattctcctgcctcagcctcccaagtagctgggactacaggcacctgccacaacacccggttaatttttttttttgtatttttagtagatacggggtttcaccgtgttagccaggatggtctcgatctccttaccttgtgatccgcccgcctcagcctcccaaagtgctgagattacgggcatgagccactgtgcctggcctcttgtttaactttttgaggaactaccaaaatagtccccttctgttctgagagtcagtgtcactagactcagtctggggagttaaaatggacctaactggaaggacgcatcatcagggccccagagaaggatggctggatgggttccaggcttgctgctggggctgagacgagtggtctctaacccagaggccaggggagggggcaggagaggcagcgcagagtgcagctggctgctggggacacacagggccagctggagcgcgttctccacgggatgagggtggctacttggctgtagcccattactgctgtgtggaaagagttgctgctgcttcaaaagaggcaggaaatttgatatgaaatatctcaatttttaagtgttgcagctggttcaaaatgtgggctaaataaaccacatctccagattcattttggcccgagggtgtccctaagtgacggtcagcctggatgtttgtgaaaatggactggtttcagcaaagtaagccactggaaggtggaagcccttcagagccgttcgcttttgtgtgccggtgcttggggctagtggcagaacacagggtgggaagcaggaagcagcagttttgggaactcatgccagggtgcagtgccgtgcagcgtggaacctggacaggtcaggcaggggttggttagaccacaggggaccagtgtggctagacagaagctgccgcataagggaccaggctggtgaggaggtgcacacacgcagacacccagacaggcatttcgcaaacctgcatggagccttgctttgcttggtactggcacgctgaataaacgcccaccccaagggttgtcagatgatcaatccctgccttagatgaagtcaggaaaaaaaaatagtcctatttcaggagcgccatttttttttttttccatacagagtcttgccctgtcccccatgctggagtgcagtggcgcgatctctgctcactgcaccctccacctccggagttcaagcgattctcttgcctcagcctcccacgtagctgggactacaggtgtccatcaccacgcctggctaatttttgtattttttagtagagatggggtttcaccatgttggccaggctggtctcaaactcctgacctcaggtgatccacccacctcagcctcccaaagtgccgggattacaggcatkagccactgcgcccggcccaggagtgccatcttttgattataaagatttgctgtgccatctggctttgtcctgtgagtgaagacaccaagcgaacatgaaattgcgtgtgagtattttgcgtgtcaaataccaatagtaagaattggattgcgtcatataaattccatacgagtagacaaatatttgcttctgcttccttgaaagtgttttaagaatgagacacccataaaaggagattgcgtaccatgtctttgatgattcattttctgattaactcacttctggctgcctagcaacttacgatgttatgactgaagcacaactaatcttattatttgcaatgaggcaaatgtgtctctgagatagaaaacctttatgggttaagatcaattatttggtgtttcttgggaaaagaagctccaaaacatacatggagatcataagaaatattttgaattcaacactgaatcttgttagctgggtaaatttagcagataagacaagtaacaggggtggaaccgctctaaagtgatgtggcccacacctgtaaacccagcactttgggagtctgaggtgggaggattgcttgagcccaggagttcaaggttacagtgatctatgatcacgtcattgcactccagcctgggcaacaaagcaagacgctgcctccaatcaataaataaagtggcgagacacagtataacatgggtttctgatcttaattgcactctgtctgtagcagatgctgcaatatgtttacccaccatagagtagtcacttctgtgaatttgcactagatacagattcaagcattcactctctttagaagtggagatattggtgttatttggacgttagtgaatatggagtctcctgggccttagtattgtttaatgttgcataggtttgttgctgtttgcttttttaaaaaatcaactttatttagttatgatttatattcaagaaaatgcacccattttagtgtacagtttgataaatgttttacatgtaactacctttacaatcaagacacagaacatttccagtattccgaaagattcctttgttacctttcttttttttgagatggagtctcgctctgttgcccaggctggagtgcagtggcgcgatctaggctcactgcaaactccgcttccgaggttcatgccattctgctgcctcagtctccctcagtagctgggactacaggcacctgccaccacgcccggctaattttttgtctttttttggtagaggtggagtttcaccgtgttagccaggatggtctcgatctcctgaccttgtgatccgcccgcctcagcctcccaaagtgctaggattacaggcgtgagccactgcctttgttacttttcttaatcagttctcatgcgctcatccacccctaagcctggagcctcaggagatcactgatatactgtctatcactagatgattagattggccttttctgaaacgtcatctaagtggaatcatatagtgtactggatacccttcttttttttgatcagtgttatgtttttgagacttgtccttattgcatgtgtgggtagcccattactttttattcctgagtagtattccattgtatggatatgctgtcatttatggctgttttgagtaaagctgctatgaacatccacatacaggtctttgtgtggacatgtgttttcatttcttttgggtaaatacctaggagtagaatttctcggtcatatgagaagtgtgtgtttaactttacaagaaactgccaactgtttttcaaaaccattgtaccattttacattcccaccagtagggcatgagagttctagttactccacatctttgccaaccattgtaaagtgtcagattctttttttttttttttaagagacaggatcttgctctgttgcccaggctgtcagtgcagtggcacagtcatggctcactgcagccttgaattcctgggctcaagtgatcctgccacctcaacctcctgaatagctgggatataggtgtgtacgaccactcttgactagttttgtttttttattttttgtagagactgggtgtcactgtgttgcttaggctggtctcagattcctgggctcaagcaatcctcttgcctcagcctcccagaatgctgggattacagatatgagccactgtggccggccagaatgtttttttttttctttttctttttttttggagacagggtcttgctctgttgttcaggctagaatgcagtggtgtgctcacagctcattgcaggcccaaattcctgggcttaaaatagttttttaattttaaccattcaggtggatgtatagtggtatctaattgtggttttaatttgcattttcctgttgccaaatggtgccaagcatttcttcatgtgcttattggcgatccgatattttcttttgggcagtgtctattcagctcttttgctcaggctttaagttgaattgtttgttttcttacaattttaagacttcttttttatattccggatacaagtcctttgtctgatataagtattgagaataatttctcccagtttgttgtttgtcttttcactgttcttagcattatctctctttccctttctctctctttttttttgagatggagtctcgctctgtcgcccaggctggagtgcgcatgatctcarcttactgcaacctccgcctcctgggttgaagcaattctgctgcctcagcctcctaagtagctgggattacaggttcatgccaccatgcctggctaatttttgtatttttagtagagatggggtttcaccatgttggccaggctggtctcaaactgctgacctcaggtgatccacccacctcagcctcccaaagttctgggattacaggtgtgggctaccatgtctggccagcattatctcttcaagaacagcagttgttaatattcttaatttttataaagtccagcttatcacttttttccttttatggttcatgcttattttgttccatctgaaaaaaactttacctacccaaagtcagaaaggttttctcctgtattttattttagaaggtttgtagttttacatttaggtctatgatttatttcaagttaatttttatatacatgtgagatagagatcaaggtttcatattcttgcatatgaatgtttgtttcagcaccatgtattgcaaagattatcatttttcaagtcagttatcttgggcactgttgtcaaaaatcaatcaaacaggccaaggtgggaggttggcttgagctcaggaatttgaggctgcagtgagctgtaatcacaccactgcactccccactgggtggtagcgcaagacgctgtctcaaaaaaattaaaaaaaatcaatcacacttatatgtttggccctatttctgtaccctattctgtgccagtaatctatacctatctctgtgtgccaataccacaccgtcttgatatactgcaactttatagtaagtcttgaaagcagataatgtaggttttccaactttttgttccttcccaaaattgttttgaccatttaaaatagtttctattttcagcttgttaatttctacaaaaaaaaaaaaaaaaagccttctgggattttgactgggattacattgaacccatagattaatttgaagaattgacatcttaacagtgttagtcttctgatccatgaacatggtgtatcttttcagttatttacagcctctttaattttctttttgtgtttttgagatggggtctcgctctgtcgcttagactggagtgcagtggtgccatcatggcttgttgcagcctagctcctgggctcaagtgatcctctcacctcagcctcctgactagctgggactacaggtgcatgccaccacacccagctaattaaagaaaaactcttttttttagacatgaggtctttccatgttgcccaagctggtgtcaaattcctgggctcaagtgatcctccatactcagccttccaaagtgctgggattacgagtatgagttatgatgctcagacatctttaatttttaattcaggagtgttttgtagttttcagtaaacaggtctggcacatattttgttaaatatgtccctaaatatttcagatctattgatgccattaaaatgatattttaaagaagttcaggctccaaatatttattgttagtatatggaaatgcacccaatttttkttttktttttttttttttttgagatggagtctcactctgttgcccagcctggagtgcaatggtacaatcttaggtcactgcaacctctgcctcccaggttcaagtgattctcgtgtctcagcctcccaagtacctgagattataggtgtgtgccaccacacccggctaattttgtatttttgtagaagtggggtttcaccatgttggccaggctggtcttgaactcctgacctcaagtgatccacccactttggcctcccaaagggctgggattacagacgtgagccactgtgcccagccaatttttgtatattgaccttgtatcccacaaccttgctaaactcacttattagttctatttttttttttaagattcctttggattttcatgtcctgtgcaacatgacccaataaaagacaaagaatatattcacctttcttgagaatgactggtgctgtggctgatttaaaagggccacatttatgtgactataaagcattcagctgttggttccacccaaatcatatttaattaacctgaaatcctagaagaagagaaatactaaattcttgaagattaaatgttagaaaaataacattaattagaattttataaacccccttgaagtggaatctgatagtggttgtttgttgtcaatagaactagctgtaatgatttcawagactgtgcattatttttgatgcttacgtagccatctcaagaccatactctctcattgtcttttttgagttttacctcttgattacctatctatctgttatttggagagttttccttggtaaggttttaatgtgcatttatacagtaaatgcttattaagcatgcacttttgtcytaggttccatggataccgttgggagcaaaacaggaacatatgtatattatctttatggaacttatattctaataagacagtgtggcattgaataagcacttatacaaattatgtatagtcgtgataagtgctataaagtaactaagggtttacgaaagtttgtgaacggctgtgggtcagagacatcctccctrtagaagtgacgttttagctatcctctgatagttgagttcaaagaaataggtgcatttgcgtattgcagagtgggtagtgctacttatatgtcagcccacttgtcttgatgtctatgatccaaaccttttttcttcagtaacatttttacattgcatggtcattaggagagtttaggcaagagtcatgaattaattccttttccctacatgtattattagcagctgtatatgcaactctcaagtcataatcataatttgagtgcatttgagaagacatgccaggcagatttatatcaaacagatagtaattttggtatttcttacaaccagaattttattcagaatttttatgttgtccagggttaatggtggagcggggagaaagttttgggggaggctaaatgcttcctatggtacttaaaatgtatttgactatagtgaatataaatatttaagagaattatgggtggtatatagttatgtttcataagagggccctggtttcatttgataccttttagattctctttgttctgagtaattcacttggttctgagtaagccctgaaagattatgtwaaataagtataagaaaaaaacctgcatgccttgcttttatcagttttattttgcagatttgtacgtgtctaagtattgctttcaaaaacaaataatttagattgttactttagtaattagtagacataacaatgatgatgtaatttcttgagaatatggctctcaacttgcatgcacataagaatagatgattaaatttggcaagtcaggttgacttactttgccaaagagaagtgtatgtttgaatagtttgagtgaatttttgtcttgtagttatgtgtatgcatctctcttagtccgttttctgttgctataacagaatacctgagattgggcaatttagaaagaatagacgtttatttagctcttggttctggagactggaaaatccaagagtgtggtgccagcatctagtgagggccttcttgctgcattataacatgggaagggaatcacatggtgagagggcaggagtgtgccagcttaggtctttctttctcttcttataaagccaccaatcccaccataggtgccctaccctgatgaccccattcaatctcaatttcttcccaaaggccccacctccaagtaccatcaacatakaattgggggattatgtttccaacacatgaaatttggaggacagattcaaactatagcaatatctgtccttcctcttctctttctaccatggtactgtgtttgagayaccgtgggtactccatacatgtttcttaaatgaatgatgtataccatagtcaatctggatgattcactttagaggataattcctgcattattcctgttctgaaagttctacttagtgctggttgtttctttttcattttatcctggttttcattgactttgaatgggatatttgtattaccatcatctgatgaataacctcttagctctctgcttgagttaaataatagttttatctttctgtttttgtgatttaacctaattcacctatatgtatctctagcctgtgtggtgrcctggtgacatccagctgccctggggaaagtgatggaaattcagatctgtgcattttatgctttaagggcattgaccaaagttttaggggcagagttggttataactaatggccagatttgaggtttggggatcacctttgtatgttatttattcatttcttcttcttcttccaatagagtatataccaaggaaagaatgatgaacagggaataatccatttgaaatatatcttggtattctgtagtccgaaaaccgaaaattagtactgtgataggacccaaatgtagcttttggtagctcatttgagcttgamctcttccaacaacttttctggtttctttgcaagcaggatcaccccttattttgcatgccttctctgggagctctctctggtgctgacctaagctttttggtcctggggcattcctctcactctcctccccaacaggatcactcatatttatcttcctgtctccagcagtgtctcatttgtggtcggttagtctcagttactgctttctgtacaccttcagctcactgcctcctctctgctaagcccacatggctggatagctgactgtggcaggataaaaacacaaaatcatgcggacttctcactctcagttcagagtcgctgaccttccstggtgctcaaatgcttccagctgccctggggaaggcgctgctcagaagattctccccactgcattcgtcttctcattctccctgttgtcatgttcgttcctccctccccaaacttcaacacctccttccttcttttctctcttagccgatgatcttgcttcctatttattgagaacatagaagcaatcataagatgacttctaccggctgccagcaccaggattcccacctccctgcagctgtggagcagggtgggagcagcgaatttcagttaccaggctgtcccgtatggctgtgcaaccggcaagggccaagggagttctgcagccagtggggtcataagaccaggtgtccgcagaggggaacctgagccacccccatccctrtgggtgagctgtctctgctcccaaggctgacctttctgcttctgtgctaggtcccaccccacttggccctttggattcttttctctaggggacctttcacatcaatctgaaaatgctgctgtttctcccctctaaaccaaacaaaacctgctttcaccccattcctccctctagccactgccccattcctctctaccctttaaaggagaccctttgccagagttttatcctggagtctgcagtttttctcttttcactactcccatctgactttggcctccatcacgcctctcaaactgctctcatcagagtctgggctctgtggcaccaaggccagcggtgacktctcagccctctccccacggcactgtcatcgtcttccaaccttccaaactggagtcaggagactcccgcaaccaccgccccccactgctgtccacagacacacttgatttttctctccctttctcaatctcttttgcacactctttttgatctccctgaaacctaagcatggactgctattgttggttgagttgtgtcccccaaaaagatatgtgaaagccccagccctggagcctgtgaatatgaccttatttggaagctgggtctttgcagatgtaatcaagtgaagatgaggtcattagggtggatccctaatccagtaygactgctgtcctcagaagactagaggacacacagaatcgggacacttaaagaggagaacgccatgtgatgatggccacagagatgggggtgatgtgtgtacaagccgaggggcaccatggagtgccagcggcaccagaagcaaaggcgtgaacactagtttccccagagccttcccaggaggcacggccccgttgacgtgttcatttttgacttctgtcctccaaaactgtaagaatagatttctggcatctcaagccacccggtttgtagtcctttgtgacagcagccctactttgcatcctctttttaactacagtcactcttttcatggatcttatcctctttcttggctttaaatgatcacccatagtctgacaattctcaaattgatatccatggtgcagacctctcccctggattctggactcacatgttctactgccaattcattgttttcaagggattttttttttccttttttaaaaaaaattttgagaccgagtctttctctgttgctcaggctggaatgcagtggcatgatctcagctcactgcaacctccacctcctgagttcagcctcccaggtagctgggactacagatgcccaccaccatgcccagctaatttttgtatttttagtagaggtggggtttcaccatgttggccaggctggtcttgaactcctgacctcaagtgatttgactgcctgggcctcccaaagtgctgggattacaggtgtgagccaccgcgcccagcccccgtgggatttttaatagatatctcaagcttagcacacccagggctcacctcctgcctcttcctctccaaacctgctcttcctatagtatttccagcagcagatctgtccttccagatgtttaggccagaaatcttgggctcttttttgagcccctgttttctctaacatctcagatatgacttgttagcaaatcttgtagcctgtacttcagagtctactgtgaatcctatcctttctcaccatgtctgctgcatgctggtccaggcagtagtctcactcctagctcatttaggtgactttataactagtttctctgcttgtttgttccccttcaggctcttctcaacacaggagtcagagtggggtgatcctgctccaacagaggtaggacatcccacgaccttccccagaaccttctggggctccctgttgctcctcgagtgaaagccccgtccttactgtggcctttgaggccctccgcgatgtggacggtggctctcaccaccccctctgcctttctggccccggcactccaccttctgcccaggctcactctgctcaaatgctgtgccctgatcaggctctttccctgctccgggagcctctgcacttgctggaatccctttataaataaatataaaaacatagttctgtggattttgtcccagcatcctccttcacttgctccaggcctttccttaagcgttgccttcttagcaggtcctccatctgtctggtctgaagtggcctccctctcttctgtgctttcttgtccctcctttgtacgtgttactctctaacattctgtgtattgtgtttactgttttttaactttgttttttttgttgttttttgttttttgttttttttcgagactgagtctcactctatcacccagtctggagtgcagtggcgcaatcttggctcactgcaacctctgcctcctgggttcaagtgattcttgtgcctcagcctcccaagtagccgggattacaggcacccaccacgatgcatggctaattttttgtatttttagtagagatggagttttgtcatgttggccaggctggtctcaaactcctgacctcgagtgatccgccttccttagcctctcaaagtgctgggattacaggcctgagccactgcgcccggacttttttaactttctgactcccacattatagcattaaccctccaaagacaggaattttgacccctttgatcattgctccgtcctcagagcctgtgagactgcctgccatatgggagatatcccgtaacatttgttgaatggatgacagagggaataggttgccagtgtatggtcaattgaattcattattattattatttgagatgcagttttgctctgtctccaggctggagtgtgatggcgtgatctcggctcactgcaacctccgccacctgggttcaagagattttcctgcctcagcctcctgagtagctgggattataggtgcatgccaccatgcccagttaatttttgtatttttattagagacggggtctcaccatgttgcccaggttagtcttgaactcctggcctcaagtgatccaccctcttcagcctcccaaagtgttgggattacaggcgtgaaccactgtgcccggcctgaatttattatttttaaatagcttatgtttatttcaccacttttttttactcttaattatgacagttctcaaacatggaaaagaatagagagaatactgtaacacataccccaaatacccatcatctagatttaataattatcaacatagttgaataattatcaacattttgccttactttatgtattttgggggtaaattttacagatttcatgaygtatatacatttttaaaaattaaggacttttcctatgtcaccacagtacttcctttttttcttgagacagggtttggttctgtcactcaggctggagtgcagtggcgccatcttggctcactgcagcctctgcttcttgggctcaagcaatctttccaccgctgccacctgagtatctgggactacagttgcacgccaccatgcccggctaatttttgtatttttaggagagacagggtttcaccatgttgcccaggctggtctcagactcttgagctcaagcaattcgcctgcctcagcctcccaaagtgctgggattacaggtgtgagccactgcgcctggcccccacagtacccttgtcacacctattaaaactgacagtaattccagtttgctgtctaatgcatactgttcacattcagatttcctaattgtcctttccagctagtttgttcaagttgggatccaataaagaaccacccattgtgtttcattatgtcttttaagccccttctaatctagacggggtctccctctccacctytgtgtccccaccccatytccaccgtgacattgactagttgaagattccagcccggctgttctgtaaaatgttttatcccctggatttcttctgaatgctttcttttcttgtcttttttttttttttttttttgagatggagtttcactctttgttgccaggctggagtgcagtggagtgatcttggctcactgcagcctctgcctcccaggttcaagcgattctcctgtctcagcctcctgagtagctgggattacaggcacccgccaccatgcctggcaagtttttgtatttttagtagagacggagtttcaccatgttggtcaggctggtcttgaactactgacctgaggtgatctgcccgcctgggcctcccaaagtgctgggattacaggtgtgaaccactgcgcgcggacctgaatgctttcttctgaagtcatttgactcgttctcttctcctctgtattatctgcaaactagatgtgagttttaaaggttgatcaattgaaattagttgaattaagtttcatctctgawgccactactctgtagccacagggagctttgggacgtaaagggcctggtgtttgcaggaggatggcctaagagcctggatctgtgtttactgagatcttagtaagttttgtacaggcctcttgagatgatgacttccctcagccctcagttcctgataaaccaccctggaggaaggcctctgggacctctaaggtctggcgtgggggaacctcctccagccttgtggttttggggatagagtagagagctctgtgcctggattggacaacgtctcttctaggttttgccttccttctcctccttgtacctccatttggggcaaacagaaagcagctttggggtaccccactttccctttgtgaagattattgtcttctttgttggtgatcaacttgccttgtctttacaagaggaagcggagattctctaagatgtgaggctgagaccgagtgttcttgtatttgagtgctttgtgttctgtgacttctttcacccagggttttctgttgttgtttttgcaaataggataatgaatttctttgtggggcaaaaagataaaagttttccgtaaaatgaacggaggactggagaactacttatgaactctggactggaggggaatcttgaaaatcatgagagaatgtaagatgtaagataggaagtataatcatgaactgaactgattttcttggatcctggtttctgaagagcttattttatagtataagtatactaagtatatgattatcatattgtctaatcgtttagatgtatggaatatgttaatctagcttttcttggtcatgaattaggaagtactcatattaccaaaatggcattataaggaaaagctaccatgatctaatgtaatgccaaattacgaccatctcatttctttctttatgacacaggaaatcagggatcctcttatgcagtggcttgggaaacatgtggactccgagggagaaataaaatccggccagctctctcttagatttgtttcatcctacgtgtctgaagtagaaataaccccatcttgtatacctgtggtgaccaacatggaggccttctcatcagaacatttcaacttagagatctrtcgccaaaatctgcagaycaagcagttggggaaagtaatttygtttgccgaagtgacccccacaacgatgcgtctcctggatgggtaaggtgtgagcaggtctgcatctgctcagaggagtcctgttccattgatcatcctctcttaccaatagacggggaggggatagagttgtagaggaatacgtttgaccagacctattagcaaggtggaagtactcttgtcctagaagagttaaatcgtgggaaaggaaattgaagttctttgatcacaggtttgttttttatgggaatggaaggtggttgtgctttgtgtcttgcttctttgaatcaggccctcagaatgttctttgataaacgaatattatgaaaaaagatgtttaacyggtggcattattgctcaggttatcattcttcttttgtgcagttacaatcagtgttagacatttaatacaggatgtttttcaggggcatttgaataggaagtttgaatgacacctaagctgtgtaaattgaaaaaggtcagagctttgtattttgaaaagtgtttttggtacattgctatccaatacatttattcawtgattgattgattgagataggatcttgctctgtcacccaggctggagtccagtggtacaatcacagctcactgcagcctcgaccttctgagctcaagggttgctcctgcctcagcctcccaagtagctgggactataggcacacgccactatgcccagctaagttttgtatttttagtagagacagggtttcrccatgttgcccaggctggcctcgaactcctgggttcaagtgatccttctgagtcagcctcccagagtgctgggattttaggcgtgagccacccattcccaacccccataccttttttaagcagttgataaccccatttggatattagaaatttactcttactgcaggttttccttttgattccttctgttacatagactctgattaaagattaaaaaaatagaaaacaaatgaaaggaattttttaaaactccccaatagtactaatactattttagtttaaaaaatttggttatagagggagggaataacaaaagtgccttccctcagtgcggtgttaaaatttaaggcgtgaaatattccaaaaataactggattcatagtttctaggcatttcactcatgggaccacatgattagacagatgtataattcaatgtatgggaatattttggcctttttcttgataatagtttctggaatttaatgctatatggatataaaatgatgagccaactttagcattttcttgactgtcacacttagagtcatcagaatgacagtgttagtatgtgtgttgtattagaggaggcattggcagagttgtttgggaggattatcagagcaatgggggcaggctgggaggggagctgtgagccgtgttcattagtaattgttgtgtactgagttaatttgtgatgtcataggtactttcatttttcagcgcttcttaactctcctgtttccacctcacccctgacatccattgattcccagtagaaaaggaaaaagcctgttcttttagatggaacagtcatcacttgcttgttgcaaactctgtaataatcctttgttactcaagcgaagacttcattatatcgaaggggtaactcgcgatagttacattttctgaataaaaaaatgagacaagttattgaacaaaagatttggggaggtgaagttcagatagaaaaatacrggtacttccaggccatttttgttgtttctgtggagaatactgaagaatatttcgtgtcattgccacctgggaaccttggaagtgtggtcctggagctcgtggccaggcagcgtgtcaccaagagggcagcgcgtcaccaagagggcagcgcgtcaccaagagggcagcacacgccctgagagtgcggacaggctgaggctcccgcacatycgcagagggctgggcttcaccacacgctgtccagcctgtgtttttgggtgaaaaaagaacctgtataaatatattgccttaatattcttggatatcaggaagttcacttttgatattaaacttaaaaaaaaaaaaacctctgccttaggaaacttgggtctgtaaaagtgtttgacagacattgaagctgagcttgccaacactagaggtggaacctcccatagggttaagagtttttacttttacaaaggggaaaaatattttggccyttctgagggtgtttaggaatctttgtttctcttcttgtttggtttgattattaattatgaatcccttgcttggtgcagagctgatactggatgaatggttgttggcggccttagcttaccagatgccctgcatccgctgttcccagggttccttcctaacactacgaagtgaggttactcacagaaacctactgagtcagtgaacctgggaagaaattcctggcgcggggaggcagttgcctttttaaggagaagacatttgaagaggtcatcttgatgtcagagggaccacgagatagatggatgcacaaaatacatggcctgttacattctaagaataagactaaaatatttctaaaactatatttgatcctacatgagtgtatcagttcgttctcgcattgctataaagaactgagactgggtagtttacaaagaaaagaggtttaattggctcacagttctgcaggctgtacaggaagcatggctggggaggccgcaggaaacttacaatcgttgcagaaggtgaaggggaagcaggcacgtcctacatgatgggagcaggaggaagagagcaaagggggtggtgtcacacacttttaaacaaccagatctcatgagaactcactatcatgagaacagcaaggggaatatccacctctacgatcaaatcacctcccaccaggccctcctccaacactgattacaatttgacatgagatttgggcaggaacacaaatccaaaccatgttaacgagctatacttatggaaacatagtctatttgtgatagtaataataggttatgtgtactggcagctgttctcttccagttgctgcttttgtgtgctttaaacaaatccacgaatctcatacattattttttagtgcagggatccccgacccccgggctgtggtctgcagcctgttaggaacggggcggcgcagcagtaggtgagtggtgcaagtgagcattactggctgagccccgccccctgtcagatcagcggcagcattagattctcataggagctcaaaccctattgtgaactgtgcatgtgagggatctagattgcgtgctccttatgagaatctgactaatgcctcgtgatctgaggtggagcagtttcatcccgaaaccccctgtccatggacaaactgtcttccacaaaaccggaccctggtgccaaaaaggttggggactgttgttttagtgctttggagttgttactggaacagtgtcaaacactagtattataccagtgtgtagaattctaggtaacagaatttactgtgtgtggaattgttcctgtttctgaatatttataaaaaatgttggatatggccaggcgcggtggctcacacctgtaatcccagcattttgggaggccgaggtgggtggatcacttgaggtcaggagttcgagaccagcctgaccaatatagtgaaaccctgtctctactaaaaatacaaaaattagccaggcagttgtggtgcactcctgtaatcccagctactcaagaggctgaggcaggagaattgcttgaactttggaggcagaggttgcagtgagccaagatcgcgccattgcactctagcctgggtgaccgaacaagactcccatctcaaaaaaaagtgggatactttttttgtggctcatgcctgtaattgcagcactttgggaggctgaggcaggagaattgcttaagccctggagtttgagaccagcctgggcaacatgatgagactatcactttgatgaaactattggatagaacaagaagaattttcagaactatggactgggttctctcaatgcttatttctctcttcgtctgtgtgtatcatttcttcagcaattgagcagctctttcctaatgggctgaagtaggagtgaaatttatgttagatatagatcttgatcatatgatttacaaaatctctttttctccgtctaccattccccatcatggaacctgcaccagctgaaaattgggagttgtattcctaaggaagacggggaaggacacagtggggaacagccarcagtttctgctgaggtcccagatatccacatgcatttgtcttcccctccatagaaaactctcacctcttcctcaaggaagatggccctggtatgacattcatttccttccacttgatcagattcaggatctctggatgatgtgcygttttctcttttagggccggatgtacctgttgaggtcttgcaatctgttagctgaaacagacgagctctctgcccccagcacaccatgtgccacactgctgtagtagaaatcacgaccatcaagtctccctgcaccccctgcactggcggccactatgtttccttgtcgctgtctggcaacccgcgttctgccctccgggaactctcttgcctgggatcttttggagtcatggctttgccttctgaaagggtcttctctgcaccacatcggagatggatgctggagaggatgggcttccaaaacccgcttgctgggaggatttggggtctgggtgttgttttgaggactgaatagtcacagctttttataggccagccttaaggtttctgtagagatacaagtctctcaggactttagtagccctctagtctgtttgcttctgattggttccatgtgagtaaccatcaagatcttgtctagacagtttttcagcctaaaaactctggtcttttaaaggcctcagcrctctgccattcctttccctcccaatttaatagcaactcccttgggccaaatgaaaccgtgggcttgggtggaaggccaggcccttaatcatatctttggcacaaggcttctgggctctatgtggtaaagcatctgtcttatctcctgctggggctgcagggacagccccataggctcacttagattgctggttgctgacacagagctcctttctaatcaaatctgtattctttcccactttcttgaractagttagctttagttggagatcatttctcttgattgaaccttgctgagagtgtcaaggactggcaagcactgacattttgaattttcagagctgtttcctgtaaggatacagcttctaacagacaccaggtctacctcccaacatatagaaggtcaggactcgatcaaaggttttgctgcggcagtcagcagtcgagaacctgtgagacctgtgtctttgccagtgatcctctgcccatctcctccatatcaggctgcatttttaggccttgtttctggggcatacataaaatctgagacctagcacccccggttcaggtaccggttcctaggtcaattaagattaggtttcactgtgtgcaacagatatctgaaaatagaagtggcttgaacaggatggaagtttacttttctctcctgcaaatgagataggctgagatgggaagtccagcattggtgcgttggctcacgtgtcaaggacccagctgagttgctcggccaccttcagcacatgtccaggatggtgatcccagtgtttatgttcttacttgagccagtaagtgggaggaaggggtaaagaagctacatccccattcttcaagggacagaagttgcacatggcctttttgtttatgtattatgaacaggacctagtcacgtgacctacaaacaaggctgggaaataaatgtggtctttatagtaggcaaccatggatctaactggaaaccaggcttctatcactaaggaggaaaggagggtagacattggtagacattggaagacaattagaattctgcctcaggcatgtactttcagtttttcagactaccaagaaaaatacttggaggccctgaaagtagtataccttctgatagtgccagggtctaccagatttaggatcacaggtgaagataattatttgacttataacactgcttttgtttcagtgcttactcaaggtaattagaggaattttttttaggtgtttacacatctaggaggatttggagatttctgacagatttttgagggygtggtattttttgagggctggtatttcagtaccagctgagctaccatggtactggtgtagagagctttcttttgatctctctgggcatgtgagtggcttgtcttagagcatgaaccccccaccgccttcaccttgtgtctccaccccacaaatttggaagtgtgtttgtgattgaatagaggggagagcactctggggagaggaagtagcacagggcaatgtgggtgccgcttgctgatgactgagtcccctccacccccagagtaaaaactcaaaaccccgttagtgatgcgctttccccaggaatctgacttggctgtgccacccaactcatttgcttagaaaacgtgatttcatcctttatcctgggctccagtcattttctctgacatgtcttcccgaccatgaattgcttttccacactattgtcagggtaacaccttctggatgccatgtgtattagtctgtttccacattgctataaagtactgcccaagactgggtaatttacaaaggaaagaggtttaactgactcacagttcagcacggctggggaggcctcaggaracttacaatcgtggcggaaggtgaagggaagcaaggcaccttcttcacaaggcggcaggcaggagaatgaacacaggaggaactaccaaacacttacaaaaccatcagatctcatgagaactcaccatcacaaggacagcatgggagaaacaacccccatgatccgattacctccacccagtctctcccttggcacctggggattatggggattacagggattataattcaagatgagatttgtgtgggggcacagggcataaccatatcaccatgctgtgtgtattgccagttttgtttcacgccagagacctttatttttctgtgctatttcctagtaggtttccctgtgagcagttagctcagccagttaagtagagtcccagggacatgggtccagtctgtgtctgtgtctgtgtctgggacagtgaacttctccgtgttccaggctcacatcccacagctacagctcaggaatccctttgcaaaatgtgagctattggtggtgatggggtctagggaagtgggtgtggaccagccactgcaaatccattgtcactgcaggaaaagcccctcccagagttcagtctgccttgacgtagtgggygtgtggcacattccatttaatctcctgataaatgatagtcaaccctctggagacagcatgaggctagactgtgaaacataggagcttggggtaactgagtcattgtgctatttttggaatcatcttttatttggccaatagcgtcttttttgattgacttataccaagtctccatcagagagtgaaatgacgtgaaaccgcagtgtgtggtgagcagatgggcataaacttgcttacgccaatttccttcgtatacttgtgcatcctgaataagttgtccaaggttggacgttttgtatttgtaaagaatattttagattttcttattaaataagctgatttctcatttgtcaccgtttgagtcccttgatgtttcaggcttagatttgacttctttgcctcatgggataagcagttctggagcaactcctgtatgccaggcactgtgttaggcactggagaggtgtcctggcggctcaggcagcgtccatgcctgacggtgcgtttgcagaaggagatcctagtgcctgtgccagtttgtaaagttgtgtacaccgttcttggtctgatcattggggctttgggcagaaaggaggtgggcacagtgatataggagcgatgtgtggtgttttgtttttgtttttgcagttactgtgtgttgggccttgtttctgatgctgtagagctcgtaatctagtagggaaaatgctggaaccaagactttgtcattcactagctctgtgaccttgacagtctctcctccctgagccttactgtcttcagctgtgagatcagggkcgttggaacactagatgctctccaggcatcttcagctcayctcctttgacctggtgatgcgcccacrccagagcctccaccaaccagccttttatctctcagtgacttctggcgcttttaggttgctgagctagttttgtgaatcagcctcatgtgagttgaggaaatgttgtgtgggagacagttgactttctacaaatgaaggagaagaaaaggaaacacaatcccataaaataaataaataaatatatatatatatatatatatatatatatatatatatatatatatwttttttttttttaaatgggaagggggcaggatcgcattggggagaatagctgcagtcatttaagaaagatagtatttcgatttcagagtttgggaccaactccagcttttcagctttgtgcacacctacctagtcagtcccaaacatcttttcccccttttcttcccttctgggtctgtgctgctaactgactcaactctgcaccctcctcccctgaagtcgaggcccgagaggacagaaattgggctggaactaatttaatggctgagtgacctcacagtagagaaacagccggatcctaataggggtctttgtctacatttccaccctggctggtagcatgccagtcaagagtcaagctggagacacaggtggaagcgattagacctgtcataaagtttgaaaaattgattctggaggcgaagtgaatagattgagcttgacagtgttgtcctaaagattctaagggaaaattctgtagtttaatttgaaatcccttgattattcattagctttccagatggcttttgttgatgttttacatattaatgcctgtattgtgttattggtgtactcttaatgtgcacataggtaatgagcaaagaataaatacattggtaagtgtcccaaattaatgggatattagcgtaattgygaaataaagggttttaaagaagttgattgcttgggataattagcacgaatttttttatgtgtcagtttggtactttaaaagtgaaaattattggagaattttaagaaaccttcattttaatgtttacttctaaaatttaaaatataactttggcctttgactttggcaacggttgtgactgaagggttattctggcaaattctccatcaaattttttttgytgttccaattcaacacctgaataagttaacctttcacatgccaagctcctgaagttgaattattctgtggcctggtatttttcagagaagcttctacattaatttttagtgttcttggttgtttattttcatattttgtcaccgatttttcaagtatggtagagttattttgatgtttaccattttgtgatagtgataatgtgttctatttaggtgcattttcattagaactgagccgtcccagtgtcctctcagcgttgatgttgatgtcttcatcattccggggtgcagtaacaaagtggcatccactgaatggcctataaacaacagaaatttgtttctcaccgttctggaggctagaagtctgagatcaaggtgctacccggcttggtcaaattatcttctagattgtagactgctgactttttttttttttttgagacagaatctcactctgtggcccaggctggagtgcagtggcaggatcttggctcactgcaacctctgtctccggggatcaagcaattatcctgccccagcctcctgcgcagctgggattacaggcatgtgccaccacacccagctaattttttttgtatttttagtagagacagggtttcaccatgttggccagtctggtctcgaacccctgacctcaaatgatcctcctgcctcggcctttcaaagtgctgggattacaggcatgagccaccagaccctgctgactgctgacttcttgtatccgcacatggcagaaagagggtgagagagctctcaacggtcctcagatagaagggcattaatcccattagttagggctccaccctcatgacttaatcacctgcaaaagtgattaccatcacattgggggctgggatttcaacacatgaattttgacagagggttggggagggaacacaaacattcaatccattgcagttgagtatcattttactattggacaacttgaagcatcccaaatttgactgcgcagaacagcaggagtgaatgtcacctggagtggagcgaacatggcctccttcagggtagggcaagctgcccagccatggcagggattctgctgaagctctttcaaacccatagcacccatctttttttttttttttttttttttgagatggagtctcgctctgttgctcaggctggagtgcggtggtgcgatatcagctcgctgcaagctctgccttccgggttcacgccattcttctgcctcagcctcccaagtagctgagactacagacacctgctaccacgcccggctaattttttttgtatttttagtagagacggggtttcaccgtgttcaccaggatggtctcgatttcctgacctcgtgatccgcccgtctcggcctcccaaagtgctgggattacaggcctgagccacggtgcctggccaacagcacctatcttttgaatgttctcaatggtggcagtcttcatcttttgagggtgtatgagacttttaggaaaaaaaaaaaagtagataacatggtagaaaagctggggtagaaagtatttgcagaaattgcatatcagcccgtggttcattcattttacattacttagatcttgggatggggtcctgctggccctggtttggaatcccaatttattagacgagtaaacttgggaaaatcagtaaccttttatgcctctatttccttatctgtgtcatgtagctggtaatagtctacttaaaaataaaaagtttaattacttaactactttctctggcacaccagctgtgtgcaagatcctgtgtgaggctctgggacccatggggaatagagaagatgtggggccctccttcagggtgcctcactggatagggtgaggatgcgccgagataatatgtcagcagactcttagtacatagataatatttatggaactctcattattatttaaactttgtgtgcaattctttttagcctttataacgcatccttcagcagcagtgctgtggacgtccatgaaacagattggtgtggtctgtgttcaggactgtgatatgtgtatctttttttttttttttttgagacaggatcttgctctgtcacccaggctggagtacagtggtctgatcatggctcactgcagtctcaacttcctgggcccaagtgatcctcccacctcagcgtcccgagtagctgggaccacaggcgtgagccaccatgcctggataatttttaaattttttgtagagacaggggtcccactatgttacccaggttggccttgaactgttgaatttaagcgatcctcccaccttggcctcccaaagtgctgggattataggcatgagccaccgtgcctggtgtggtaggtgttttcttggaatggagtttttgtttgaagatttcgacagtttttttctcatactagaaccaattgtttgttgctggttactgttgtgccaaaaatattttagtccaactttttttgaaagatgagaaaacatagtcagttgtccatgtttgtgtttctcttatatgtgaagcaagtctctttttcattgaaccttctctttttttgaaatcttaaccctttagttatcattttcacaggtaattcacagtcatttcaaaagagccaaatctgcagtggtttgaacattttcgcagtcccttggatatgccttgtgcatcacccacaccttcctgagacccctgaaccttccatgacagtcagaaacacgtgcacctgacattactacattctctttaagctctaaaaaaaaccccagatgtttattactctgcagaattgcttgattgtaactacatttaatattcattttgtcaaatgcctctgttttatttaaacaagcaataaaagaccacaaaaggtaataaggcaaggtttagggttagaaaagataatcaataaagagggtgacagggacttctctatgctcttttccccccagttcaggtttaccttagagaaaaatccaaatgtgttgattttagtttagtagtgagctgaatctgctgagggttggaactgcttccactctagtctttagattgtaaaggagttattctttagcagaagggccaaagacatgaccttggaataaccagcctgagtttattagaagtctggtttcccactgggcaaggctgcatgggatgctgaaagcagggcaggctctggagcttcattggctactggcctggggcaaattccatgacatctcatcttaaaatggacaagctgcaataatgcccactcatggtaatgccatttgtaggagattggtaagggtggtgggaaaaattgcagaagatgcaaaccttcttggaaggctggaaggttttacaaaagcttcggaaaaggatttggctgaaggcagccagattcttttatctggtgcctgaaagcttacgttagataacaaggggatataaataaactgatctagrtaagttagtttacttaggccttggaacctcgcccttaagcatccacgcacagaactactctctccgggtctgggtgaccatgtgaattgcccacaaatgtgttgactcaaggcctttgtcattaaatctatactgaataaatgcccacagtgccggcttttcggggctgtggctgctgactcattacagcaccctccttggtgtctgtgggtggccgggtcccctagcctgctctttcactggattcttgtgtctgagtgcatttgttcatccgttgttcagccatggtctgcgggtcggacctggcagccattcatgtggggaaggtcagagcaggtggtgctgtggaaagcccattgcatagtctctgacacggagtggggtggccaccaagagttggtttaatctcctcttcagctaccaaggaagacaggtgctttccccacacagcgctgctgatagccaccgacagtggaaactgcaaataaaacctgagcatatgtttcaagattctgatgcagtaagaaatctatgataagaaagcagcattgcccaaacttggattatgatttaacagtagtttctaagtagaaacttttttagatattcttagacgttagtgttcatgattgaggtctgaccagtcacctggacacatggggtgtgcagatagaggttgagttccggcttaaaaatatgttttagtcaaaatctgtcaatgtttaaaataaatgtgccagttatcccagcaggtatttttcctcctacttgttaggcatccctctcttccatttctttttctcccctgacttagctttgtggcttatttagagggaacttttgtttttctttcaaataaaacagttacctgctttggaggtgagagttgatttgctttcacctgcccctttaaaatcttttacacacctaccatttggcaaaacaccttctgagctctgaaatacctttgttgtttctgctttttgttttggagagaagcatgttctgtttctgcatgaggggtattccgtcactgtgagatcccaaacgccacattttttctgcattgcacaaggagtcattcatcattttcattttttgtttggctctcccataagagtattcaaattagtgagaaggaaacgatgaagtcattgcctggcggagaaggattttccctggttgtggaagggcaaggagatgagaaggaggaatgatggggaagtctgtacctgcctctttctttgccctttggttccagaggtcaccttgatgctaatagagttttcagtttaaaattgggtaatatgtgcatacagaatttacctaaaaatgaaatacaaaaacctcagactgggccgggcacggtggctcacacctgtaatcccaacactttgggaggccgaggtgggtggatcacgaggtcaggagatcgaggccatcctggttaacatggagaaaccccatctctactaaaaaaaaaaaaaaaaaaaaaagaaagaaagaaaattagccaggcgtggtgacacgcacctatagtcccagctactcaggaggctaaggcaggagaattgcttgaacccaggaggtggaggttgcagtgagctgagattgcggcactgcactccagcctgggcgacagagtgagactctatttcaaaaacaaaacaaaacaaaacaaaaaaaccccaaaatctcagactgtaactttcttgcctgccattttgacacagcagcttgtgcgatgttggtgaatcactcagcctctccgggtctgtttctcatctgtgagattagagggttatactagatctgtggcttaattttttttttccaagacgaagtctcgctctgtcacccaggctggagtgcagtggcacaatcctggctcactgcaagctccgccttccgggttcatgccattctcctgcctcagcctcccgagtagctaggactacaggcacctgccaccacgcccggctaattttttgtatttttagtagagacggggtttcaccgtgttagccaggatgatctcgatgatctgaccttgggatccgcccgcttcggcctcccaaaatgctgggattacaggcgtgagccaccatgcccggccgacgtggagtctcactcttgctcaagctggagtgcagtggcacaatcttggttcactgcaacctctgcttcccagattcaagtgatcctcctgcctcagcctccctagtagctgggattaaggcacgtgccaccatgcctgtaaagccccctttcaagtaaaatggtgcagagcccccctgtccacatgggtcctgggagccttctcagaggccaggttcctcagggtatggacatcaagaccaccaaagctggaagtgtccttccaacacggacactgaggcccagctggcctgaggacagttcttttcttttcatgtctggctgatcatctggattacttctttttatgccctgccctgttccaaaaaggaattacggcaatggggatttcatatgatctgttacaagttctctctgcctcctgcaggtgctgtcccatcaacacggaatatgtgtggcccctctggttggcatgcatcccccgacagctgtctgtgtgtgcatgattcataactcggcttcattccgtgcttcccagcttcccacgctaacagtagtggtggctgagtaattggagtttccttctggaacccagggaaagtcgaatgagttccatgcccctgttagacaaagtggctcctggggtgggagtgggggtgatgatccgggtgggtgttcagatgtctccaattacagctgagtgatatccgagaagaaaaatctctgccgggccaggcgtggtggctcacgtctgtaatcccagcactttgggaggccgaggtaggtggatcacttgaggtcaggagtttgagaccatcctggccaacatggtgaaaccccatctctactaaaaatacaaaaattagtcgggcatggtggtgcacrcctgtagtcccagctagttgaggggctgaggcaggagattgcttgaatctgggaggtggaggttgcagtgagccgagatcacgccactgcactccagcctgggtgacagtgagactctatctcaaaacaaacaaacaaacaaacaaacaaacaaacaaaaactctctgctggcatcgcttccaacccaaacacccagaacgcaggaggggatgatacagtggcgtgaagaactcagctgtggtggaaaatgcccctcggctcccacgccctaaggagtgctctgggaggggtaaggggagtttgggcagatgtggagtggtcttggatgaggtygtggctgacattttggatttcgatgttttgttaaagcttatttgacttactaacatagtatagaacctgccgtggaatcggagtgtggggtctgatatgcttggaatcctggtggagtgttcgaggtggattctgcaagtcgtggcaatctccctgctttcctggtttttattttcatcctttctactcattttcaataccctttccacttccggaaacaacctatggcatcttctcttttataaatggaaacaagatgaaatgtaatatgatttttttttttgcattctgtgatgcccattgaggtaatacaagaaacttagatgttgcaaacctgggctgtgaatctctgatgtggagctacttttagaatttgtttttgttttgttttgttttgttttttagctcaattaaaatgccttctctagcttcgtttcagatcttgttctcttttcttccttctcctgcctcctcttcccttctttctgttgcaaaatatgagcatgtttcctaactgctaagaggccttcttggaacctttgttccaggcagtggagatagagcaccgttgtaagattacaggcagtttctgtttttactgttgatacctggaaaattgtcatgaagtgcaccaaatgtttccagcaccatgttgtcatcattggaaacgaatgagggatttgacttctactgaaccttaaatcagacaaacaaatgtctgtccaaactctggcaggcacctcaggggccagagggcttgaatgccctctgcagtgttgtggatgtgtctgagcaccagatactgggcaatttcctaccatttgttcagtcaaatatttactgagctcttttttttttttttttctttaagagatgggatcttgctctgtcatccaggctggagtgtagtggtgcaatctcggctcactgcagcctcgaactcctgggctcaagcagtcctcccacctcagcctcttgagtagctgggactacaggcgcgtgccaccatgcttggctaacttttcgtagcttttgtagagacaaggtctcacttttttgcccaaggctggttttgaattcctggcctcccaaagttctgggactataggtgtgarccactgtgcttggtctgttgagctcttataacttgaggcatccccttccagtcaccttggagatagttctgtctcccagaatggctccttataaacccaccccattccaaaatggaaatctgaatccaaatactgttgaaaaaaatgtaatcttttcccaaatggtatttaatatgtttgttaattagttgaagagatatgaatcatgttaatcttctggtgtatctccttctagtcttttatttcctcctacactacatgtgcaagattagtctatcataatttatttaagcaatcttctgtgaatgcattcttgtcattgctggtgatttcctattataaataatcatatttctttttgagccagcagttctgtataattctgtagtgaccccattacaatcttycttttctggaagatacttggtgaattataaaacaaagcagacattgacagaagttgaataggatggggttaataactgttgtttacaatacttcatgatatttcattattatgtaattatttcaaattattttttgtccaaagagatatcatgccttaataataatagttaacactaatttaccatttactatgtgacaggtactatgctaaatgcattctgtagatttttaccattcggtctttactaaaacctggtgagatagttatcatcatggttcccctttaaagagataagggggaagctatakcttagagagtttaaatgcttggacagagtgacataaagagtaagtgatagaagcagcatttaagagttttatctgtgttaagagccctaattgttagtttgtaatactatattacttctgacagatgctttgctgaaatcgtaatgtactrtgttccccatacttccaatatctacttgtatactaatcttattacaaaagaaaatcaggctagctaatatgtctaactcttgacwattctcttaattttttattttttcaatgagatgagtggtaaagctataacgggagtcctaagttaaagtctcagctcttgagctaattagtgggacaagttacttttttgttcctctgtactactatgtgtatattgtgggcagtaatacctttattaatgagctgtgatctaaattaaatacaatggtaagtatgaaagtgccagtacaatttctgacctttaataggtgctcagtagtagtagtttcgtttatttacttgaatttcacttgggatagaatatctctggttagtacaatttccttttaaaattagaattgtatgtttcttctagcttctgtctagttcacaatgacccttcaatgattagccacagtgaatgtaattttatcatcctcatgttctcaggttctatgaacttgaaaataagacagtaataattatctaatctgaagaagagagaaaaagatttaaaaaataaacagagcctcagggacctatggataatatcagaatgtttaatatatgtgtaggagagatggaaaaaaaatttgaaaaaatgatggccagatgttccctcagtttggcagaagacataaatttccaggctcaagaagttcagcaaactccaagccagatgaatatgatgaaaatacatctaggcatattatagtccaactgctgcagaccaaagattaaaaaaaaaaacaagtactgaaagtaatctgaggaaaacagcatttcatgcagtgaggaacaatgatttgaatgtctgtggactttttctcagaaattattaaagccagaagagagtggaacaatatttttagagggctcaaggaagataaacttgtcaacccagaattccatatccaacaaaatgtttcaataatgatggcaaaatacatgtccaggtaaaagaacactaagataatgtgtcatagtgcaggtctgctggaaggaaatgccaaaggaagtttcaaaaggtgaaaggaaaaacactagagggaaacttgagtctttaggaaggaatgctctctggacaaatatctgggtaaatttaaaatactcccccaacacacatatatctacctaaagcaaaattgtagcatcatcttacatagtcttacattcattggtagaatacatatgacaactctagcaaaaaggaacaacaaaggggtggtaaatggacctataagattgtaacatttctgcatttgatctgacatggtacaatattaatgctaagttgatataaaaggtaaggatgtacattgtaatccctaggataaccactaaacacataaggcaaaagatacagttcaaaagccaatagataaaatgccattctaaaaaaaaaatctaaaagaagtcaggaaaagaggactagaaacacacacaaaaaaaagagagaaaaaaataaaaattaaccaaatggtttaactcaattcaaccttatcaatatttacattaaatgataatagactaagccctgttattaaaaggcagaaaatgttagaatggattttttaaaaagcaagacctgagtatatgttctcttcaagacacacttcaattataaagacacaggttagaagtaaaaggataggaaattatataccacattaacagcctaaggaggttggagtgactttttaagcagcagacaaaattcactttaagacaaagaagtacaaaagatggggagggatatttcacagtgacaataggggtaattcatagagaacagataacaactcatggatgtgtatttacctaataacagagctttaaagtatatgatgcaaaaatggacagaataaaagaaatagagaagtccaccgtcatagttggagatttcagcaatgctctcttagcccatgatggaacagctaaccaaaaatcatgaaaaacatagataatctggataacactctcaaccactttcaccttcctgatacctaatacttccagaacactataccttgccaaactcaccttgtttcaagtgtgcttggtatgttcaccaaggtagactatgtgctgggtcataaaacaagtctccaaaagcctaaagtgattgaaatcacagagtatattccctgtccaccatggaattaaattagaaatcaataacaaaaatggatctaggaaacccacaagtatttagaaagtaaacagcacacatctaaatagtccattggtcaagcaagaaatcacaagggaaagtacgaactgttttgaaactgcataagacctacgtagagaaaccatgatcatggtttggaagagttagtactggtaaaatgccagtttgctgtaagttgatgyacgaatttggtacaagctcaatcaaaatcacggcaggtatttttgtggaaatgtatacgaaaatgtcacaggatccttagagtattgcttttccagccagaaacctctgtggctggtggtacctttgcctgagttttgttcgggcctgctgggctcattcagccctggcaggctgcacttggctcgcactctcagcctggatcccatgcctgccacgggtgagccaggcgcacactggcgaggggttgtgaacgagcaagcttggggtctggccactgtgcacaggcaggccagtgcacagtggctgctgcggtggggcaggcagctccatgccctggcacgggtgctgcctccgtgcaaggctgaggctagatcagatgtaccacaagtggcttctgctgcaggcaccagcacctagacaaggggaatgtggtggcatccagaaacttggagacaccaggaactgcagagccccaaagaggktgtcacagccctggcttggggagcccctaggtctggctccccgaagagctgcctctcttctctcctcatcacctgcaacatggcgagcagggggacgttgcccctgtttgtgttacagctctcttagttccaccattgggcaggtcccaagttcttgtcctgcatccaggaagaaggaggtatgtggacaattggagggcgagcaaggcagagagaagcttcattgagtggcagaacagctctcaggagacttgaagtgggtagctccttcctgcaggcagatcgtcccgatgagtgtccagctcttagtggacaggagacctgtagtgtgtagctcctttccgcagacatgttatcccaacatctgtcyggctctcagcgaagaggagacccatggtgggtagctcctttctgcagacaggttgtcccgacatgtgtccagctctcagcggggtcttccagaggagagtgtgagtggctgaatctggggtttttatgttgtcacaatggaggaagtgtgtgctgactggtccttgggtgtccctggctggtcctggaaaaagcaccatccgaatggccaaacagttgtcaatgaaattctcactccaggccgtggacytcacctggaactggcagcctggagcccaggcttcaggcttgaaggtgtggtttcaccaggaactggcttcttcctgcttaggagcctgtctgcctcccgctgccatcaacatgctgtccgtggtgcccagctgtctatgctgaggggcacccacaggcctgtacaaagtcacgcttagtcctctggtctccctcctgcgttcattggtgaccaaagtctagagggggctgaagcaccagtcggggaggggagtgctggctactctgcatatgtgcacacctggctgggtcatgacagcacccgcgcttggctacaactttgcactgaagtgggtgccgggagcggggagaggccagggagtgcgagtaggcacttccaagcctgcagggaccgggggtgcttcctggacccccgagagtgcagggatgcctgggtccagagccgtggctgggtggccgcagctgcacctgggagcatggggctcctgcccagccgacttggtagggggcagggctcccgcccattcctggccygtgttagctccatggagtgcagcagccctggccacacctcccccattgcagctggtgtccccacagtggctgctccagatgggccaccacgtcctcactaattctaacatgtacatagaaatgcaaaagttctataatggagaaagtaatttagaacaaagttggtggagaagtcatactacttaactttaagacttactataaaatgacaataatcaaagctatatggtactggcattaacaagaaaatagaacaatagagcagaataccctggaaatagatctgcaccttattggctttttaatttatttattttattttattttattttattttatttttttgagacggagtctcgctctgtcgctcaggctggagtgcagtggcgcgatctcggctcactgcaagctccacctcctgggttcatgccattctcctgcctcagcctcccgagtagctgagactacaggcgcccaccacaacacctggctaattttttgtatttttagtagagacggggtttcactgtgttagggcctttgatttttgagacaggtgttaaagcaatccgatggggaaagaaatgtgttttcaagaagtggtgatacagtaagtagatatgtgctccatataggaaaagaagggaatcttgtgctgtacttcacctcatacaggaaaattgatttgagatgaatcatagaccttaatacagaagtgaaaaatcgtaaagttttaaaggaaaacaatatcttcatgacttgcgactargaagaaatttcttaaactgatkacagaaagcaataactataaaagaaaaatgatgttagacttcatttaaaaattctagccaggtgcagtggttcattcctgtaatctcagcattttgagaggtcaaggcaggaggatagcttgatcctaggagtttgagaccagcctgggcaacatagtgaaactccatctctacaaaatatttttaaaattagctggatgtggtggcacatgcctgtggtcccagttgcccaggaggcctgaacctaaaaggtcagggctgcagtgagatatgattgcaccactgcacttcaggctggatgacagagtgacaccctgtctctaaaaagaaaaattctgctcatcaagaggtactgatgaggaaatgaatagataagtcacacactgggagttaatatttgcaaaacatatgtctgacaaaggactcgtatctgacatrtacaaagaacttctacaactcagtaataaaatgacaaatactccaatttaaaaatgggcaaaagatttgaacaacacttcacaaattaagaatgccagcaatggctgggtgtggtggctcacgcttgtgatcccagcactttgggaggctgaggcaggcggatcacaaggtcaagagatcgagaccatcctggccaacatggtgaaaccctgtctctactaaaaatacaaaaattagcttggtgtggtggtacacgcctgtagtcccagctactggggaggctgaggcaggagaatcgcttcaacccgggaggtggaggttgcagtgagtcgagattgtgccactgtactccagcctggcgacagagcgagactctgtctcaaacaaamaaaaaaaaagaagaatgccagcagtataataagtgtaataatccttaacaatatctgttttcaggaaaatgcagattaaaagcacagtgagataccactgcatatcccccagatcagctgaaaatgaaaagactgacacaccaaatattggtgaagttgtagaggaactgcaatttctgaacatcgttggtgggaatataaaatgatacgaccattttgaaaaaawatagtggagcaatttttaaataaaagcacacatatgcctaccctgtaaccccatccctagatatttacccaagataaacaaaaatacatgtctatgcagacttgtaggtcgtattcatagaagcttatttgtaattgccaaaacctggaagcaacctagatgtccactgacagatgaatggataaactgtagcatatttatacaaaggtacactacttagcaataaaaaggaatgagcttgcacgaatctcaaaaacattatgcagagtgaaagaaacatcccatgaacaagtacatagtgtgctattccattttatgaaattgaagaacagacacatctaatctatggtgggagaaaattagaagaatggttgtttctgggattggcggtggtgtacacatttgtcaaaacccagcagatcttagcatatcaaggtaggccaattttacataaaaactaaaatattgaactctagttaatggtatgcagctgaagttttttttttttttttgagacagaggctcgctctgtcacccaggctggagtgcactggtgcgatctcggctcactgcaaactccgcctcccgagtagctgggactacaggcgcccgccaccacgcctggctaatttttttgtatttttagtagagacggggtttcaccatgttagccaggatggtctctatctcctgaccttgtgatccgcccgcctcagcctcccaaagtgctaggattayaggtgtgagccaccgcgcccagcccagctgaagtattaaagggtatatctgcaatttacattgaaaggcataaagcaagaagatgaattaatggctggatgcataggttgatatgtactaaagcaagtataagaaaatgttaatggtaggtggtcctctacatcttcaccaatatttggtgtggtcagtcttttactttcaactggtctggtgggtgtgcagttgtatctcactgtgctttcaatctgcattttcctgaaaacagatattgttgaggatgattayacttattgtacctattacactgctggcattcttaatttgtgaaatgttgttcaaatcttttgcccattttgaagttggggtacttgtcattttattattgagttgtagaagttctttgtatatctcagataccagtcctttttcagatatatgttttgcgaatattaactcccagtatgtgacttgtctaggtggtgggtatgtggatgttcatgctaaattccaaccttgtggtaaagtgtcaatatttttataatgggggcaaataactgtggacagttttttcaagtgctatggtataataaaaatcagtgtaaattgatggaaattgtattttcgtagcgtttttggtagcccttgttgcatggatgtgtcatggtagcctgataaagggccgtctgtggtggtgcctgtgtccctttgttttccttccttgtctcctttcttttatttaaatgtgygcaattttctctccttccttgaacaaaatagctcaaattatataaaaagtataaagttaaaastgaagtgttacttttggtaacttgctgaattatttacttctttaggtattggggtactctaagtaccaaaatttaaaacaaaaatcacagtctgtattctcgttttctgaaatcccagtggtctaatttctctttatttatgcccctagtgaaaatattttaaaaatctaaatttgtatgcacataaagttttcatttctcacacctcatatcatgcagcctgctgtcatggcctttccaagtgtgtgcggaatacraggctccctgctgggcacacggccggtctcagggttgctgtaaaatgttctacctcgtgttaaaaagaaaagatataattagcagcgtttgcattattgaaaatactctcattaatgtatattctgatgtaattttactctataattgctcaaaagagcctctctaaggctccagttgaaggtggagtsgggggccagggctggggtgtaggtgctaaattttcctccttcttagatgccattttccaaacccttctgcccaggtcttttaaaacagttggaccagacctgtgggagttaggaacattttcttctcttagtatttgaattttagccttgatatctctagctcatgattttattgaaaattctcactgctaactagtccttaagatatttttcctcatgtgatgttttgtcatgaagcccccttttaagacttccagttactttaagggaaacttgtaactatgattccgaaacaatcacttctcactggaaagctgagatgaaaatcctcatatctgcaaaggtagcaaatttatcaataaccgttggaggatgacataggtagaaatataggtctatttattgataacctagttttaaaattaataattatatgggaagatactttaagaaatggtgggggaaatatgctcatataagtgaaaatcatgcaagtaataactaagaaaaataaggaattaatagctaataatcatgagagtgactgttaagaccgtatcaggcctgctaaggagaacttaggtgtattctcttttcttcctccccccaccccttcatggtaataagcctgtggtgtcaatgaggttcccggggagatgcagtggtccagacgcagcttctcagaggggtagctgggtgtgtgtccaggtcactggtggccagaggctgcactcctaatagcagtactgsggcgagacacaaaagcaaccaggtttcgctgctgacagtccttcagagtcaatttctgaagtctcttaaatgaaaaacatgcatgctttggtgtggaattaattttaaaatcgtggcaaacaacttctcagattctttgcaattcaaaggtgctataactagggttcacgggttttattttaaaggtggttttctcctgttcatattcctgttcccactcctaaaggattccaaagcaggaatctagggttttcccagaagttaaagttcccctattgttcataaaatgattctaggtggaagacctctgttctttctctttaagtaggggggttggatttgttctgtgagtctgtgattttaacccagatgttataaacacaagattaaggacatcaatacayttaagatggaggattaacaaaataaggatatggtatctagaagaaaatttattttagggtggataatttaattgtactaagcaagtctggtaaagatgagaatgatcaaaagtagaatttttttgttctccgtgtatcatgaaatttcttaagcatgtctgtgttctcacagtgctttttaataagcaaagggcattttgaaagtatgaaatgcagtttgcatgggtaatccttaggaaagaaatgaggtttgaaaatgaaaatctcttttctggtagatgctgagatggggaaagaaactcatctaaaattaaacatcgtttgggctgggcacggtggctcacgcctgtaaccccagcactttgggaggccgaggtgggcggatcacgaggtcaggagatcgagatcatcctggctaacacggtgaaaccctgtctctacgaaaaatacaaaagattagaagattagccgggcgtggtggcgggcgcctgtagtcccagctactccggaggctgaggcgggagaatggcgtgaacctggaaggcggagcttgcagtgagccgagatcgcaccactgcactccagcctgggtgacagagcgagactctgtctcaaaataaatwaataaataaataaatwaataaataaataaataaattaaacatcttttgcttaatgcatggactcaggtcattgaaaaaaagttgcagttgtttccttagggccttccagctgagacttgaatgcgaggagtygtatctcagacacaacctgtgcggtgcctcagtttttcattggaagaaactgtcccttggagagagggaggttgtactatacctgatggctggcaggggacagagccttcacttcgtctcctggagcctgtgctgtctcccagactagggtggatggacttctcccaggttccggagaccctgagatggggacaactgcccacactcacatggtagcctggtggaagaatgcttgtacggtacaacgctccktggggacaaagtcgtcgtgccagccaattgttttttcccctttccagagtgtgagtgccagacaatgttctcatgacgycttttttttttatgactatttttattttggtcatcattttctttatattttatggaaagatatattgactggaatcacttagaatccaaatgccacctcaatgaaaaacttagaggaaaaaatagaattggtcattaaaattgttacrttctatagattatcagctttcaattgtatgagtaatacatggatrtattttctgttcatatatttaaaagtgaaatctaaagttttccctaatcccatctgtcttgttttgcctgtgcccttcctttctctcattcccacctctataatcactgtcaggagattgatctgctttttcaagtctttttgatatggtgttaatatagaaggggtcttactgtttttctttttctttctttctttccttccttccttccttctctctttctttctttctttctctttctctttctctctcttttttcccttcccttcccttttcccttcctttttcccctcccttttcccttcccttttttcctttctttcgtgatggggtcttgctctgtggcccaggctggaatgcagtggtgtgatcttggctcattacaacctctgcctccccattcaaacgattctcctgcctcagcctccaagtagctgggattacaggcgtgtgccaccacacctggctaatttttgtatttttagtagagatggggtttcaccatgttggccaggctgatctcgaactcctgacctcaagagatcctcccaaccgtaagagatcctcccaccttggcctccaaaagtattgggattacaggcgtgagccaccgcacctggtcatcttactgtatgtttctatgttgggataaaagattaagttgctatagtaagagacttgacagtaatttggctttaaaagaagggcatgtagttctccctcatgtgacagaacataataagtagtgtatgtaggtcattgggctgcagtgttccatgcagtcattcagagacccaggctgacaggggctctgccgtctttaacatgtgactttctaggtcagtcatctggtcattgcttttccacacagcagataagacaaaggagtggaaatagaggggtagagattttctcttaaacgtgtgaggctggagtggtatgcttcattggcaagaacctggtcctagcctgcctagctgaaaggaggggagtcagggagatgcactttgcagccaaaattctgttgccaagaaggggaaagtagatttggttggattttgatctgtgtttgctgctgtgttactctataattcagccatgtactctggaggtttagctatgttgtagccaattgatctatctcattcctttttactactgtacattataccacaataagagcatgctaygctttgtttagctgctagctgtttccttcctaatggatagttagctgatttctgttgtttttctctgagaaccaatgttgcaaygcccatcgaggaactctgccccccagatatatgtacatgtgtgatgtttctcttttatgggaactgggtcatcaagcatgtgtctttagtctggatagctattgttaaactgcctacaaactgagcagatctattaatatcagtttacacttgggcctttggggtttgagaggacctttttctctgcaaccatctgtgggctgatttttgcattttacttgtgataacaagggagggtaactgccccctttccatcatcccccaaaagggaaaaaatgagcactagcataaaagttctttggagaaatattatcggatagattcagtagagcagaacctttwaaaaaaaaaaaaaaaactactcaaattcttggcttggttttatagccagcatcatctactactaatttatttctacttagttacccaatttagcatcaatttaaaatctgtggttgaagatgatagttagagatgaaactgaattatttaaaggaaatgaaagttaccttttgatttagcaccagctgacatggagcaagattgcttttgaggactttatgatcgaaggaatgtgatccctgtgtttcctctgtgaatttgcccagtcatgaaaatagtcgtgtaaatgaaagggactccacctttcctagactggagtgggagatgtaatgcactcgcaacagcttatatctagtcagatgcacgattttaagtttgaacttgcagaaatccatctcatttttacaccagtcttttacgccacattgtacactaacctcacataaagtgtaatgaccgtcaaaatggctatttcccyaattataagataatattcataatcatgtcacatttgttgatgtttcctacctagtgtgtatcttcagtttatgtcttcaatttcctttttgaaaaaataatgaattcctccaagtctcaagttattggtttaatttycagcatttctgcccttccccttaccattcccttcccccacctctgccccgaaacatacatgtattattactttgtgctactaaccaaactaattttgtccagattgaaaggttataaaatgtatacaattcacgctcacaaaagtaagacagcacatgtgaattcaagaaactgttagttatgaagctctttacctttctgaaaggaaagtacttttaagcttcattgaatggatctgtgaaaaaagttgagtattattttacaataattttagactttcatgactggaaattaaatacagcagttttaaaggcatattttacttgarcttttacaagctcaggccatgtttttattaaaaaatcggactcagcaccttatatggagtacaataccagatgtgagatataagagaaattgctggggccacctgcttactgtgtattaaaaacttgtgtggtagctgatgttatataaagtatgtatgatagggaataattctgagttattagaccatatcagaatagtaagggtcactggtggtggaatgttcagaattttctatcacagtttactattcgtttggaacaaccagggttgaaatgatgaccctctgcttaaaaataacaataacaaaacggtacaaagactgaagaggttctctgggtatgtttaggagaggcaggagctggggaggagaaagccgaagagggtctgctccctaatctgatggctttgtgtggggcaagccacagagttctaatttatagagcttttctctgtttttctgaaaaacactttattgtttgtttttatgccattttctaacatttttcatctttttccatctttgcttctttcctgcttgcatctcctttctcggggtccccaggaacagagcttctgtttcaaggtttaaccggagtaggagacccaggagtctacaaacctgcctcagagccattcctttaaactggcgcgcattctggggcacataagtggggagtggtggagttttcagacccttagcctccacgtggactcytgcctgagattgatccgcccgagcagatgtcagtggtgggggtatcagcctgttttcttctcccacccactgccacgcaccccaccctgccccgccccacaactgacttttctcacccatccataatcttgctatggatggagcctgtctgagacggagcagcctctagggtggcagacagggcaacatgaaatattggtgtcagaaagcaaaagacaagattttaaaaaacactttttaatgatagataaggcatgatttttgacaaatatgttggaagcagtttaaagaattgagcagcattgctataataaaactcctttatttccctgtacttaggtatatggacaaggtttctcagtgttaacatctataaaaaatggaaagtagaaatagaattgatgttaaccttgtcttattctagccataagtaatattcatctatagaaaggataaaaaggcccattcatctttttaaaagatggatttccaatggatttcaagttatacataatacttttattaaaatttaaaacatttatattttgatccattctgtactattggtaattgtaactgaatcaattcataatatgaaaacttaacacttagagcttaatggttacaggaaataaaaactacaattttttgatgtgtatttttattgtagataaaacagagaagtaagacttttaagcaggattaggatggaattggggtgaagtagaattttcttgaaggaggaaagggaatgcaaatttttgactaaaggaaatgtttgttcatgtacttttttttttttttgagacgtagtctttgttgcccaggctggagtgcagtggcacaacctcggctcactgcagcctccatctcccaggttcaagtgattctcctgcctcagcctcccragtagctggaattacaggcrcacgccaccatgcccagctaatttttgtatttttagtagagacaaggtttcaccatgttggccaggctggtctcaaactcctgacctcaagtgatccgcccgcctcagcctcccaaagtgctggaattacaggcatgagccacgaaacccagcctgttcatgcactttagatgatggtggataacacatttttatgataatttgattcctttgaacacacttacaagagtgatatmatagtttcatttaaatgtcaatattgatcccaaaccagaaattgcatcctttgcaactrtcctagcttagacggaaaacttttatgtgaacttaaaaatatgcagggctttcatagttttttttgtaattctactaggggacatttaagccaaaggtttgaagcccactactttgtggcacatagctgagttccacaccacagcatcagagcatttcttaaccttgtggtgagtggttgagatgaattgttgggtcttgagcagcggaactttgccaagaagaaatgatacaaagagaatcttgaacaagtttaggcattttgcagtaattttcagttttcattactatgctgaaaagatctatctgtatgatatccagagatrtkgttgctgcagtgaggtctttaagtgcaaatctaatcacgttccttcctttctcaaaaactcacaggctttgcatttcagaacctacaaaatcccaaccctgagcatggcagggaagactgacaagcactggccccagcctctctttccagccttgaccctttctgtgaccccgcctgtgaccctcatgctttctgttttagtttcactaaacacctgctatttcctgaaactggatctttgaatgtgctgttcccatccctgattattccccacccccacattttccatctgattccttctcagtggatcggcgatggtcagttctctctcctctgcaagccttgctgatgtctccaggtggaatctccctgtttagagcttttatggtgctatttctaaatctctgtgcatcattctatgcgactgtttttatgtttcttcactgactctgcacccagaaagcaggattactgttttacttgttccatgtcatgcctgggagaataatgtrcactcatatttatgactgaacatacatttctgtctcatgggatttggggaatttgtagcaattaagaaatggtgaagccaggctcagtggcgcgatgtagtcccagctattcgggaagctgaagtgggaggatcgcttgaggcctgagcaacataatgagaccccgtcgctttaaaaaaaaaaaaaaaaagagagaaagagaaatgacaagtgttgaattaggggcgtaacatggcttggtggaaagaataatccagagactttgggacttcggggctcacttctgccattgctgaattccttccttttggtgagtctccaggcctttcctcttccttccccttccaggtccaagagatgtgatgtaggctctataaggctcatcagccatgcgagagcagcgatggtggcccaggccccgactgtaggagctgaaagacaggcgaccacaccacattacaggagggtgagaggaacggatgcggagaggttctgaacttgtaggtcaaaatgtgaaattcgaaagaatacccaaaaaacctaagaaaattttgtaaaggaaaatagatttattattaagcacatgaaaagatgcccaacatcagtagccatcagggagatgccaatcaaaaccacaatgagataccacctcacacctggggctgtcagaaaaaaggcagtaacaagtattcgcaaggatgtggagacactggaactcttccacactgttgatgggaatgtaaaatggggcagctgctttggaaaacaggcagcgccttgcaaggttaaatacagagttaaccatgtgatacagcaactctgctcctagacacctacccaagagagatgaaaacagaggtccacacaaaaacttgcatgtggatattcatggcatcacgcttcatgatagccaaaaggtgggaacaacccaaatgtccatcagtggatgaatggataaataaaatgtctagtcatatgatggaatattattgagccataaaaaggaatgcagtactgatgcatgctgtaccatggatgaaccttgaaaacattatgctaaaatgaaagaagtcagacacagaagaagaccacatgttgtgtgatttcatttataggaaatgcctaggataggcaaatccatggggatagtaagtataatagatyagtggttgccaggagattggttgaggggggtggaggagagaggaatggggagtggctgctaatgtgtgagggatttcttttgggggtgatgaatctggaattagatagtggaaatggttatacaactttgtgaaagtatcaagaccgttgagtcttatactttgaaagggtggatttatggtatttgaattatgtctcagtaaagctattatttttaaaaagacagatggtacagaaattctaaagcttacgtcagaagtgatgtaagagggaggtactcttttaaaagaaagtataagcaaacgaacacagtaacagaaaaccaaatactgtgtgttctcacttacaagtgggagctaaataatgagaaccaatgagcacaaagaggggaacaatgggccctgtggcctactggagggtagagggtgaaaggagggagaggatcaggaaaaaatctattgggtactaggcttagtacctgggtgacaagatggtctgtacaccaaacctctgacacgagtttgcctatattaaacaaacctgcacatgtacccctgaacctaaaagaaaagtttaaaaagaaaaaagaaagtataacaaacatcttttggtgaaagagtatttccatatctggaagcacctgagagcttgacggaccacataggtaaacaccacagggacgttacctgggcaaagggcagtctcttgtggtaggggaggaaggggagggctgtggagattgtagggtccagaatttttctcgtggttgccttcatttgggctgtagagacaccgcctgtgctaaaaggtaggttatatatgctctgtaatgagagggaccacatttcattccacttggtcatatcctgtctcccagcccttagcacagaacctggtcagcattccataaatgtctgttgaaataaaatgaagtaatttttctgtcaacataaccaccattgggagaggtgaaaaattgagaaaatgaatagaatgtgtttaacttattttcacactcattttattgaagctctytgtaaaaataaacccaggtggacggtaattgattgagtgataatttctaagtagcaaagtgttaaagtagataagtgcctcctactgtggagaaactgcctggccaaaatctgaaccgctgaggcgtttattttaacactgggaaacatttattaccctaaacttgtttccattcatacacagcatctatcataccagatgtgccgtgtctaaactagacatggtttagaaaatgcagtaatccctctctatcaggtgaatttctaagagaaataatttttcctttttatttattgctttttttcttcagcctctcctccttccaaaataaaatgaaagttgcaatttagcctaattcatttgacttacacaaaaattaatattaaattacagtgcatttcaattaaaagtaataattaaaatttgaacatctccaaataaaacttgaacttgggaccttattaacaataaaacatcagcagctttctctgcatgttgatctgaccagtcctggccacttttagtggctagtttggggaattagcctgacttcctggcgggtgtggcttcctggaggggtgtggcttcctggaggggtgtgacttcctggagggggcatggctttggagtctgatcaccctggcttgagtcccgccccgccactaactagctggctgaccttgggggaggttatgtgatctgtctctgcttagtttcctcatttgaaaaaaaggaatagtaatgcctactcagaataaggttgaaatcaaacactatattagacacaccaaabcaggtgctcaattaaaagtaacccctcccactgcaaaatgtactatatatagggttcgtgtgtgcacacatgcagggaacccgagcattctcatccagctaattctgacctagagcctgctgtagagtggactctgcatgaatattgattgagtaaatatgcgacctgcaaggaacaatttcaggatggggtcagggccagtgtgyccttaggcagccaggagcctccagtggtgtaattgattattgcgaaaccgtcttcttccccatctccttgtcactgtgcctgaatgcccacctgagcagcattgctgctgaaggcttccccacaaacatgtctgggaatggtggtttgtgaagcccaccttgggaccacttctattccttgttgaaatcctacagttttattttaaacgaaattcaaaaggttgagggatactcctgggtttggagttggatgccctttaaccacaagacaacttgtatgaaagtcactgctctgtgcagcaaggccactccagctgtgggtttgagacagacttttgaaactaaaagatgaaaatcttccatcttcctacctctgcaaaactcagtccacttacgcaaaagaacaagactacagttgtcctgctcccctctcctcttgtggaccctgtgggggtcccagtggagtttgcagagtggggagagctgagggtgcaaggtcagactcagaacaatggattcttcagcttagaaaccatttgtgagaagccagggaggttctaggagaaccaagtcaggaaaggaagaatgccaggacaaaagacaaaaaactccaagctggccaggcatggtggctcacgcctgtaatcccagcactttgggaggccaagcggggcagatcacgaggtcaggagtttgagaccagcctgaccaacatggtgaaaccccgtctctactaaaaatacaacaattagctgggcttggtggcacacgcctgtaatcccagctactcaggaggctgaggcaggagaatcgcttgaactcgggaggtggaggttacagtgagccaggatctcaccactgcaatccagcctgggcgacagagtgagactccatctcaaaacaaaacaaaaaacaaaaaactccaagccaaacattgggtgacttaggggcctcagaagaggtgtagcctgtagatgacaaacctggtaggaagtcctgccccagtggttcccagcctgttgtagatgtcccaagcctggggaggggatgatgcacgaggagcatttgggaactggctcactctgcaaatttgggtcatttagcctctggtgcgttgtgcatgggcttcctcttcacctggaaggcacttgccccgcacagctgcatggcctgctccctgtctcctgcagatgcccagaggtcctcatggcagggcgggctccctcccagcctgacaacagcagccaccacctcactgcaggcaccctccatccackattcttcaaggcctcctcmgcccttgatgtactgcgttatttaacatctgtctctgtctctatcacttaaaccttacaaagtcaggaactttgctcactgctgtatccctggaacttggatgacacagaggcacggtaaatatttgttgagtgagtggatgcatttcataaacatattcagtgctgtttcaatcgtttccccccaawcttctgttttctgtaagacattgatctttccaacctcagttttatcagtcatggcatctcttggaaacaaagcttggtggtgaggacagagtcccatcctgaaatttcaagtaatgtttagctagcaactcattgtggaattatctgtcttttagagatgtatcaaaaaggactccagataaatgagtgaattaaatattaaaatatgaatgaggaggagaggataaagtggatatttagtcatgctcttgatgagataagatttcttaagtttaagggcagtgaaagaaattttttataaaatcttgatgactttaaatatctaatgaaaatgtttaaaatataataaaaaataaacaagatcctggccaggcgcagtggctcacacctgtaatcccagcactttgggaggttgaggcgggtggatcattaggtcaggagttcaagaccagcctggccaatatggtgaaaccttgtctctattaaaaatacaaaaattagccgggtgtggtgcctcacgtctgtagtcccagctactcgggaggctgaggcaggagaatcacttgaacctgggagggagaggttgcattgagccgagattgcaccactgcacttcagcctgggtaacagagtgagactccatctcaaaaaacaacaacaacaaaaaacaaaaaaccaagatcctaaattaaatgatggccagctaaaaactgggcttttatggggaaaacaggatcactctgctttgttgaggggagcttggatgaagccaccagaacttgggccactgaratgccatcctaggagtgggagctctgagcaggagccccagcgagggccctggaggtttggggtgggtgaacaaaggaggatcgatgtgaggacattggcatgacagctcatcttcttaccaagccttgctaagactgctggtatcattggtaacctagctggacttcctccagtagtacacaaatgaaagaccaaacagcatgaattcttgtgaacctcttcggaataggactagtgaggagagtctagcaaggagacggaggttctctgtatctctcctaccccactcctgccttctgccattccacctacagctttggaatmggatcgaacaaacagaaaggttaaagaaagggaagaagaaaggatcttgagggtttgttcatgttctcctttgggaatatcgctgaagcaactgacctggaactggaatgaatacctggtgtggcttgggttttgaaacggcaatgttgaacaagagataagcaatcctgatacgggttttcaaacagacctccatattagagaagacttttaaacatgttgtttgacctattttggtagaggcatttattgctttgcatggcgccatgtaaactgaaatttgtgcatatcagaacagtgtcctcactttacactgtttgcaatggacatgcgtgactttcagttaatgtgggaccatgcaaagtgagaactgcctgcmttagcaaattactaatttaaggtaatcaaagtaagatgctgcctggagaaattaccttgtatgtatgtctgtgtgtgtgtgtggttttacgtgctagtaaatcttagttcctttgctctggttttctgatttcagaatacattagctgtttcatgcactggctcatacccgcctcataacttgaggtgagggaacttgatccctagatgtggttttctcttaactaggtgattattggtggtgggtgctatttggacattcatttttttttccttccttctatttttctttttgttgctggggggactgtgttaccttacctgatgatatacttcctagaacagtttatgtttttatgctttcttagtgtgttaattgggtctggagggtttcaaaggactactattggcggtggtgtgtgttatttatgtcttttcgacccatagaagccgtggtatttatttgcaatctgagatagattctattttggaaagtctcacctatgttcattgccatttgtatgtcctttaaaatgaaagccttccgcagtctaaatagcagaagtgttctgatacttcatagctgttttaaccctgtaggggtcccacctagatgttctggcctacctttttcccctccagttctcttccatgtgagcaagtctggagtagcgcttttcaaccaaatttgaccaatactttaaaaaagctttttgaaatataaaccacatcccatacaattcaaccacttaaagcatacaattaattcggtggtttttaaaattatattctcacttgtatggtcatcaccacactcaaatttagaactttttaaaatcaccccaaaaagaaaccctgtacccattagcagtcactccccttccccctgccccccacccaccagccctgggtgtcaccatctactttctgtttctatggatttgcctgttctggacatttcatagctatggaatcatataacatgcggcctttcacctctggcttctttgatctagcataatattttcaagattcacccatgttgtagcatgtccatatctctttttataacaaatattttgggccaggtgtgtgagcttacacctgtaatcccagcactttgggaagccaaggagggcagatcacttgagctcaagagtttgagaccagcctgggaaacacagaaaaaccccatctctacaaaaaaatacaaaaattagccaggtgtggtggcgtgcacctgtggtcccagctacttgggagactgagatgggagtatcgcctgagcctgggaggcagaggttgcagttagccatgattgtgccatttccagcctggacaatagagcgagatcctgtctacaaacaaacaaacattttgtactgccacctttaaccttttttttttttttttttttttttttaratggagtcttgctctgttgcccaggctggagtgcagtggtgtgatctcggctcactgcaacctccatctccctggttcaagcagttcccctgcctcagcttcccgagtagctgggattacaggcacacatcatcaggcccagctaattttttttttttttatttttagtagasacagggtttcaccatgttgacaagactggtctcgaactcctgacctcaggcaatccacccgctttggcctcccaaagtgctgggattacaggcgtgagccaccatgcgtggccaacctcttgaagttggatttatacattatataaacgatctatacagataattctaaaaaccaatatagaaataaaaagttaaagaaaataatatgcatcggaatatgtgctcatatctgactgttaagaagatgtgatgaaatagacacatgcacctatacaaaaaaaaaacatgaatatgatggctgcaaggtcttgggcagcctrgacactatgaatagtgtagcctgagatgatctggtctcagagtgsgaaacagmttgtgcttgtatggactttacccaactcccccttgatttacatggtggtcctatctttggaatatttagagtttaataccgctgtacagaaagtacktgctgtgtacccgcaaaaatagaatcagattctcaagtcagatcattgtgaacaagtatttcatctaaatgtgtgtccagtggaatattaaaaatttgttttaatagtgggagaatcttgttgtccagggctgaccttgtgtgttgcaagacatcgtgaatccttggcccctctgagcactacgttctggtcattatgacaaccagaaaaatagagttctgaaatgtcccctagggggcagtcctgcacccacagaggacctcgctatggggtccttcctgtgacctctgcttcctcagtgcactcagtacttaagcttttccccaccttgaactgctcaaattattagtcctactctcataaacaggaggaaaaccagcgcctaagaagtcactccccctgcagagctccaaggatctgtacagtctgcacttccttttgatgcttgtcttactgttccctgttaaaatgagctttttaaatgagcatcactctaagcgtccttccccgtgccccagatgtgcctgtctctggtgggaaccccgggagcttttgttcctgtggtagagtaatagggtgccattatagcagtgattgttcagtgttcttagttgtgtacccctaaaataattttgaaaatctgtaaatccccttacacgtgtttaagctgacatctaacagttctcatcaaaagcttaattgtaggatgtgatttttaacatatgacaaatattgacgttcaaagagtctcatgtctttctaaaatttatccaatgartttaaatgccatacctatttgatgcctgccattatccattaaaagttatatgagactcttttttaatagtcaaaatttcacatcgttattttatatttttgaactcatatttccattcttccccatagaacaatatactaatataacccatttttatgcttgaaaagtcttttattaatcactccaggatgcttttctacaacaaaaacaaatgttaattccatttggatggaattaatttttaaaaacagcattgccactcagtttttttgaaatgtttacaagttrtatgccaaaaattatattgcactctcatcagtaattatttttattgacttaataactcagttaggtcctccttcagttttgttgaaagcaaagaactggaacccacctgatttgtgaaagaatctgttactggttattagagttattcactttattaatatctgaaggatagttaagagactttactgtgacttaccaaattgttatcattatacctgttagtgctttagttaaagacatttagtttaatctgctgtacttaaaactatttgagaaaattgaaatggttaattttaatactacctcatcaatayaataacatacttaaaaaaacttgtattttatcccatgttttaaacatactgttataaaaaccttgatctgcacattttttgctgtcatcagaattttgtatgacctgtctgttgccccatggaggtttttacgcttccaggatacttccttccatagttacacccagggagggtgagtgctctccctttctttgtcacatgggagaaaggcagttgtttaaggagaggtttaaagatagagctttgtgtgcctgaactccaagctcgctccgaaataacgtgttttaggaaagcacatatgggagagtgaggctctgtggatttttttgcccttaagaccatttgtacctgtgtgccctcttgggaaggtgttttactgcagtttgaaggtggctctattttaggacattttcaatcctattcatcatgagaatctcgaggtgatagtgtgcactgagtcataggaagccaaaacccatggcaaaaagttatacttgcattgaaagatagagaatttgtgttttttcttttggtttccctccttctccttcttctgtgctgctgtgttccagaaattactggaggcaatttataaatctgtcaggtcctgaattaaaattgggaggggcaaaaggagaagctgcaccagagatgtgcactggcagggatgaggaagtgatgtcctcagcggggtcctgtgtctgagggatggtttcaggcaggttgcatctttgcaggaggtacctattgtgcactaggacttggggtggggtcctcaaggtcttagaatatggcttaacgatcaggctttagaggcagatgtaccaaggatctggtcctctgatccttctggtacccctctgagaggtgtgctgggctctgtgctggccatgaagtgtgaatgtgttttggagaaagaactctgtttccttactgctttcatttggcataggaattgtgagagccccttgtcagtggggcagcagctggcctggcaccaagcagcaggacctggggtgtttgttggctgctgaccagaattgtctgggaaatccagctgccctgtgcatggacttgagggcccctgggaagctgggtatggtcctctctgccaggagagaaagcctctggtcttcccgtgttagataacccagaggggctccmyggtaatgttcaggtaatccagcttatctcatcagttaggaatttgtctttagatttrctaacagctgatgtaaagaagtcaacaagtcacagattaaacttagagagacrcttagaaaaaagtagatgtattctggaaggtgagaccagacaggaatttctttgggatcttcatgaaagaattccatgtgagaacgaatggcatcctcagagcatctctgcagcaggaacagtcatgggtgccacagggtggcactttgacttataatctgtcgtcttaaaaaaatctctttaaattacttagacttacttaaatttaagcctagagcacccggcattcctacatggtctcccatgcaagtactagccaggcccaaccccgcttagcgtccgtgatcggacaagcagggtgcctgcgggctcttacggccatagactactgtttttctacctttttcctaatgtttaaaaatatatgtttctgaaatgtggaggactcttaagctttttaaaatttttattttttatttttgtgggtacacagtatgtgtatattttatggggtatatgggatattttgatacagacatgcaatgtgtaataatcacctcagggtaaatggggtgtccatcacctcaagcatttatcctttgtgttacaaacaatccaattatattcttttagttatttaaaaatgtacaattaaaatattttttactgtagtcaccctgttgtgctagcaaatattaggttttttccattctttctaactactattttgtccccattaaccatccccacctacctccctgccccccactacccttcccagcctctgatgaccatccatcaacatgagttcagtgttttaatttttagctcccacacataaataaggacatacaatgtttgtctttcgatgtctggcttatttcactgagcataatgacctccagttccgtccatgttgttgcaaatgacaatatcgcattcttttttgtggctggatagtgctccattgtgtatctgcagcacgttttctttgtccagtcatctgttgatggacgcttaggttgctcccaggtcttggctactgtgaataggctgcaataaacatgggagtgcagatagctcttcagtatcctggtttccattcttttgggtatatgcctaggattgggattgctggattgtatggtagctctattgaaatgtagaaggctcttaacctaatatctttctctctcataacctttttgtttttccatggagggaggggaggtacaaaaagcttttgctgagagaaaccacaaccagttttggagtacacagttcctaacccaccctgcccatcacctgtggccgtaggctacagcccctcaacaatggcatatcctcgcctcacccctccagcaggggtagtgtcctcgaaggcctctccctctctccctttgcttccctggctggcttgtagaccccgactggcccaggataggggagctcctcgctgtagattgagggtggaagggacacagaaaatgtagcatgaacatttgagggcaagaattcaaccaggactcacatacctgttgaccagtgtcaccctgctattcccttggactcaggacttgtcccccgaccccagaatcttaagaggtggctacggtccaaaaccctccctggggacacctctcccttcgccattccacaaggaagggaactgggaggaacaggggtctccggactcaaggcgctaaggacaggcatgcgtgtgtrgtccatgccccgtcaccctgctgaattggggctggcctctgggaggggcttcccmagacaaccctgcaagcctgtggagcttggggcttgggggtgcaggatagagagcagtctctccgattttctcrgactccctgaccaggtcaggggttacctagtacccagtgttcaccttccctacagcctgctgaattctaaagaggaaaccccacacagggccagacaggtgagctgccccggagttgcctccccattctcctttttgctccctccattctccgagtcccttctttagtagagaacatttgtagagaacatatagttatttaaagtgttggcaataatgttaaggtgcaaatccaagtctgactcacttttaatgtatttataggaaaaaaatgttaagcctttgacaggaaagtggccactgccacacagaatgttttctgaaaagtaatatccaaaagttactcactttcctattttcttctcacctctgctctctgccttcacctctgccaccagacccattttagggaggggagttgggcatgaaaagaagaaagttgaaaggaacaaaatcaagtataaaccatgagataagtacaaggaggccaggagaggaagcagaggagctttctcatagataaggcgtgcatccatgctgaggcccttttgcatcaaagtgagctcatgcatcttttaatatctgccggaagctaataagagtttgtccagtcaaggttcatgattgcaaacaacagaaattgacctgggccacttaagcagaaaagaaatgcactggaaggatgaatgttggagagctctcaatgccgaggggaaggtcagagaatcaggctaggaaagcaagccagaagccaaagacaggcagagccggatgctggcagttcagtgggggctggggtggatactgcccggtacttggctgtgccctgaccacccctacccctgcccccagcagaaactctaggctgccctggacatctttgccacactggctggcatccaggcaagcaagtctccagcctccgagccttccttccacccagatgcccccaggggctccttttctacccgcagaaggaggtaccagggtcccagcaaaaagctgccagagtcattcttttctgctggatcctaatgagattatgattacgttgaatggctttacaaaataaaccaaattctatttttaccttttgatgcaagtaaaatctatatgtatatgcacatatatttatgtgtaagctctttgtagtcagccagttggtgcaccatgatggatgcattgattgcagacaaaaaggccttttccagatatgtttctgagaacctgtggctctytaagtgggccaaactaggcatgtaacaaacttctttagtttaacattttctgggtcattgttaaaataacatagcttaaatggaatttattcacagtgctgttatatcaatatatgcgttattattttaggattagatttccatgtataacaagaatgttgttattgtcttcayaggggattttattattgccattctagaatggaccttttatttcttcgccatctccattttctccttcattaactaagaagcaaattagacttgcattgagccggtgtctgccaaatgttatttttagaagccttctcacctctttccccatcctttgggatttcttttttctttccttaaactctgttttgccttctcaaatattgcartmaaaatcagtaccatcccaatattagttcaatatgtaaagcagattttgtatttgctcttaggataggaaaggcctttctaagcttataaatccaagggaaaatgataaaagaaaaaggcagattgattggtctacaataataaaattctctgcattaagcagcactatgaaacaggttactaatggaggaaaaatagttggaatataatcataaaagtttaatattttcagtatacaaaaagctttacagttgakgctgggcgcggtggctcaagcctgtaatcccagcactttggaggctgaggcaggcagatcgtttgaggtcaagagttcaagatcagcctggccaacatggtaaaatcccctctctactaaaatacaaaaattagctgggcgtggtggggcgtgcctgtaatcccagctactcgggaggctgaggcaggagaattgcttgaactcgggaggcagaggttgcagtgagccgagattatgccactgcacttcagcctgggtgacagagctagactctgtttcaaaaaaaaaaaaaaaacaacaattatgtgggcaaagttatggagaaaagagtactctcatacattgtgcagaattaacacaatttttctggcatgtcttgtatatcacataccttaaaatgtgcgtgtattttgacccaacaattcagtttgtaggaatttaacccaagtagatgaagtgatgcaaagttttatatatgtggatgttcgtcgctttgccatttataatacagamaaatagaagctgttcttggtgtttaataatgggaggttaattgtatatccgtttgattaactgttgcacagcatttaaaaattagaaaagcagatcagaaaacaatacctattgtatgacccaattttgttttcgaaaagtaaataaacaaaaggtttctgcatgcattgaaagaagatgagagaattttgccagaatacatgaaaggcagttctctttggggaatagaattaggggagaaatttccccttatctctgcaattttctgaattaaaaaaaattcttatatgtattgctgttgtaaaacaggaagaaaacaataaaccctgttgaaagaaatagagtcacgtttttggcatatcagcaagaaaatcctctttctgctgtttttctctttctagcttagtgatagcccaactctttggagttttgacccaaatgttattttggttttacagtttatcatatgcaactttaaataaaaattactttggagaactttttttaattgacagtaccttagatatccattacttaccttatataaaatccagcaaactgactctaacgtaggatagtaaataagttgctggtattactgtctaagtgcttattctgactttctgtactgatgctgctggcaccatgaaattccttttcaatgattcatagaaacgagtctgtgctagaactcagatgatgttgattctagcgtgctgctatgactgctggctcttatttattgatcagtgtttataccaaatcctgtgctaaatacttgatttttaaaaaaggatttatgccctccaarcctttatttcaatgtcaaaaatgccatctctctcttctgaaygccaggtcgtcttgcccatctctcaggtttctgtctgaagctttataataaatgatggtaatttgattacaaaagagaaagataccatcattttatattgtggctgtggtggcgtttctaacatctctatttacaaaaggagagattttaaaattagtttaagctggatggctgaagcagtgcagcaaatgaattagattttttgtgtttttgaaaaggctacaaaaattgtgagagctgttcctggaatggccttttgaaaatccccttgcatcctggaagaaggatgagcggatggctctaaatctggyattgttggaccaatcgagccaagacggggtttgttgacaggaatgttgctgaagaaccacatggagttgagctgtttgccttcagatttagcagttgtttagacaagcaggactctttattcttgctcagacctgagtgagctgagcctcaaggttgaaaagtaaaaaggagatgtaagggaaaaacagttctttctcaacctagatttctgtgcggtatattgactttccttcagaattttctttgttctgaaaactatttcttcccattctgctgcctcaaggattcttcttttagaatttttttgtagtttcattatccactctttgtttcgccaaaaacaaagcaaataataacaacaacaatatcaacaacagcacaaaaactggatatacctccccccgaaaataaacaaatagaaacattcaggggaactgccctgcctggttggaaacaccagtctaggccccttggaaatgtcttggtggaggtcccaaaggtctcaggaggacagaggacctcgacatttattgagtgcctaatgtataggaactttaggaaaccaacatttattgagtgcctactgtgtattttctttaggaaaccaacatttattgactgccgctaggtatcaactttaggaagcaacatttattatgtgcctactatgtaccaactttacaaagccaacatttactgagtgcccaccacacatcaactttaggaaactaaatttatggagtgtctactatgtatcacttttaggaaaccaacatttatggagtacctactgtgtatcacctttaggaactcaacatttattgagtacctactttgtatcaacttttagagctctagaaatggcaatattcccattttatagatgaggaaacagaggcttcgaggtcactcagctaagaagtgcagaatttgaatctaggtttgcccaaccttggtttttttctctatataaagagagcagttgagtggtctgggccaccaagaagaggtggcataatatactccggtggccatcacagagctcataggaaggaagataggccaggcttatttcttactctcccagaggaggccattttgatgcctgtgatacttggacttttttttacctacttagcacaagtaacgattacacgtgcagctttaagagaaatgacctagtaatgttgagctggactgctctgcctctttgccgaccctcagtctctaagtcccgctccaccactgggggccaatttttgagcagcaagtgggccttagactttgtagcactggcctggaattaactgggagcgtgtccctgctactgcctctgacatgaatgagcctkgcataccatgagaatttcagttttacctacttagaagagggatagtgcagtttgccgttgtatttacggttcatgaaactcatgattttctaataaaggctggtgaaggtgcctagggtagaagyagcaaatgctcccagcagtcccatccgtacagctgggagcactgttgtgtgccgcggcacggaagtttctgaaggtgacacttgcccatgttcattatggcttagaaaggaagcccagtattcgggattcctcacctccctggtaatatggaacccgctttgatcggggccgagtggccggctgtgagcatgggaggggagggaaggaaaatgagtcatcgtgaggcaaaaggtgtgcagtgacttctttgaacagaaagttttcttccatttaagaagaataacaatcaaaaatggacaaaagttattaaacccatttcctgggtttaaaaaaaaattgtggttgtagaaaatgaaagcataaaaaatcaagtccatgtaagcttgaaaagaaacctgcagtggtggatttgcacatcggccttaattggcccaattgaccttctctgctgtatttacaattgccttaaaattgtaagcagatgtttgaaaccccgtctttaataggtctccaacatctgtttcaccactgctgctgcccaccaaagcagttgtaattagggagcaccgaatgcatacatctttccttatggacccaatcgatcggatttctccccacggtattaaagtcgacccttattcttgcttttatttgaatacattttscaatatattttcttacacaggacagtatccagccaagtacaaaaaaaaaaaaaagatagtcgttctccatactgaattgttaagatcatgtctgtataartcactgaccgtgagtgacaaagatgttcacacatacaagcacaaaaccctgaaaatagtgaaagcttttgttctttcctgtggcctgtgtattctaaactaggtgtttcctgcagaaatgatcaaaggtaaaatgtgggcatcttagaaggcgggaggaagcattatttatttatttatttatattttaatcaatagacttcacttcttagagcagtttaaggttaacagaaaaattgaacagagtatagagttcccatatactccctccctgtccttctgtctcgcccgccgaatccccctccgtttccccctattattaacatctttcattagtgtggtacatttattacaattgacgagcttctattcataaattgttgttgaagtccatcagttccacgatggctcattcctcgtgctgcggagttctatgggtgttgccaaatgtatagtgatacgtatccacctttacactattttatagtttctgtgccctaaacattccctgtgctgcaccggagagagggagcattattgactgaaatattctcatatgagcatgtgtttactttgagaagaaactatttctcatgcatagtgatccaaataagtagtcattttgacattttatctttcagagacagtgtcttgctctgtcacacaggctagagtgcagtggtatgatcatggctcactgcagcctcaatctcctgggctctagtgatcctcctgcctcagccttcccaacagctggtactacaagtgcatgccaccaaacccaggtaattttttagaatatttcatagtgacggggtctctctttgttgcccaggctggtcttgaactcctgggcttgaagcaggcctcctacctctcgacctccttaagtgttgggattacaggcatgagccactgcactcagcctagtttgacattttagaagtgaatgtacagaatttcagaaacttttgttttccagcatgctttatattttaaaataactttgcgcacactagtaactttgaattcactaagattagtaggatatgatgtatgcctaattagaaaattctgtacattactagtgttcatttaaattttgtacaaattattcttttgtagtttcttaaaagatgtatctttaatatctcaacagatacttctttttctttctttgtttcttttttcgggggtggggtgggcggggaggacagggtctctctctgtcgcccaggctagagtgctgtggcacgatcatggctcactggagtctcgacttcctgggctcatgtgatcgccctacctcagcctcccaagtagctgggactacagggacatgccaccacacctggctaattttttattttttgtggagacagggtcttgccatgtttcccaggctggtcttgaactcctggactcaagctatcctcctacattggccttccaaagtgttaggattgcagatgtgagccaccattctttctagtatcttaacagatatttcttttaaataacttgcctgaggcaagatgtgtttaattaaaagaagttgggtcccatttcagcttagtatcctgtggcgtgtcttttacctgaagattccttccatacagatggccaccaaagtctagaagataagacatggcaggaagaactgctcagtttcagacatgtgcaaagcaacagagagatgccaggcttagaaatgtaaagagatcattggtgagagaggatgttgctccctggcccggggcccctcatcctgctggttaggctgacgtaggtctgcagaatttttcagggcctcagagtagggtggtgtgggctaccctggattcgtggccttgaattgttttatcaataataaagatagtttttttggttgttgtttgtttttttgagactgagtcttgctctgttgcccagggtggagtgcagtggcacaatcttggcttactgcaacctccacctcccgggttcaagcaattctcgtgcctcagcctcccaagtagctggcattacaggcgtgcgtcaccacacccagccaacttcttttgtatttttagtagaaatgaggttttgcattgttggccaggctggtctcgaactcctggcctcatgtgatctgcccaccttggcctcccgaagtgctgggattatagggatgagccactgtgcctggccagagagtttcttagaagttttattgaagtataatatgcctccagaaaagtgcacacatcctgagggtgcagcatttgaatttttacggcctaaactctctcacatgtagccagatcaagaaatgggttccagcagtcagaggcaccttcaggtcccttcccatctgcatcctccctttggggaacactgtcctgatttctgacgctatcttagttttgcctggttttatattttataccgatggaaacatacaccatggcctcttgcattctgacttgtcatctgtgttgttgctatagtttgttcattctcattgccataaaatacttctttgggtgagtatcccacaatttgtttatcttctactattaacgggcatttgggttgtttctggtttggggctattatgaatcatgctgttatgaaccatctgattcttttggtgaacatatgtaagcatttttgttgagtgtatacccaggagtagaattgctgggttgtgaggtatgcatatgtcagccttagtgggtcctacctagcagttttccaatgagctgtggatgacagctgagggtcattagactttcaggagtgacattcgaattctctgacttgatgtccccgtgttatcaatgacaagcatttctgggatgccaggcctaccctgtggctgcagaacagagcccagccagttgaggaacatagctcacrtcttagtwgcctgtgaagccaggcgtttgcctactgctttcacaagattagttcacaagaatcgtacgttgcattatccccattttacagatgagaagcctgcctgaagatgatagtgttttgcccaagatgatactgtttcccagcctaggattttgactcccgtgctcttagccaccacgttgtgcagccctagcccttgccatcttcacacacagattgaatcctcttgctttccacaaaagttgcgttatgtggcttctagatcacgtggcagaggccatcgtcctatcctttacacagacctcacatgaccatagcattttactcttagagcagtaataataaataatgtactcgtggtttgggctatttattatcgcatttcatgaactctggatcttgacacacattgtaaattgtctctactattcggacagtggtttagttttgtttgttttgtttgaagacagacaaattccccgaaaagccaaaagaatatccttggttaacatatttgacccattaaaacttaaatataagccaattcggttgaaatatttttagcaaattaagaaatacctttaatttatggctgtaagatggaaaagaactaaatgcttccraaaggttttttcacgcctaagtccctgtcgttttaaaatttaaggtcattttaattttttaattgaggtataatttatatactataaaatacccaccccaaacagtttcatctttatattgttgtcccacccctctttgaaaaaacaaaaatcctcatggatttttcttccactgaagattacaaatttaatctaaaagcaatattgtggcctggtgctgtggctcacacctgtaatcccagcactttgggaggccaaggcaggcagatcacctgaggtcaagagttcaagaccagcctggccaacatggtgaaaccccatctctactaaaaatataaaaattagccaggcgtggtggtgggcgcctgtaatcccagctattcgggaggctgaggcggcagaatctcttgaacctgggaggcggaggttgaagtgagccaagatcacgccattgcactccagcctgggcaacaagagcaaaaaactccatctcaaaaaaattaattaattgaaataaaataaaagcaamattgtaatttagtctcatcatataggaagattactttataatctttataatgacgatatgtcactacttagttttaaaatatgggagacatttattatttttgtggctcatgatttcactataagaggtccaaaaatatttcaaaggaaaccattactataaaatttcttcagatgaatccttttttagatacctgaatatttttccatagaggatatttttggagtccccatcaatagttatgaaggcagtacttcaacactaaaggtagactgaattattattttaaaaaaatttttttaaatattcacctaccttttctaatgataggttatttttgtatttaggaatagtaatttttttaaagccaagtataaatgttaggcaatatggctatttcatgtagttctatgattatgtaaaaattagcaataaagcttctactaggataagtaaagttacaagatgttacaagcttctcaaagaaatccacacatgcttttcctgtttgtgagctatttaaggtacatccttaacctttattatgagtgatggagccatagtgaagattagtttgtttatgttttgaagtttttcttgctccttggaaagcacttccaaaattgtgctaacaaattacaagtaggccatttataagctacataacacttttgttattacgwcatcttggcctccagcgaaataaatgttaacgttagaatttgtcatttaagttcacaggcagcatcatgtggctctctggagttttacttgtgttaatgtagttgggttggaaaatgatcttagggatccatatttgggtttgaaggttcttctgtctgaagacattttggaattttcagaaacatgtgtgtaggatattgccagtgagctggaccatcttcttaagaactttttgactgttgggatgtcttctgtgatgtgcctgttaatttcttttgcctgtattttgtgtgttggctttgaagttcttccttctggcatatatctggtcccctctcaggtcatctgctgctatctgctctccctcagtcctttcttccctgggctaccacctctcccgtctcccttctttcaagaattacactccatcagtgagcaaagcgtacttatgtttatatctagaaagaaaagcaagttcttgcaaaaatagtgagtggttacagtgtgtgtgagacatttcagagtcaggcctcttcccaggctacctcctagcatgtgactccaaagaagatggtcagcagtttcagattcatttctgaaagtgagccattcacrttggactggatccagtatccactaaaccaacacggagaagtgtgtcattttttcatgaagtggacatgctaatgctgtccattgacctctcgtatttttcagccgtgtgtatttgcacagcaatttcatatgtgaagcagtgcctgtgtttaatcccatttaatctaattgtagagaacaaatgcttagattgctctaaagacgggaggttggtccctgttaactgtttaagtgatgctcctttgctgctccaaaaattagagtaatatatctgtgtatctggaatgtacgtttcttggtgctgctgtaacaaattcctgcaaactggcagcttaaaacagctgaaaataattctctgtcggttctggaggccacaagtctgaaatcaaggtgtcagcagggccacactccctctggaggctccaggggaggccccgttccttgccccttccagcttcttgtggctttaggcattccttggcttgtggctatttcactgcaatctctacccccgtcttcatgtgaactcctctgtgtgtgtgtgtgtcttctccttttctgtctctctctttttttttttttttcttttgagacggagtctcgctctgtcgcccaggctggagtgcagtggcgtgatcttggctcactgcaagctctgcctcccgggttcacgtcattctcctgcctcagcctcccgagtagctgcgactgcaggcacccatcacctctcccggctaatttttgtatttttagtagagacagagtttcaccgtgttggccaggatggtctcgatctcctgaccttgtgatctgcccgcctcggcctcccaaagtgctgagattacaggcatgaaccactgcacctggctaagattgtaatttaattctattctatctgcaaagaccctttttccaagtaagtaaacatttacagaatgtgggtactaggagttggttgtgggggtgtgtgtgtgtgtgtgtgtgtgtgtgtgtgatcattcaccccactgcagaaagaaagaaaactcccattgtgaccagctacctggtggcaggaagggcagaagggcaagagggcaagggaatgtaagtgtctagtttcctgggagggtggaggctgcgtcccagcgttgggctccaggtgagctcagaatgtcttcctctgctgctttgaaatccagttgctgcmttggttacactagtcaaccaaaaatgggatgaaatgacctaaaaaaaatagtttctaaatattatccggcttaaaaattggcctggatttcccttttacttaagaaagaggaaagaaaaacttgggaaacttatcaagtgtataaatggtcattacctaaggattattcagatattggcttcaggaaacatatttattttgttttcaatgtgtattttgttgccatttcttcccytctccgctgtaagaacttggttagctgcagaatgcatcagagtatcaacaggggctgggctggaccgagcccacccaggcaggagtggctttcattacttggcttgatacaatgttcatgattgcagccgacttgcaaatttccctaaaattcactcatttcttcatgtttgaccactgtgcatcttactaatccttattcttctatgggccaaccttactaagaaaataatttttttaagtataattatattcctgctgctaattttgtgagtttgatattaaagagttatagataatagtacccactagataagttaacattaattccctcttgattaatagtattttcacaaggatttataattcagacactttcattctgtttggactttttcckacttgacgtggacatggccaagatgaagttttttgtgtgctgtatttttaaatgtctaaagtagaaagatgatgtgtagttggggatttcgagttgcctattagcagaagtttctatttaaaaggatccccacttattaaaactttacagtatagcatatagtttgtataatgcttcaggttttcacaaaacttttataaatagctttctgaacaataagcaggtcaggtcccaataccaagaatgtcaaatgccatgcagttttttatttgtttgttttgttttttgagacggactcttgctctgttgcccaggctggagtgcagtggcacaatcttggctcactgcaacctcygcctcccaggttcaagcgattcttctgcctcagcctccagagtagctgggattacaggcacatgccaccacgcctggctaatttttgtatttttgtagacatggggtttcaccatgttggccaggctggtcttgaactcatgacctcaggtgatccacctgcctcagtctcccaaagtgctggattacaggcgtgaaccaccgtgcccagccgccgtgcagtttttatatgtttattgacattcaacaggcaattttggtccagttctgactacatgagaaagaagcttagatcatgccttgacacttaccgccttaaaaaaaattccctgatgagcagtgatggtgagcattttttcatgtgttttttggctgcataaatgtcttcttttgagaagtgtctgttcatgtcctttgcccactttttgatggggttgtttgtttttttcttgtaaatttgtttgagttcattgtagattctggatattagccctttgtcagatgagtaggttgcgaaaattttctcccattttgtgggttgcctgttcactctgatggtagtttcttttgctgtgcagggaattgaacaatgagaacacatggacacaggaagggaaacatcatactctggggactgttgtggggtggggggaggggggagggatagcattgggagatatacctaatgctagatgacgagttagtgggtgcagcgcaccagcatgtcacatgtatacatatgtaactaacctgcacattgtgcacatgtaccctaaaacttaaagtataataaaaaaaaattccctcaggattttcactgtcctggtaagcaaataatcatcctgttgcagccccagggtaagtgtagctcttgctcctgtcttgcagtgggagaggtgactgtggaaggacatcggcccttaccagtatggagctgtgtaagtggggccgtgttccagaatagttttgtcacagtgactaggagattttctcgggggacttttgtgggactctgctacgaatacaagcaaaccgtaataagaatgaaggttcggacgtggcactggggataggagtggggagagaccatgagcagatttgcatgacattcttgggtaaggtgatgtgttagttgtgggcagggtggtggtggggtgtagagggccactctaagccaggggactcctggtttgattttaaaaatgggaatcaggtctttgtgggtattaagaacacacaaaagggcccatggaaagagcatcacctctgacatgcccgaaggaatgttctcatgtctaaaattgtctaggtcctcctcattgctcacaaaacatgacatcttcacagaggctaattagactactccatggcatgcctactggggacagctgatccagggtgtgtggcagcatcttactcctgtgacagctgattctgccctggattgggagaggtgcccagggccataaactcgggagagcagggaggctgggtgtggcctgcctgggccagtgagagtggagctcctccccagagtctcacagtgagtaggatactaccctgcagcccagagctgctgtctgaactatatttggatttacaggctagggagggacagagtgataaaattactgcttccaactgtgatctagagaaattatgacttcatagtccagctttgacatatgctctggatttcatcttactgctaataaaatacattttagttgtcatttggctttaatcaagtttttgacccaaaaggtgatagttatgattattgcttttgccgcctgatttctgtggggtttgtataggcatattcgtactgaaaagatccttggctccataaaactcttgacataatgtgaaattaaaatctttatgactgtatttaggaaagactaaaccatcagtgactttactgatcatctgaatcagacgtcttggaatcccccatttactttaaatcttagaagcagttgcctgctctgctagaaatggctcttcccccagcctgtggcttttgtccggccaggacattggggaatgggtgagatgaggctgaagaccctcacctgggaatctcgagaatcttctgttctcgagaaggcttctaacaggtgtcagagtgcttagcctractcctgaccccccacacttcctgctgctcattgctttctccaaagaagttattctcatctttcagcctaaaaatgtatttttgacctcagaataggatgccttagaagtgtctgctggggccaggtgtggtggctcatgcctgtaatcccagcactatgggaggccgaggcaggcggatcacgaggtcaagagattgagaccatcctggccaacatggtgaaaccccatctctactaaaaatacaaaaattagctgggcatgctggcatgtgcctgtagtcccagctacacaggaggctgaggcaggagactcgcttgaacccaggaggcagaggttgcagtgagccaagatcgtgccactgcactccagcctggcgacagagtgagactccgtctcaaaaaaaaaagtgtttgctggaagagtctcttcatacacagcctcaatctgtgggaccactgaaagcagccagacagtgtcaggctcggccacccctgggctcagtcactcttgggattggcctctctggcgcttggccactcgcccacctggctactttcaatgcttggcccatcttggtcacacttggacatgctcatgctggtgctcagtgacattcccttttctcccctcatgcacactcccacagactcccacacactcacaaggagaaaagaaggaagttcacttccacatttggaatctggaacctcattacctcagtgtgtagaacttaggtgagtatagtgactcccagtattcatgaagagctgcagtgtgtcaggggataaatacagctatccttcagtatctgtgagggattggttccaggaccccggcgtacgccaaagtccgtgcgtactcaagtctggcagtgagccctgtggaaccctcgcctaggaaaagtcagccctctgtacattacaggttttgcgtcccaccaatactatattttcagtctgcgtttggttggaaaagaatccacgtataagtggacccatgcagttccaacctgtgtcattcacaggtccactgtactaaattctagcaaatcctcttcaatccgggcagttgtgtaaaggagaatcatctcttcccaaaactcacgtccatagctcgtgagcaaattttgatcgcaggaaatattttcaagctgcagttgttccagtagtcattttagttgggaatctttggctcctwtaccacttgcttatgtttgaacttcttcattttatctgatttatccctccctggtttgactgatgccttatcctcttctgtttatttgaggtatttccacaacttattctgcctttactgaatattaaaatctccatacagagtcagtgtccaaatcaaatatatatatatatatatataatttttttttagacagtctccaactctctccctcaggctggagtgcagtggcatgatcttggctcactgcaacctccacctcccaggttcaagcaattctcctgcttcagcttcccgagtagctgggattacaggtgcatgccactacatctggcttatttttgtatttttattagtggcagggcttcaccatgttggccaggctggtcttgaactcctgacctcaagtgatccacccaccttggcctcccaaagtgctgagattacaggtgtgagccattgcacccggccaatcctagcactttgggaggcctaggtaggaggatcacttgagcccaggagttcaagaaccagcctgggcaacaaagtgagacctcatctctactaaaattaaaaaaaaaaaaatttagctaggcatggtggcatgtgcctgtagtccyagcaggttgggaagctgagctgggaggatcacttgagcctgggaagtcaaggctgctatggactgattgtgccactgtacaccagcctgggtgaccttgcctaaaaaaaaaaaatggtcttctatttttgggtgctgtgtggcctctgtctcatggtattcccttcctttgcccttctagaagctggaaaataaggaacaagctcttcattctccttagttgtctaagcagtggaaccaaaagtgtggtgctagagaaggcagctgtgcatctgaggctccttacaaccctttgaaggttcaggctgtgatgagggctgcctttggagggaacatccttttttgtacctaccttcaaggacacattttactgactcttgaattagcatgatattgctaaatgagagaaagtaattccaagatcatgttttaaagaaaacagtgaacaaagagttagggaatggcctcccatgtcagagctgaggctttgccttggactagctgtgtgactttgggcaagtcacttaacctttctatgccttattttccctatctgtaaagtgaagatactgtgagtgtcattgttgtgagtattaaatgagcaatggctgtaaagtgaacagaactgtgtctggcatgtgctaatctagcctagactgtgagtgaggtcgggaagctggagccctcttgtactttactgtttcattgctcaccagctcccttccaacccttaactgagtctcatgttaaagagaaaagcttcagagttgtgtgatctatattagaatcttcatcgagattctctgtgctgtgtaatttcacctgctgagattctggctatgtgcatagtcagggaaatckttgtcttccttttctttccatcctcttcctcctcatcagccatctcttctacctttttgccctttcgttaggttataacttggagcacatacagccagaggacacttgcccagtaataggacagaggagaggcgccgaggcatatctagccgcaacccacccggctggccttaaaggaccaggccttcagtatctaattgaacctaaatgccaatttatgtgcaagaacacatccttcagggaactgaaaggattttttttccccttccaccgtggtgatggaaaggctgaaaatctgagctgtgaaagcttagctgtgccctgtgtcctgggctccttgtcttgtgtctaatcaatgatctcgatgctattagctcagggcaggtcattagggagcatttctagcgaaattgctcagagccagtgatttagaaccagttctgaaactgaaatataggaaattgtatttaaaaaaaattttaaatatattcccttctactcataaaggagacctaaccctaaaccactccatacctaaatagaatattttgtttccagatgacatagctgctgtgatacaataactttattttgattgatttattgttttagagttggagtcttgctctgttgcccaggctgaagtgcagtggcatgatcttggctcactgcaacctccacctcccaggttcaagtgattctcctacctcagcctcctgagtagctgggactacaggtgcatgccaccacacctggctaatgttttttgtatttttagtagagacagggtttcaccatgttggccaggctggtctcgaactcctgacctgtagtgatctgcccacctcgccctcccaaagtgctgagattacaggtgtgagccaccatgccggcccagtaactttatttctatattctgagacatgtaatttatttccttccctttggctaccctcaaagatttctatgtcttcccacttccttgaacactttcaagagagctttaaagaaacgttttgcataacttgtcatgtccttatttagccatatgagagagttaattgtaatcaggagaaccctacatctcttatttgatttaatatcaggaaacaatgttaaaaaaaatagattggagcttctacttgaataaggccatgggatcacgtgttgagtttatcttctccccttcttaaaaccctccaaaaagattatacaaaactaatagttaaacatctacaacatcaaaggaaataaaggtggttatcagcagataagatttaaaccgaatttggggagatgaaaagcaggtggaggatgacaatgatgaagctgccttagggtgattcctccctttaaagaaatggaatggctttctggggataactagggtagatacctcagagtaaaagcctcctcatcctggatgtagggatcacctgtgtctaccctttttttttttttttttttttttgagagagggtctcactctgttgcccaggctggagtacagtggcatcatcatggctcactgcagcctcaacttccaggggcttgtccagagttgttgagactacagatgtgtgccaccatgccctgctaattttttaaactttttttagagacaaggtttcgggtttcatcatgttgcccaggctggtctcgaacccctaggctcaagcgatcagcccacctcagtctcccaaaatgctgggattacaggcatgaaccaccgcacctggcccctgtctccacttttactaaagtgaaacctgtctattgacaagccctatgtgctacacagagctccctgctgctaagtctgtagctacagatacagagaaagatatattctgacaagaaacacgggatctctgagtctaagaacaaagcacgcattcctcgcagagctttttaatgctcccgttaccacaggactggatgggaaaaggctgatgttactctgtgtgttatcttgcgagggctgctgggacaaagtaccacagcctggggtagcttcaacaacagacattcatttctcccagctctgaaggccagaagtccaggataaggtgtcagcagggctggctccttctgaggccgtgagagaggctctgttccgggcccctctctctggcttgtagaggctgtcgtctccctgtgtgttcctgkcacctctcctgtgtgtgtgtctgtgttcaaatgtcctcttcttacaaggacacgagtcatactggattaggacccacctgaattacctcatgttaacttaatcgcctctggaaagaccctgtctctaaatacagttccattttgaggtgctgaggttgaggacttcaatatctgaatttttagggggacacagttcagcctctaaccctgtgcatgtgcagccgggttgtactacaggagagggtccctaaaccatcagacgtgagctcatatagtgtagctgcgtgcctgcccctccttccctctgcgggagagggccggggagaggggctggcttcactctggaacttaagtaagtcctctctgggaagggaatagagtggggagatctctcaggttttttagtatcttgaaataaaagcaaattacatgagggaggagacagggtcttttttattttgatactagaaacatcttccattggatggcaccgtgaacccattgagaaggaaatgtaatcctaacaaactaggattataaatgtctgcatagttacaaatatctgtatagtatattaatattcagtaatatctagtaatatgacaatrtttatagtaatacctgtatattatgcattctcttgtaataagtatcatctgtatagttaatactgtaaattatgtttatatgtcatgacacacaaaattggaatgtgtcaacttaatgaatctggagacaaatcatgaaagataacagttgctactgaacagagtgtgaatgttactacatttgacaaggtaaagggtgacagaggtgggcggggaagcagaggaggggaaagggactgaaaagctgagtgtggttgtgcttctcatacaaactgagcagcaagacatacatctcataggtaaaacagtgaagtacgctatttggagtttcacaggaatccagtagaactgacaacagatgcgtaagtgagcaggaggagagatggatgatgtgtgagctagatcctaacagcaagaatccaaagacaatgtgtaaagttgccaaaccatgaaaaccagtaaggggccgttggaaccagttaaataaaacaagctgcatttcagaaagcatttctcctgttagtttaggaacttggctagatcccaagggactttttaatcctgcattttccttgattagtagtagcatagtctaatcattgtgcatttgtctcccatgggtggttcaaaaattttaaaatggatgttttatttattattttctagaaactaggttttgcagcaatatttttattgcattttattttccagtaagtgagatcaaagtagtgatcctgaaaattatgcttatggtggacttaagtaaaaaggatttatgcaatcaaatttacagattgtttttttattgatcacaacttttatgctagggatcaattttaatctacttggcatctttaattgcttatccacttaaaaaattaactctggtgaatggaagaaccccttctaatgtgaattgtttttgctgttagtgaaaatatggtattatgtatctattgcagttagagggaaaagaagaattacttcataggctattcttcttttggaaaaaaggaagaataaaggaaaaaaagagttttgttcagcaccttattaacgtttccagggtgttgatcctgccgactccagtgaagtataaccatttattcactcattcahtcattcattcattcattcattcattcattcattccacacacttctgaatgccatcagtgaaccaagtactgaactctagagttatgagactaaatttttttaaataaattatggcctattagcaaagctcagctcccttgttgatattccctatactggttccctgctgttattcagttacttctgaacccgctgaatcagacctgaacttgcacacccaacaacattaaatatccttctcctggttctcagaacatgaaacaactgtagaaaaatactcgccactgaggccaggtatggtggctcacacctgtaatcccagcactttggggggccaaggcaggcagatcacgaggtcaggagatcaagaccatcctggctaacacggtgaaaccccatctctactaaagatacaaaaaattagctgggtgtggtggcgggagcctgtagtcccagctacttgggaggctgaggcaggagaatggtgtgaacccgggaggtggagcttgcagtgagccaagatcacgccactgcactccagcctggatgacccagtgagactctgtctcaaaaaaaaaaaaaagaaagaaagaaaaagaaaaatacttaccactgagtttgggggtacgaaaaggatagggggtataatttaaagaaaatccctaaaggtcaccaaggtttcttcaatgagcacactcaagttgtaagtgagaagtattgcccccggagaactgagtttccttctgctgtaggaattgtatgcccatctctttcagctcggtggttattttattgtttttgttttttgttggtttttttttttttttgagatggagtctcaccttcttgcccaggctggagtgcagtggcgcgatcttggttcactgcaacctccacctcccaggttcaagtgattctcctgcctcagcctcccgagtagctgggattacaggcatctgccacyatgcctggctaattttttttttgtatttttagtagagacggggtttcaccaygttggccaggctggtcttgaactcctgacctcaggtgatccgctcgccttggcrtcccaaagtgctgggattacaagtgtgagccaccgtgcccggcctcagctcagcagtatttttgacttaacagctgagtatgctcgctgaagaacatctaatggccttcagtccttttctttaactttacactcctcatccttttttactcccaaaacagacttccagtataagctccccatggattcttcaaggcacctctatttcccagcctgccagcaagcatcagtgttctcctgtgtctattgggccgccttaagcatgccattatcctgtgaccctccccgccacaggtctgtgttattagacatccttgtagcaccctgctatccatgcatgtgactcctttttttctgctcttctttgtttcttttgcctataatcaggctcagaccatgtttatacctattaagccaacactggatcctctgtcacctctgtttcccctctttctctcttttgaatatttgttctgtattcaccatgtaaacttttactgggaggcagtatagcagaatggagtcccagttccgctgttaactgtgtaaacttggacaagcttcctcatttgtaaaatgggagtcatgatattacatatttcatttatggcattgtggaaagttcattagcagtgcatagcgtgaattgtaacttcatatatacagccattctagaaaatgtggtayagtagaatgttactatttaccctgtgctagttggagatgagggggatatgtggtgggccttgtagcagttctaggacatctgaacagaaagggatttaatgcagctactttttacccttttggaaaaaaggaagcatgaaggcaagaaaagcagagtttcgttcagcaccttctttaacccttccagggggttgatcctgcctgctccagtgaagcataacgatccattcatttgtccattcattccacaaacttctgagtgccatcagtgtagcgagtactgaactctggagatscacgtatctcactgggagatcagtatgagggctggaggtgctgactccagaccaactccaggaacaactcctagaaaacagccaccgaagtgggccactgctgaggaaggggtgggactggggacctgtatttcaaatgttggcttaaaagaactgaaattcatctaggcttgttaggaactgtttcacragtgtgcagtgtaatacaaaattgaggattttgatagatttcccatctttgttactcttaacgttaaaatcatagttcacagagtgaagttggtgggattctttcatttgtttctaattaaaaaaaaaaaataacttcttactctaattccttgtacccagtgaagaaactccctctgccttccaggtgggtctattccttggttgttgggagagagtgtcccgccctttactgtccccactctatggctcccctgccctcttaggtgttggttggcagaatgccagcyttctagtcccctcttcattgtttgaagtcatatatcaccagcaggtgtcttttatccgtgaaattgttctagtctctaacttgctgcttattgtctagaagctgtatccccagagtcatgctgyggcattgccgacgtctggagatggtggagatgcatatgtggcctgcaggtgacatcaggatcagccaccagtgctctgccttacgctagctctgccagagtcctggggcgggggtgacctggggataaatctcgagcaaggttggtagaaccagacccacctcctgcattttaatggaaacaagaaggctaacttacttggaagatgaatgaagtgtatttttttaatcacgtagaacaatatatatgtatatttacgtgtacacacacacacatacacacacacaccagaaccaaaccagtctcaagaataggttaacacaaagacaataataataacaattattattattttaattgagatagagtctcactctgttgtccaggctggagtgcagtggtgtgatcttgacttactgcagctgtgaccttctaggctcaagtgatcctcccgcctcagcckctcaagtagccaggaccagagacacatcctaccacacctggatcagtttcgtatttattttttatagagacargacctctcactatgttgtccaggctggttccaaattcctggcctcaagcagtcctcttgcctcagtttcccaaagttctagggtgtgatccactgcacctggcctcatactataatttccttagtggtctccctgctattagatattgaggtaatttctaattcttgtgattctgaagctacattgaacatttttatgtcaaagtctttctttctttcaaaaagaagttttaggacaaactcaagaaacaaggtcgcaagtgagtgaccataagcatgccaatgactgcctgtagatcattactgccagagcactttcatgcaccaaatgtgagcatgaccatttggctgccrtctcttcagtgatgggaaaaggagggaaatgtgacttcctttattgttttgtgtttcttccctggttaggaaagttggcgtgttcttcattttgttaattatgttagtacctctcacccaagtttttcctgttggttctagttctcgtaaaatccctctgtggaggaagtctgtaccgtgtatggacaaaacaaaacctagaaaaagcagaaattgcctgagatgccagagatggcatcagagttttgtttgtttgtttgttttttgctttaagttctgggatacatgtgcagaatgtgcaggttaggtaaatgtgtgtcatggtggtttgctgcacctattaatccgtcacttgggtattaagccctacatgcattagctgtttgttctgatgctctccctccccttttcccttctctgacaggccccagtgtgtgttattcccctccctgtgtccatgtgttctcattgttgagctcctacttgtgagtgagaacttgtggtgtttggttttctctttctgtgttagtttgctgaggatgatggtgtccagcttcatccatgtgcctgcaaaggacatgaactcattcctttttatggccgcatagtattacatggtgtatatatgccacattttctttatccagtctatcattaatgggcatttggattgattccatgtctttgccattgtgaatagtggtgcaataaacatatgtgtgcactttttttgtatttttagtagagacagggtttcaccatgttggccaggctggtctcaaactcctgacctcaggtgatccgcctgcctcggcctcccaaagtgctgggattacaggcgtgagccaccatgcctggcttatttttgtactaattctactcattgtcctctactctccttgttggtattccagcaaacatggcatcagtgctctgtttggtttctcttggtgctatatatagggttagatgctcagagaacctatgaggacaacaaattgtttttatcctccaagaatgggagggggaagtagctaaataggcctggtcyaygtagctctaatgcagagaaatacttatctaggtaatgcaaaatacaaaacccagttgtgtctaatttacacaggtgatactgacactgtacatctggtggtagtaaacttataaaataaattatatagcacatgccttgccctgaagcacatgtgtacacacacacacacacacacacacacacacacacacaccccctgcacgtttgaagctggtaaatgggctgttgttagtctcctcgtagactaagttcacacatacacgtatttgtgaatgcagagtacatggaaggattcctgagtcgtcttgcatccttgaaggaggttaacaagttcgtgtttctagtttgcaaggaatgatcacttcatgcatagtgaagagagattcgtattatttgtattattgaactgactgttccttataatgaaaggctaagagaggggtgtcccaggcaagtgtagagaggaaagaagatggtgtgtcggcaaactgcgagtaattccatatttcacagatgactgtcacctcttagactatccattgattcagtaaatatttgcctggttctcattctcttccaggcattgtgcatcattatccaaataagcaggaaatgtacttttgattgggttcagcttaatgtattactgtttgatcagttctaaaatacacattttaacacttctgaaattgggatgtatactaccatcagcggggtcttagattcatttaaaaaggctattagtcattgttgtatttggcggtgctttaacacacacgagaagtccaggctcacaggtcaagaaaacccgagtggttatgccctaatcaatataacaggtaattttagtgagtgatacatttaagttttactttgttgtttttatttcttttaaccctactctgaattaaatgctgtatttattggtaggttttaaaaattagttatcttgctttaaaaatcactgtcctgctctagctagatcttgtcttgttcttgttcttcccttttctgggaatttttccatgcatggataattggcctgcataaccatattttgaaatactaggagaggtaaaattaatagttagsattaatagtaatgatccagatactacatttctgtctgtctccatacatccctgaacaagctgttgattgatttgaaagggcatatgtatatgtgctggtgcccatcacatgtgctaagcccatcatgaaagagccgtgattactatcattaaaaataatgtaaatgaaaaattattccaaaataaaagtttatttaaaaaacccatcaggtcagataaatatgctttatgaagtctgtgtgtcatccattagattagaggattgatgctttttttttcttttccaagacagagtcttgctccgtcacccaggctccgtcactgcgtcacacagtgctgcaatcttggctcactgcaacctctgcctcccgggttcaagcaattcttctgcctcagcctcccaagtagctgggattacaggtgcacgccaccatgcctggctaatttttgtatttttagtagagacggggttttgccatgttggccaggctggtttcgaactcctgacctcgtgattcgcctgcctcagcctcccaaagtactgggattacaggtgtgagccactgcacctcgccgaggagtgaccttttgtcaccttatcttacttacaaggaagatatatcagcaataatttaacttacttttacaaggcctgacaatggctcattagcagctgtgggagggtgaggatgactggctgcagctctcctattcccatcagaggccacctgatgtctcctgtacctgtgatgggaccctcctgtcagctgtcagtttctcctcttcttccctctttcctctcccctcccgtcttcttctctttccttccctcccttccctttctccattttagccacaagtctcattttaaaggcgtgcgtttaaaattcctcttacagcctagactttgcatcttcaaacttgtcagtttcaggataatcgctggtgtttttttgtactgaaaactcagcaacaagtcttcagtctattcagacaaaatgcggaaagtgttttgtgtctttaaacacatgcttaaatatcatatagacataactgagattcctaagcggtaacgatgtgaacatttgggttgcagaagtactgaaacctygttttaaaatcctgtcattgagatcactgccggagcaaagcgcagagcaggaggtttggggaggagggttctgcagagttggccaaggataaatctcccaaccattttttggtaagtgtgacacggtggccgtgttagctggggatgccagtgaactgaatgaataagtgaatgaacggatgtctagcaattgtagtcaacccactcttccacatcttcttggcagtggttcaataaaaccttgaaagatgcttgttttttctgttcttcctaattctcgtgtgctcctactatacacaaaaaacagaggggaagagcagggagatgaaggcagatctgcccaaggcacgatcccctggacacagtggccagctcagccctcactgtggccccctgcccaaggtggtgtcagctcggggtgaaagaaattcgccgtcacccaagtggactgtctcccagtccccagtccttggctgaggaaataaacaggaggacgatgctgtcagatgaacacgtggttccttccaccctttttgacatgagaatcaggcctcccacgcactcattggtttgtctttttacaccctcttgccgggcaccctcacgtcccaggcgctagggctggcactagtccagaccatgaagtcgcctcccagtctgcactcagcatcctactttctggtttatatttcccctccacggggtcaccacccacggagctgacttctggtttttccgtgcttttggggtcatcgaaaagacaaaagctatccagccccaagaaatgcttcaggttgtccttgacttgaagatggagcttcaccagggacgtcccactttctgcccaggagcctgtctgccttctgcagccatcaacctgacatccacggtgcccacagcacccaggctgttcatgctgaagggcrcgtacaggcctgtgccaaactgccctcagcgcccccttggcatcccagaagcctgtgcttgttggtgcccaaagtccagtggggactgaggcagcagggggctggcatgtcagcgccgccctgagcatgtgcacacctggctgggtcatgacagtgccygggcttggccacaactttgctctgaaatcagagtgggtgccgggagcagggacaggccctgcagcaggagcaggcacttctgagcctgtgggggaggggggcttcctggggcctctgacagcgcgaggaatcccagtcggcggcccggccgtggctgggcagcagcagctgcgcctgggagagtggggctccagccccttcaactcggaagggggcgtggctctcacctgttcccagttcctgccagctctgtagaggtgcagcctcaaccatgcctcctccgctgcagctggcacggggcctcactatcactacctgccccctagtccccaactcatgggaaggggctgccaggccactgctccctgggccctgccccttcctttgcctcattcccgatggccaaggacccaccttctcactgagggaggggtgctggttggtggtcatctccatgggtcgcacagcctggcttttggtgggaccctgacatggcgtgagtctggtttatttttgctgccctgtgagtgcactttatctggcttaggtaggatggctcttttttatttattcataaaatccttgaccctatcatttaacaagcatttttactttaagcttgagggaacttgcaatctttcagatgtgcaacttcttagttatttttctttcttttagatacatggtattatgttttcccctgcactgtttctttatgggaaagtggaaagagtatggatttgggagcccagcagacctcaatttaatcctctcagtggtggctgctagctgtgtggcctttaacacctgactcgccctctctgagcctcagttgttctgtctgtaaaacaaagatgccacctgcccaaaggattgtgaggattagagatagtgtgtgtgtaaaacagatgctgtattagaagctttccgtaaatgatactgtccgtatcatagcttgattattacaatgttcagatatagcagagtttagactgataacactgtttatagtaggattgatgaccctacaaagaagtggtagatgctgatgtgaaaacgaaaggtcagaggaagtattactttcagattttttcagtgtaatattcgattcatacagaagagtaaatgcagcacaggtgttcattatgaagcgtggaaacaaagtgggcaggatcatacatccctcgtgctcctctctcatcctcccatgcccacacccctctggggaacccttctgctggacctgatgtttagcactgaggatcaacttttgcaaaacttcagcccattaagttgctataaatgtcctgagtccaggtggcaatctgagtctacttattctctctttaattcattcatttaacaaacacaccatgtggattccctccagtttctaggtgtgcttctgtctttgtgttttcatctttcggagcctcctaagctgctgcttcctgccagttctgtaggggctcaagcatttcgtccttggtgtttctggcgttagcatcgacgttgctttataatttgtcgcagtcagtcttgagggccatccagccataccctgtgctgttaacagagactcaaaactaactcgtcaaggtgtaatttccagtcaatattaggcccaccgctatgaactgtcttctggagatggtttcagattttcgcctgtaaggatagctgcagtaaatgcctgtataaatgctcagccccgactccatcttgataaatggctaaattatctcttaattgagtacaagcaaaatacaatgagagaaaaagagaagtgttcaaataccgccgctcctccaagggaaattaagtgctctttcatgtctgttttttaaaagtgggtttaatgacaccgttgtgtggctaatgctggggaaacacatcctcccccagcgtaggcacataataacgctatttaagctcgcttgtgaaaaaggccttcccttgccgtttcatgtagtgtttctcatgtgattacttggacaacctaatgtaaaaatattttggctgcaggtgtcacaagtgacacactggcccctctctccccagtgtgtagggacaaaagcgggttctttaagacctgcacttttaatgaaccgtcttattttagacactcagaatctaatagtgtgccttttggtgaagttgttgagaattttaatgcattttagttctcattcatcacggcctatgtgctcctcgcgggagggtctttagaaataggattaacttctagaggaatgcattagccatgccacagaagtaggcaatgtgctaactagtctgatagattgctccaaccttcaaatccttctggccgcccccctcaccgacttttttccctttattgacagcttctcattgaatggctagaagcattagtgtatttaggagttagatgttttgtatgatcctaggctgatctcatattccctttctgaaattaattcgacactgctttacatgttaatccgcaaaggattgatttggagaaggtcagagcagtgcagcctcagaaaatggaagaaaagctccacttagaacagctcatttcagttcccagacctaagcctggctgccttttcattgtgacccttagccagctgtaggcggcttggacatctcgcagaatacatcaaacagtagggtttgatgtgtaggatcgttggactaattaagtttagcttggttaaccaattgcagtttgcaaattgaacaattgcactttgaaagcgtctgacacaatagaacacagaatcttcttttttaggcataaacattcccaataatggagtagtactttttgaaagaagcttataccaaatccacacagtttggatgtctctaacgtaaagttcgtttcactggtaacagaactccagtctcctttattccaggaattgcatgatgtcaaaggcaagaagccccagtgcagtgggtgaagaagcaggcggaggagcagggtgagggagagaaatgccggtgggtggaggataggtgagtgttggagaattaggagatctcacatcttagaagaaaatgttttttaatcttgagccatagtcagacaaatgttggagaactgatcacaactatggcataagatctgtgatgacttttaaaagacgaaaacccagaaaatcaaattaaggtgaatgcagggtcatttggtggaaagactcagttttacagggaagaacagagaaaccgattaaatccagactgagcaaagacgtaaatggttacaaccaaagtaattccaagtgcgagtaaaaagaaaaaataccgatgtttataatctacctttataytgaaggattgcatgttagttgctttttcattttgaaaagagtatggtatgtaatgcatccgttatctgctgcttccatcttccactctartcgagtctacatcttcatcgaacgcttactcttcgctctgaaaagttcctgcagcagcctgctgtactgtagccaggctgggttgcttggcgtggcagagggaagccagctttaatcttggccactgaaagtcttactgggatctgagcagtgctcacagctgactcctctgatcctttgctgaagtacttagtatatcatcacaaggcttttctcagaagcttacgagtcatgggaaaggaaatttttaccaccaatttccctcacacctgtggatgtaaggcaagaagcagggaggacttactagattcgtggtggctatgagcttcttgcctttggagctgtgccatgtatctccacttcctgaagtcagcgtttccgatagctcattttctatatctacaacacatttcattggctgcattggcttacccatacaactgtgtgtcctgggacctcagtagaggcttagcttgattactagaatggctgagtggcagaaggcaatccagagaaggatggttagtccccagcttcagggtaacactgagcaattcagagcttcatgcaaagtagcaaagaaacagtaactacagtgacaaggtattaacaggcaacgttactgaactcctcctgtgtatttcctagacatacgttattaagtttatcccctacagcagcctagtgacagtcacattttttttttttttgagatagggtcttcctttgtcacccaggctggagtgcagtggtgtgatcacagctcactgcagccttgacctcccaggctcaagtgatcctcccaccccagcctcctgaggagctgggactacaggcatgcaccatgtctggcctggctaatttttaaaattttttatagagatggggtctcactatgttgccccagtcagacattcttttattgatccctttttatggatgtaaaaactgaggctaagagtagtatggaacccagggagacagtgttggagccagaattcagcacaagtagtctgactctggtactcttagccattgtactttaragycccctgagttaaagaaaaacagtttcccacaagttaaaacccagaccagtgtccacatttgactagatgactagtggaggcatcctattccatgtaatcaattaattgagtagtggaatttcctgggtgggagaattgtaggcttctatgaatgacaagaataattaccattttcctaatgactttttttctgtcttgagtcaaaggtatcmaggaaccggtaaaaatctcatgtatttgccctggagtctcagttgaccatccttggtctatgtaaacactctgaactagaacaacttttctccagataacttttggaaagtgaagcgagtgcctgttttggtgtgtatataggtacacacatcactaagggtcaaaccatggccaggtcccgaaatctcaattcactttttaggggcaccaatttgatgaattctacacaacctatcccccgtctttactcatttgtccaaatgtgacaaggcatttgtgttggattcttaagcgtactgctctgtttctcagtaataatatgagaagcatgaatgtctaaaactgtttgctgcttttgctgtgtgtgcattttttgttgttgctattgttgctcaaaactcatgtcttagtgtggatgacagtagtggttatttctcacagtgcagaattagaagaaacctcagaagagaccaaatctttgtatttcaccttcactgttagaaaagcttcattgaggccaggtgcagtggctcacgcctgcaatcccagcactttggggggccaaggcaggtggatcatttgaggtctggagttcgagaccagcatgaccaacatggtgaaaccccgtctctactaaaaatacaaaaaaattagtgggatgtggtggcatatgcctgtaatcccagctactcaggagcctgaagcaggagaattgcttgaacccaggaggcggaggttgcagagagccgagattgcaccactgcatcccagcctgggtgacagagtgagactccatcaaaaaaaaaaaaaaaaaaagcaaagcttcattgatccctggcctcctttccctcagccacacatccacacactcacatggccttccctggccctcacagggcccccactcctccacctgcttctccacccattgcaccgggtcttcttgcctttgaccccatgcaattcctggaataaaggaggctggaattctgttaccagtgaaacgaattttgaaccagcagtatcagcattgcctggagagggattagaaatggagaattccagactccacgaccctatccaatcagaacccacatgttaaattaacaatgtccctgggtgatttgtatgcacgttaaagtttgtaaaggaccacatggaattctaccaaaataaggaaggctttattttctctttacattttcccttttctcacctctaccccttcttagagctgccttttctctacttcctggactaccagaaagaggtaactgtgttaatttctcattccccatattatgaatgttttgcataaatttgccagataaaatccgggatgccctgttcattttgagtttcagataaacaacagatagctttttagtgtaagtatatcccatgcatgatttgagacatactaagaaattatctgttgtttatctgaaattcacatttaaatgggcattctgtatttttctttgtgaaatctgacagccctagttggaagaaaatgatagtatagcccttttggggagacagtgaccatagacaaagtatacaaatgattttggaggaggaaacctgcagagtccaccatttacctccctggcaagtaccttgaaaggggtgggattgggggttttgaataagatgtcagtagggtctttctccttacctaggttgtagtgtgtttgggggagagcaggaggaggtgaggacagtgaccatcaagagaaaactctattctattctttctgagcctccaaagaccaccacrtgaattaagccctactctgggaaacccacrctgacctagcactgggggcacatttttccaccaggtggctttaggggagggacctggcagaatcgaaaatttggaggagaaaatgctctccatgtgagtgtttccatttctacagggtttgagtttgggcttattatgtcagatttgactattaagttttcttatttgatgaggaacacgaagctctcgtttattggcctcattaggtgaaggtattacaggtgtttctaaaacagcttgtgacctaatatttcttattgttaggtacttccagatgatggagtttgacgaaaatgccccaaagcaatgaaactcagatttaaggtttcaacatttgccgtgactctttgctttttatgtcatttaataagttgtgcatacatattctaagggaaattatgagccgcctgattcattacacatttttccaacttgtaattatgttggcatcaratgttggcatcctttgaaagaactggcatattacttgatcattgtaaatctctcagtacttttaacaaaatggcattagaaccattttcttcaaaatttsctttctcccatgatccctgcttgggaaataggcagtgtggtagaattctttcaggactcatttgaaaaactcaacctttcaagaacaagtcttcttgctattggcatactgacctgaaaaacataaataagaatgtctgtggagttcaggcatgagtgagattattacaggaaattatgacgtggaagaaatagaagctagaatattaaaacaccagttgtttggctgcatgtttgcgttgcttagtatcatgagcaagtttgttcagaggaatgctgattaaagttgtagtctggtaaagtgacattcctcgttacagcaaaattatccatgcagtttacatatttgcaaatatgcatagcatattgccagaaaacagggacccaaggcttctggtagatcttttcttttcttctctttttgagacagaatctcgctctgttgctcaggatgaagtgtagtggcatgatcacagctcactgcaaccttgaactcctaggctcaggcaatccttccacctcagcttcccaagtagctgggaccataggcatgtagcaccatgcccggctaatttttttatttttaatagaggcagggtctcactttgttgcccaggttggtcttgaaatcctggactcaagccatcctcgcacctcggcctcccaaagtgctgggattacaggtgggagccaccgcgccagccctgatttttttctttttaaaaggaggaaaagtcagaggtgaaaaatttagtatttttttcctctattttttctgtatattggtatgttgtctctggcttgctctttcatatgtaatttcttattttcagttttcaacatactaaatttggtgaagagtacagtgtctgttttttgaggaaataattttcttagcaatttaaacaaactaagtcaaaataatgagagctatatttttgagcttacaaagactcataaaaatgattttcaaacttatttttaaaactaacattctaagacataatttgctagatttcagtgataatttaggcatattcattctgcractaacagttgatcaaaaatcaaaggataaagcgtaccgtaagtgacagaaaggatagggggcattaaagctttagctaacatactstgtgtgttagaaaaattacagataattccatagtaggtagatattttcctccctctccttgagatttgttgagaatctgttacctcccagtttgatcagactctgagaaggatagagagagaagatttgatrcagagttgattccgcaaaacctcagtagctttcaccttgacctggctatacacacacctcaagcctctcgctttgtagaaggatgcgcttcctcatgtttgtgaggcaggtctgtggctcctgcaagttcttgttgagcagaatgatcatgtggggtggaaggagccacccagtgtcctaggggtcccagctagcccaggacaataaagactcacaggatgccaaagcaggaggggggcttggcgagcttttccccaacccctgggtttcacaggttaagaagccgagacccagagagacacagtgtctctccctgatccttcagcaagtgagtggctggtcacagcagccgctgcagcccccgctgccagtcctccacccttyggccacctcacaccatctgcaggcatcgtgttcaatagcaggtgaggtcactgaagcaggcattttgaaagkttagagactaattatgaccagagcattgtttcatgggtgtcttacatgggaaagaggtcttttaaaattatttgacttctgaaccacatttctccaaggagcactactaaatgaatttattttcatacttagttctgtaacaagcaaactgtgccatctgccaagttccactgtatcaagctgaagcttgttttctaacattgcagatgggacatgcattagaacagcagcagggagggcattcgggctctgtacaggcagtggtcgaactcccctcgttctttggttcttgaggcacagagtagcctcctggaggcagaggtgtccgcctccctggcctcacctgtcctgcagtaggttatagtttttgaagatcagtttctagaaatgaagtgatatatattgttcatgatcctaaaagataaataggtcactgctagcttgtactgtaatagtctagaataataacattgtgaagagcatggcagctgtaccatgaaagggtgaaagtgtgctgtttctgggtagaatccagtgaatgaggaatagatacgttatcagtccaataaatgagagatacgtcatcagttaaaaatgtaacaaatggtaacagtgtgaggtaatacatatgttaattagctagatttagtaatttcataatgtgtaggtacttcaaaacgtgttgtacatgacaaatacattcagttttatctgccaattaaatgagtaatatgcttctcttccttttcctctcaatcagcactgtggactattaagtctctcttttcttcagaattttattattaattatgatccttattctctttgctcaaattatcccagatttggtttgaaaagtaggctcccatctccttttgacagggcctcttggatctttgatcacttcctcactctctggcataataaggyattccaggcgtaaccttgtacccagctctggaatgagctgtttttatattttactttctacatttttagaaggaactctggttccttttagtggggaatggtatttagatacaaaggtctgggaacttcttcttctgagaatggcagatcaagatcttaccagacagatctyccacctccatccctcccacccccacatacagaaaataactatgaaaactgggtataattcagaaagcagctgcctgaagccattgagagtgagcagaagcaggcmagtttatggkgggagaacctcgttgggacaaggtgggtcttgagctgcactcttgagctgcaccaagtaagctcagggccaagggcaggtggtgcagtgagagggactcctagaagaaaagggctggagaggggatccccaaattctgtttatatacatctttgatcgctgaaccatacatgcatagaatagactcagatcacaataatgacaaaaaaatctgtgcttgctgccgaaagggtcagagtttgcagttcaggttcagctaattgccaaccaaaagaactaacagtcatccaagaaaaatcgcaaaatcccaaacctctacagtttaaccttcctcacatctgggatacaaagctaaaataaccaacatttgaagaaccaaggaaatagaatactgtctcaaatcaagaaaamgagaaatcaaatgaagttcaaccccaaggggaagcagatatggagagtcacacaaggttttccagtggctgttataactatactaaatggctgggtgccacggctcacgcctgtaatcccgacactttgggaagctggggtgggcatattgcttgagcccacctcagagtctgagaccagcctgggcaacacagggaaaccccatgtctacaaaaaatacaaaaattagctgggcatggtagtgtgcccttgtagtcccagctactggggaggctcaggtgggaggattgcttgggcccaggaggtcatggctgcagtgagccatgatcacaccactgcactccagcctgggtgacagagtaagaccttgtctcaaagcaaagcaaaacaaaactatcctaaatgaaataacatgatatatgctcactatgaatgaaaagataagatagctcagcagagaaatagaatgataaaaagaagaaccaaatggaaattctrgaactgaaaatagttatctcaaataaaaatttactgagtggacttaacagctgaaggcagagagggggaaaatgacagaggaaaaagagaaaatggagcagaaaaaaatagtagaagaaataatagctaaaaaatttcagaattcagtgacaagtagaaatttacagatataagatcatatgctcaagaaacaccaataagaataaatatttaaaaatcccacgctggttcttgcaaacttttgaaaaccaaagttgaagagcaaatcttgaaagcaacaagagaaaagccatacagtaataatccagttaatggctgacttctcactggaaaccttgcagaccagaacggcatggaataacattttcaaggtactgaaagagaatcagaaaattctaacccagaatttttttttttttaagttgaggtctcgctctgttgcccaggttggagtgcagtggcatgatgtcggctcactgcaatctctgcctcctgggtttgagcagttctcctgcctcagcctcctgagtagctgggactacaggtgcgaaccaccacacccagctattttttgtctttttagtagagacagggtctcaccatgtggtccaagctagtcttgagctcctgccctcaagtgatccgcttgcctcagcctcccaaagtgctgggattacaggtgtgagccaccacgcctgccctaacccagaattttatatcttgtagaaatatccttctaagattgaagggaaataaaggcatttttcgataaaagaaaaaagaatttatcaccagcagacctgcactgtaagaaatgctgcaggaacttctttcagttaaagggaaataataccagttgggaactcaggtccttggaaaagagtaaagactactggactggtaaatatttggatcaacacaaaatactagttttctttctgcttttttcttcttaatttcattgttaatcatataagaattttaagcaaaaattataacactgtcttgcgaggcttataacatctatagatgagatacatgtaacagctgtaaggtaaagaccaggggtagatacggacctcgatggtgagaagagttctttattatagaggttgtacagtactgactgtaggcagactgtgaaaacttatatttctaacttgcagccaacttaaaaatgtaaataaatatgtgttaagccaatagaagaactgaaatggatattcaaataattttttaaagacaggaaatggggaacagaggaaaaaaatttgatttttttgactaaatgagtaaaaggaaatagttttttaaaattaggttgtaataatatgatgagctattcagtaaccatttaaccttgggtttttgaagaacatgagcatgggaaaatgctcccaatgttacattaagtgaaaaaagcaagatgctcagctagtgtagtatgacaacaattttttaaaatacaatgatatagtcacccatgtaacatagaaaaatgcatcaaagaaaatataccaaaatgtcttttggtaaagtcatgagtgacttaatgccttagtcttactttttttttttttattttctagattttctacaatgaacatgagttatcacaaaacttactttttagctattgccagagtcctaaagtggcacggtagtgtttcattttatacacttcactaagtttttctaatagtttttagctgattcttttagattttctaagtgaacagttgtgcaatgtgcccataatataacaattcagttatatattgagtcatgagacctgttaatgtctaactgtctgctttaatgaaggggagtgtccctgagaacattcaggcactgatcagtgcccagaccacagggactcccacctctggatgcgtccagccsgatccacagaacagggtcgtggtgaggatgaaacgcggtgatgaacataaagtgccagactctgtacttgaccatcacatgctgtcactcagtgttagcggttattattgtgaggacgaacctctggcagcacatgtttctcagggcaggggacagagctgaacagtggcagcagccacaccaggcagtgggcggatcatcagaaaggatgagttattaacagtgggccccttagggtggtcagttctgagcagctgtgcctaagcatgaattctatctggcctgctttcctgattttaaaatccacacccgtatggagatgctctcgcttttgtgggccctgaatgaatgatgaacagtaataatgctgacatgtggcctagcatgtggcctccctccgtagcttctatcatttcaggaggctcgccttgggagaatcrggctccaggtttattccatgaataaagagtgtctctgtggtccacagcctttgttggtcctggtggtctctgtcctcaggttttcatgctcttgcgtaagcctctccccttgcaggtgggtcggacctactggatcacttctaacaaatcaaatatggcaaaagtaatgggatggcaactccttttttgcacttctgggtgacttctgtcttgcttgcttttcctcttctccctacccccagctctgagggaagcaagctgacgtgctatgagtagccccatggcaaaagattagcagctactggggcaccgaggcctgtggcagactacagatgaggttgggaagggacaaagtggaggcggagccacccccccaggcaagccttgagatgaccacagtgcccgctgacaccttgagtgcagccttgtgagagaccctgagctaaaggcatcctgctgagccaacccagactccaggcacacggaaatcgtgggtttcttaagttgtctcggkctgcttagttttgcgttcatttgttacacagcaatagataagtaatacgctctcttaaacaacttagagtctctgctgacttcccctacctcgtcccattcctcccacatttagtcttctgggaattgctctagtttcaccatgggacccttttatttttgaaatttttcatcaaggcaccaaatgccttttctgcccatttcttcatctttccatcttgcttctagcccggcaaccacttttttgctgtgcggtcaaaagatagcacactgaccgtcacctttcatttcacttggtttttttttcggaaacctcacctgcttctttcaaaagttgtagaaagatgtggcttcattgtgatctagagtccagagcagggactctcagcctgctttttgtctctgtcatatctcaaagatgatgtcacacagggaaccacactgtgggccagggcagtgaggtggcttctgaccacacacagttcccagtctcctagctccaagccctcccccttaccagctgtgtgtgttggcttcctgagatgaatggtggaaaaggctctggtcctgactgtgctgaactcaatggcgatacctctggactcgagcagcatgtcagtacagcttagccatgtgacccagaacatgtctgtctaccaagtttctgtatgtgggaggcctggacaatgacggccgcaatttccctctccttaaatagagcttcagggaaagaatccctctgtaagtgatagaagatgagcatttaatattttaaacctgagcggaatgattgtaccatttgcaaactgtaataggagccaccattgtccctgggcccatgaagagttatggagaaaagtaggtcatcacacctcctgaaaatatttgtcaattgaaaattagtttctcataaattacctctttattcttttaactcctacttcatgaagtggacgtctagtgatggacgcctctatgctgtccctgtggctagtggtctgttcacaccattcctggctacgttaggtgtccccagtgcagagaattaagtcatagtaaaagtatactctggattttaccaagaggtcacggagagcccctcttcccttggcagtcagcggcattcttattacacttcatttatctacttgggaggactcgggaggaccagctgggcccctgtctgcactcatcaagagttaatttctgagcgaggtgcagtggtcatgaacaagtgcagaaggtaccctggtggccctgccagacaagaggggcccttaattagcagccacgttcaatcaggctgcttaacctgccgcagagctggggaggtcatgtccttcctgccgccctgcctgtaaacacagcgcccggagccgggcccgggactccgtgcggcctgggaggaggaaggtacctggaagcaaggaagacagtgcagacccgaacctgacccacttccaggggatacctggactctgctgttactcttgatggagtagtgagggttaaccgagagagaaatttttttttctttaaaatttggaggcatcttttgtccttgccaacttcatatttcccaagctggacatcttactggcttgctttctttgctattaaaaaaagtattacttatgtcgtcatgtttctggcatcgcctagggctagccatgcactgagacctcttgctgtagtggaaagtcggaatccttcaccgattttgtagccttgcttaatctctccacaatgtcctttgctcagatacaaaacaaggatgattgtactggccctgccacctcatggagctgttaagagggaaccatggagagacagtttgtcaactgtcaaaccctgtgtcaaatatcagctgatagaattggacgccaggattggagtgcttttacttggctcattcattataggtagccaaggtccatttttattttaacagtcacatatagaataccaaaaacctgatgttgttggtagatgttttataccgttttagaaacgccatctactatggcagcagttagtaaatagcaaataaatacaagcacttgcccacgttctggccaggaaactcaaatcttaaatgccctttgaggaccacagagggtcagagagatggggatggcaggaggaggaagggataggagggttatttttagctccataggacatcttgcttagtcatgagacactccaggtgtttgcctggggaaacttcaggtgggctgtggcatttagtcagctacctaggtcatggtgggtaattctgggacaacctgctgtagggttcttgagcagcctcttcagtgtcctctggagaagctcagcttctgatggtatatggaggaacccagcggcttctgggatcccagcctatgagtaaytcgagttacttagcacagtggctcgaaattccttctggtgatcaaagaacccacaaaacagaataggaggcagcgccccatgcccttgtcagtgaggcagagtgtaacttgggagtttcagatgagtggcagttaccgtacctgctgggagcgttgcattgaacccagggaccagccaagaggaactaatggaccccgtggaagatcatttgagcctcagctacgggaagagctggatgcaggccggggaagcggattggtggactgcacattcatttaaggttgaaatgcttagcattgtaaaggtgactgtgaattttaagcttcattctttattgacctggcagatsggagagtgctgtgtcttggtgtaatgaagcattatgttggtacagtgaaaaggaaactgccttcctggctggaattcggtctccctaaaagctcatggtctggtgaggtggatggcttgggagtgaatgtgtgtatgtgtgtgtgcacagacgttgttcctgatggggaaattgagacccaattgcccatcaaattgcccgattctacctggtggtttcctgaaatggatgtttgatagcaaatccattcctgtattgcaggctttttttttttttcaataaaaaaacaaacaaaacaaaacaaaacactttggaagtttttttcaccttatgagtttttttttctttctttctacttctgctttggaaacatggaaatgattcatgtagagaaaaaaataattgaaattgaggaataaatcagttgcgggatacttcttacagccaaaacctgtcggggctctgagctctgtaagggaatgccaaaagcaagctgctgcctccagaagcctcgctgtgcgcctcgtgggcataaactggaaccttggcaataaacttctgcacacaaggtcgccctgtgcgagcgtttctggaatccagatttaatactgcatacaacaccttgttttgaaaagagaagatcactgctttcaatgttatggaagtctattccatgctgaacatcgaaatactgatgctctctaggcagagaccatggagaaggaagctggggacgttttgtcctccctgctgcctgcctgcaggagtggactcagctgagactgtgccatgagcctccttctcatcacaaaggccggcttgtcaatggaagaagatgtgccagacagccacttcacacccagctcagtgacgccttgggctttgtggacctagtagtgtgttctgacctgtcttcaaactccatccacccggttgtcaccatgacaatgagtattccacatgggtttcatgtctagttaaggggacagggttaggaactggaccctgatcgcccagagtttttcttcacatccataattttgatttaatcatgttcacccatatctacacccatctctttgacctctaaaataagaattagaagtcttattttgagattatcaggatattaacttctatttcagttttgaaacactccctgtactggctcatatatgactatggactggtgaaagcctgctctcaggctgttccgttgaattgtgtggggatcgtgccttttttatggaactacacaacactggatcccattgggagtgaaaaggtaaccctacttctgtcataaatctgttttatcacaggatctctgttcttcttgaagttcagtacgacgcaaagaaaagtggaaagggcttgagatttggatgcggaggtcagggaatgaagccttggctgtgccactcatctgcttggatgctaaatgacttctccaagccgcagtttcttcacctggaaaatggcaataacaatagcaacttttcaactttttttattgactaaattttctgaatgaataaataagacatagtgaaaagtgccgtgtaaacatctgtaaagtacaaggcagatgttaattgtccacggagagaatgtttatgacacagaaaacagtgattcccaaccctatttcatttttctcctgggcgcatagtcccctttcagttgggctggcgttgcctggacaaccaacagacagatggacatgaagtacgcttcttccaggcctggcccatgagattctcccactgtccctttccccttatgcygcaatcttggaggccttgtgggaaaatggcggcatcccaagttgcaagaggcctgtggccctsagtcacygcttggaggagagctgcctgactagccctggacttgggccactgcagttggacttgtttcagctaatgttagcctgcctcgatgaatcacaattttgaaagagaatattatttgctactgttagtgtataaaatagttgtattcttgtataccttatgtcatatacattatgaatattgttattaaagaatattatatatatcatattgctgctaaaattgcaaatgaaaataagatcaatgctgaatgcagtggctcacacctgtagtcccaatactttgggaggccaaggcatgaggattgcttgagaccaggagtttgagaccagcttgggcaacatagttagataactgtctctataaaagaaattaaaaaatttaaaaaaaaaaaagaaaggaaatcaatctgtttgcaatttttataaatagaacataactactcacagtgaagcaaattaatatctgaagttttgctaaatttttgtgcatcccttgactaggaaggaaagttaatagactctctgagatccattcatgctagaaacattaataataataaaaagatgaactgccactgattaagtacttactgtgcaccagacatgctatgccaaaagctttgtagacaggatgggcatgtgccttgcaatgagatggcagatgtggccttgatctatgtatttgttctttctttcaaattatttttattcctgttaaaattgaactatgagacagatgcctgtgtttttttccttttcttgattgtcataacctctccsattgttataatagaatgtggcacagatgatttgggctggagagctaattatgcatgataacctgatttctaaaatatcacaggatagaggcaactactaaaatcaatttctagcggtcagttgcaggttgaaaagttacttgcgtctctattgtgaactgggtgtgttttggctggcacgaatgacaagggtaatcattgagggggcattgacggcttaccagtgattgaccagtctggtctttaattttcctacataaatatgttcagctgcatatttatgtaggaaatacataaatttccggcatgtcccatgtcatcagcctcaggcatcccagaacaatgtccataatacaatctccattcaggcgaatgttgccatggatgacacagctacatatcacagccatggatgctttgtgatgaagccacttcagacttgtcatctcatctctttccttcaacacctctctccgcccctcaactaagtggagggaattaacactgtccacttagaaatggcagccaacactgaacttgctattcttggtgggttccataatacctgggcttgcgttgtgaagttttgtgagttaggctgttttaaggtaacagatgatggaaagagaatttttagttactgtcttttacttgaagtgaagcaaacattctgaagatgggagagaatatcgcgtagtattatagctgagccatagtccgtggaaccccatagcctgatgacctaggttcaagtcccagccctgccattttggtgggttttagtttccttaacctatgaagtgggagtaattctagtaccttcctgcctctgtttcctcactggtacaacggggttaataatagtgctgctccataggatgaataatttcccataaactgccaagagcggtaccggcagggagccaccctcagctttccttgtgactgttatcattcctgygactgcatctgttccatacctgatggagagcttggtcacagagtctctgttttctcagctgattgttcaaatgactgctgtttctttgtgtctctttgttcaccaagtagttacggagtacccactgtgtgccaggagtgcattctaagtgtgcccacatctgtgtcttctgttttcagcatgaaaacatatgtttctgctgatccctgccagcatcaacaagtagtgcctcatccctcaggctctcaccatggtcctctttgatgatggagtggtggggtcaagctggccacagagtctgcggggtcatttgagctcacagtgatttgtccagaagttgttttcctgtgttttcagtgtctaatgttgatcacggttcataaatgtggaaatggtggaaatgggtcataggaaactcacaccaccctgattagaaagagggacggctggattttcctcacggggcttgcgtgtctaaatgtttacattttattcttattagttgtccacaaacaaccctatgattttggmtagttactgaatttctatttttccaaatttgagaactgaggcttagaaaactggagcaactttctgagcctctgggctgaattcgggactctgatttgtagggtcaagttttckgctccttggaaatctggcagatccaaattggatggaactgtgttggacgttgttggcactgcttacagatgagagaggctggggagacccagcacttcgttaacacaggccgacgaaagtatgtgagtgagcatgcaggtggggtgttcaggccgcagccccttcccttctctatgtctgtgtcctacagagtgtcccttagtcccctgccttaagaatcatctctaaattgatggtttccaaggtggtatctctgatctcttccctcacctccagattctcacatttatttgctgcctggatatataaataaactgtagttcaactcagatataatttttacatatccaggagacatcttaaaattaacttgccctagtattcaagactatgcgtgttggtgtaaggatagagatatacagatgaatggaacaggrtaagtgtccagaagtagactcacctgtrtgtggccagttgatgtttgataaaagtgccaaggtcattcagtggagaaaagatagccatttcaataaatggtacttgaaccattgaatatctgcctgcataggaaaaaaatctcaactgttacatgacaccatatggaaaaattaagtcaaaacggatcatagacctaaatttagttgcaaaaactgttaagcttctcrgagaatatatttgtgacattggagtagggaaagatttcttaaatgagacacaaaaagcatgaactataaaagaaaaaatgattaaaatggactttgatctaaaaaaacttcttttttttataaaacacagtttaaaaatggaaaaggtaagccacagactgggagaaaatatttgcaagacatatatctgacaaaggacatatagccagaatatataaagaaccttacgactcaatattaagacaactcaatttttttaaaaggcaaaaatttgaaaagacacttcagcaaagaaaatttataaattcctaaaggcacatgagaaaatgctcagtgtcaccagtcttcagagaaatgcaaattaacactatgataagataccacttcacatgcattagtagggctgaacttaaaaaagactgacaataccaaatgttgacaagaatgtggagaaactggaactctcaygtgttactggtgggaatgcagaatgataacagccacttttgaaaacagtctggaatttatcttgggtaaatccctaggaatggcattactggatgatacatagtgagcagatcaatcagtcagtcaatcagttgatagatggatgcctttccaagataaatgaaaacatttgtccatacaaagactgtatgtagatattcatagcagctttatttgaataaccccaaactggaaacaacataaatagtcatcatttggtgaacggataaacaaattactagaatacaactaggaatccaagcaatataaaagaacaaaatattaatttgtgtgacagcatgggtgaatcttgaaaatattatgctaagtgaaaattcatagtcctcacctccctggaagccctgtgtgattgcctcccttcctcccccaaatacctgcacacacacatacacacactgtgcacacacttcatccagtggyctgggcctcctcgttgggcctcaggtcaagcacacgctactacytccatcctttgtgtttactcttctccctgcccggatcgttccttgccaaggtagcttcccgagtctctcacttccttcaagtctctgctcacgtgttagcttatcagagagggcttctccccaccatccttagctctcactacttcttctctaaccccacaacccaatatttgtgtctgtatttgcatatttgttgagtgtctgactcctcctgccagaacgtaagcctacttggtctactgctgtatttctcggtctctagaacagtgttacatagtaaatgctcaataaaccagtgttaagtcaacatgtgaatgcacagaattaggaatgcaggcgtcagggcagggtgaggcttcagaccgtgtgtgcccaccaagttgcaaaccattgcatcctacgctaacggctctctccattagccttctcaatttttcttctgctgagcaggctctggctcagttcagctttgagaaacagttgaaatccacaccaagaataagtgcagatgcatttaattcctcattaatctgatatgtttaaatggattattgggaaattcttcctaatggttttgcaaagatgttaacttagagctttttacacagggaacttcccaagtgatgcacagcccattgattaatcattagttctcccctctactatttatgaaaacacaaacataagcaaagctaggagaaaaattatatttttattatattaattttaatgttaataaaaaataaatattatttctaataatatttataaaatgttggtcttaaatgctattaaaacaactgtggatatgggagccaatactcttttctgacattatcactctattatgttgctgaatatttgttttaaggccagattggaaggttttcagacatagcacaaaatactgtctttggatggtacagccatgagttatgtcagggcagtgttaagagagatcgtgataggctgggagctgtggctcacccctgtaatcccagcactttgagaggccgaggcgggtggatcacttgaggtcaggagtttgagatacgcctggccaacatggtaaaaccccgtctctactaaaaatacaaaaattagccgggtgtggttgtgtgcacctatagtcccagctacttgggaggctgaggctggagaattgcttgaacctgggaggtggaggttgcartgagccgagatcactccactgtactctagcctgggcaatagagtgagactccattgcaggaaaaaaaaaaaaagatcatgataaaaagtcactttaataaacttgtggatttaggtctgattatttttgtttctgtaggtgctgcattgcttgtctctcctgaatttttatttctggaagttattattcataaacatgggtcccccacatatccctcagtagaagagtcaaagggagagctaacattgaaagtagtttttcttccttctttgttagtggccccgataatgtttggtagagtctgtgggaagactggaaggctcagatggtgcatgggatcatttcctggtttggggaagtctcccaacgccctggattatccgagtcctggttcctcacagctctcgtgggccctgcttatacatctaaaacagattgctgtaaaatgcttaaatagtaaaaagaaatatgcttttgggaattagagaatctaataaaatcattaaattgatcagactaatagatcatttggactgacctagggctactgaaattaccaaatgtctgttctgcatctattcagaaaatcatgtgattttcctcattttgcccacccatatgttatgtattatgttgatacatttttctgatgttaaaccatccttgcatttctaggataaacaatatctgattataatacacataagatgtagcattgaattcagttaactagcattttattcatgattttcacatctgtgtgtttaagtgtttggggttttttattttcttgtccactatctggttgaagaattgagattatactagaatcatgaagcgagtyaggcaactttccctcattttctaattcgtgggacataatgggctgtgtttagagttacagattgcaactattttgagtcccaggtgtgcttggtttactaaakccaccaaaatatttttttaaaaccttgtccttaattaaccttttaaattaaaaagatgcttttctagtttcactgtttttcttttttccactgaatgacctaaattaactgtttggttaatttttaatgaatatttattcgctcattcatttgacatttatttagatgtattgggcatttgctgtgcacagggcactatcccaggcactgggggaggaattaatggcaggatctctgccctcagttcctccaaaagggaaacagagcttgtccacagttagtaataacttactccctaaggcaggatgtctcaggctatgacaggacagggttggactgcttggggccttcagacatctgtctctcagggaatactaattttgcatatttcttgagctgtaaaggagtcatggccccaaatttctggtttctgttagaaatataactatttgtcaaatgtttataaaatgactaccgtatgctaggcagagtatggagcatagcaactatgaaatctgtttcagtagcttggtccagaaccctcagtatttggaaagttgcatattgtcatcatttactcccattttgattatattaagaaagtatgtgagggcatgagcctctcaggaggggacctcagtgtttccggatccctcctgccctctgtgggacctagatgctggctagctgagcaccgtcaatgtgtcctcgcagaagacgaagcgcatttcctttcttctcttttttgcggttccagtgtgatgacatggcttggtcaccatgcttcgtgtttgctaaaaagaaaccagggatatgagtttctgaattctcaacctggtgcctttgccagagaacaaagtcaggttaatcagacgtcttcccctctccagcccaactcattcgctrgctgacctctcctggtcccaykgttctaagaaccatctccacgataatgattcccaaatgaatatcctagcccagacctctccctcccactccagacttctgcttggattccgtgggctgtctcataggcatcttatgcttgctacatctaagtccagcaccagattccaccctccagcctgctcagcccttgcctcctgcttttgggaaacggcacatcgctttttccttgagttgtgtgtgccagaagtcgtgaactcacccttgactccatcttcctttcaggagctcagttcatcatcaggtcctctttgttccactttcaaaatgtgcagaacacatctctttcttccttccaccaggctgttttccatgtggcagccaggtgaattcctttaaaatgtaacttagttatctcatccctgttagcttagaaaggctcagtgttgcttcctacttcattcagtaaaaaatccagagttcttactatgacctgcacacttccaaatctgtcccccaaccagcataacccttattcctattccccccaaccccatacgcacagagtgtgcttcagccacgtcggtcacctttttgttcctctccaatcccactgagggcctttggccttgccgctgcctctgcctggaatagtcctctgtcacatgtcttcatggtatgctctcactatcttctttctgaacaaatgccttattgcagcagccttcagggaccacttgaacaccccatcctttgtccttccttgtaccccttatctgctgtattttgttttcactgcattgacacattatgcatttatgtctctctcccaccgccttgcacacacatactagaatgccagctccctgggtgcagagacagagcatttgttcacagaaacaaccccagagcctggagagggcctggcacaaagttgccgaatcatctgtatcctcatgggtttgctcccaggagctcagagatcgcctctttggaaaagttgcggcagggaggccagaatgagccaagcgtaacccagtcacacccgtagctcgtccttagtagaagctaagaatccagggcaggtctgaaagcacattcacagggtgctctgaggcttctaaacagctgtccacataggcactaacttggtatatcctcctgacaaccctatgactgaagcagcatcttcatgagagatgctttcgatgggagaggttaagtaacttgtctgaggtctcttggccgtaaagggacaatattgcaccagcagccacatgcctgaccatttatgtagcttctgactagcactaaatttctttaaggtctgatttatctctaacatgcttgtaaattttgcataatttttactccataattctggtacatgtttgttttaatataaaaataacagttgatcctaccagcttactcactccacttttttgcttcttgggctaaaagtgacacaccaataagattgcatcctggctgggcgcggtggctcacacctgtaaccccagcactttgggaggccgaggcgggtggatcacaaggtccrgagttcaagaccagcctggccaacatggagaaactctgtctctactaaaaatacaaaaattatttgggcatggtggtgcatgcctrtaatcccagctacttgggaggctgaggaaggagaattgcttgaactggggcccaggaggcagaggtagaagtgagccaagattgcgccactgcactccagcctgggcaacagagcgagactctatctcaaaaaaaaaaaaaaaaaagactgcttcctgctgtcccgtgttctccgagccctccgacaggcacacacctgtggatgatcttagaactcatgtaagcagcgggggtcgtagagaaaatgaatcggtacctaaggcaatgtgcagaagtgaatggagcaatagaaagaagaattatttgatgtaaactaaagatctcaacaactcgaatcaggttatttaatcaggaatcaaaarcgcatgaggggttcaagtccaactgcaaagcttggggttctggaggaccacagatgcagctgcccccaaggatgctgarcatgtgactacacatgcaaatgaaagggaaacaaaaccaaatggatggggtgatgggcagagttaaggtctagacagcattttgagatctttgctgtcctcaccatgagtcactctagaaagcctgggggtcacatgactgaggggacacagccctttccccagagcctctccctgcatcctctcgttcttgcccctggctgctggctcaggaggcaccacgtgttgtaacagctctgtggttctggagtgagacacaggttgttggcttcgttacttggggatgaatgtttgtcataggtactgggcatgcctcttgacagccatgtgaccctggatgagtaacttcagttctctgagcaggtgcctcatctacaaatggggattgtcattgctcccatcagtctaaggaggaaatgaaatcataagtagcagctcactctggactgacgtagcacaattggctgatgatcatggtcgtcctcctcctccccccgctcccttcccttccatcccttccctccccctctcccttccctcccccccttctccttttcttgtcatcatcagggtaaatcgaaggaaagagccatttttgcaggtctaaacggttgaatgttagggatttcacatggttccacctgctacttctgctctgaccactgataacagtgacacacagatggcagccgtccctggtcacacagatgccaaagtgagctcattctcctgctgtgtgacagaagaaaaggctgacggtccccagagcgtagcgctgggagcctgcggggtagccgccgggtgatttaccagggtccccttctaggtttcactattggcacctggttaatgggaaggggatttagggacccggtgctgagatggtcttttactgttcttcagagcaaagtcctgtgaacgctgacaggtagcgcactcaccttctaggtttgaaagctcgcttgttcctgtctgtgtggctggcccacacctaactgccatgaggtttttttccgctgcctttctgatggcttcacagtgggaaacctgctgtgtccatcccagccagccctttctttgtgaaagtggtaagaagataaccccattctaacttggttgttcttttttcctttccttttgcaaagagtgcttttgccgggggtggggtgggaggctgcaagggttttggagccatggaaacttaatccttgtgtgtccagcaaacaggccccttggagcagccgcattccatgcagccccgtggcacccgcttccgtggccctcgagggcccaccctcgagggtgctcggcattctgtctgagccccagcctgcctgtctgccatattccccatcaccccctatttctctcacatggtactaacccacctagagtaggttacatttaatggggtgagaaaaatccacaccgtaagagaaaagtcgcaggtgaggtcaaactgcttcctcccaggagggaaaatgattttttctcctctctggctcccacactgaaaattcatacaaaagggctctttttatgtttgatgtattgcctttaaaaaacaaacctttcatgttttttcatttttggttcatacctcttggccgacccagcaggaacttggcagttggtgagcagcttctcgcaaatgctgaaagcggtctcactgaacagtcaccgctgcccagagccctggatgtgtgggttggtgtgtactcggctccggcaggggtgggggtcygcatgttgttgccccggacatcctatgtggggtttccttatgcgattcttgctacttggtatgtatttgaattgtttttacaacagaggacgcttcttagggttacctgaggcacggtgagcaggttttattttggacaagcctatatgttgctgtttttttctattatgattcatgtccccaaagatctctgctgaggcatatttagccaactttaaatacaagcaagctcaaacgaaggcacccctgcatctatcatttcattttcttctgtttacaaagcacattgtcctacacccaggttctttgccaacaccactgccaaatcaacacagatggacaaaatggtggacggaatggcttaagaacattttgctgacttcctcattttttttccacggagagaacaccacagttctgccatcagctgctcccagaacctgaagtgctctgcaggctgacagaaacactgccctgccagagtggttaatagcagcttctgacctgccttcctgggcagacagcctcctgcctgtctgagccttcacagcccagattggagcattcctgcgtccgtttgcgtttttctccatggatgatcaaaagcataagatcgtgggaaaggcagccattgagccacggaagcgtaagatcatgggaaaggcagccagatacagaatatgtctatgtggttgtttcctgtcttcaatctgaatgaagagccaaggaaacaccataggtcccacttcctaatcctccatgattttggtgtgtttgttggctgttttcaccctctacatcagccaacaaacacacacaccaaaatgtttttttgtttgtttgtttgtttgttttgagatggggtcccactccatcgccaggctggagtgcagtcgcacgatctcagctcactgtaaccttcacctcctgggttcaagcaattctcctgcctcagcctcctgagtagctgggattacaggtgcaccccaccacacccagctaatttttgtatttttagtagagacagggtttcaccatgttggctaggatggtcttgatctcctgacctcgtgatgggcccaccttggcctcccaaagtgctgggattataggcatgagccactgcgccaggcccaaaayggtttttaatgataatacccagggtgggcaaggatataatgaaacaggtacttttaagccttgttcaaaccccagtgggagtgtacattagagcaacctcttgaaaagcagtgtggcagtaggcatcaggagttgtaaaaagttaatatccttgacccattgataccacttctagtaatctacccttaagaaatgatcagatacatcggaaagttcatactcacaaagatgtatagttaagtactctgtacacactcactcaatggaatattgtccatcagcagaaagactatggcaagatacagaaatgctcagaccacttaaagtaaaaagcaggtttcaataaattattaattcgtagattaaaatcttaaaacatgcatctttgagaaaggactagaaaatgcgtaaggtggcaatcgttgtgttagtatgtgtgatgaaatcttttgtttctgttttccagactgtcgggattactctcataatttttaaaattaataaaccaaatatcctgtacacttccaaccatggtaaagggaaacattactttggtcttcactaatttagaatttgtgattgtcttgatacagattacatggaaatttcctagtttatggacacaaacaaaattatagggaaaatgtataaattacttgagtagatcaagcccaaagccatattctggtataattttagttaattaaatgtatttaaaataagtagaactacatttaaaaagaatgtttttcaccacatcactctacagttttctgacttactgatttcattgtgtttgtaacattaaatggatgaggtggtatgtactgtttaagaagtcgaacaaccagcctgggcaacatagcaagaccctgtctctagaaaaaatttaaaaattagccaggcatggtggcacacacctgtggtcccagttacttgggaggctgaggtgggaggatggcttgagcccgggaggtcaagcctgcagtgagctatgattgcaccactgcactttagcctgggcaacagaatgagagtctgtctgaaaacaaacaaacaaacaaaattaaaagaagtagagcaaaaaaaatcaggtggctgttatggccataggagatgcgtcttcttattgcctttttctagtaggataatcaagattctcagttactaactagagggactttctcttacccactagaactttcctaatcaaagaatgtattcctaatctttctgccccttcccccgcaaaaaagtgccccacaaaaacaacgaaatccaactactagcaattaaagagctctggcacgtgactgcacctcagtgtctaggacgtgagagtcattcatctttaccaaagaagttattcatcctcagtaaaagttcctttgagtttttataacttcaggatccttttaataacacactcattttatataataatatccaactgtaatgcagtacataaacctctctcccagaccctacccagagctcctcctcccacrctcattactgctctggtctgtagcaggaactttaatcttcctctttgcattttaatgcttatcataaaaaacgttatgagaagttccagscagtttcattttgtgaaagcacacacagcaatcttgatttcgttagaatgttaagctctgtttactgttcttgggtttatgagggtcattccgtgggccagtgtgtaacagtaggtctggaggcccgtcagccctaagttccgatggagaagccactgaggtccccaccattgacaaagggtcgctgtgcggtgttggtgtttgcctcactcttgggcgggccctgcacagctgagtcatgagctcggcacagcatgtgtgggagtgaggtgtgcccatcagctctgccagtggcacgtgccccttagggacattcaggaagacgcttcaccgagcatttggcatgagtgtggagaggacstgtgcacagaacagcttcaggaagacaaaatgccacctctaggaaacatcttggttttaatcttttgtggggagtggtggccccacagttttgtagaagcttgagggagtggagggaatctagcaaaatggaaatggaataaacccatgatcagactcaagtcaacccagagggatgcagagcaaaggaaataagaaccaagctgcagcgtctccccagaaagccctggcagccctgctggtgggtagggggtgggtctggtcatcggcacaggtgacctggctattttatcagccrgggaacagtaaataacagcagccagtgtctacgtaaccctgacagctgatcaggcatcttcacaggtcttttcctcttttcttaactttccttagggtcatgtgaggtaggaaggagagagctgagttctctttctrtagaatatcctcatggtcgagcggctctgaccaggaagcagcgcctggttgtgaaatggctgcatctggaatataggtgccgcctcctctcctagaaagaccgcaaaggagctttccatcatgtccatttgatgatgaaaagaaaccaggggagaggaaccagtgtggctaaataaatgccacagaactctccttgggcatcccacgcagcatggcacatttattccctaggggccctgggcagtgaagsgttagggtccagttttatctacaaggagattgaggctaagcctaggcaggtgacccctgcgggtcttaaccagccaagtgcctccatggggtcttctgtgcctcctggctgtggcagggagtccttgaaccagcagcccattgtggttaggaacagaggccgtgctggagtgcaaatggcctaccaaagaggtgcctcgtcccacggtggccctggaggactgctctcggaggaacatccaaaactgagccggacctgcactcagagtggacgtggcagtgctgaggcacaccgacacccacagccccatgctcaygcgtggcctggtgaaaacctaggaagtccatgctcttgcgacgtgttcagtgcttcttsgcccsggaaagttccaatgttgaaatgtggctgcactcagtgctgcctgtggatggaattatgaactgtgaaggccagcttcattctccctacatggtcgcatctttcagtgcacttgggggtgtgctgggccccgaccacccctgccgaagtgagccatccccgcctggactctgacacctctgttgtccctactccttaagaggcccaaggcctcatrtcactcgttatccttcccatcaatgtcttttctccctggttgattacacattcggtgagaatgcaattttgcttacgatttccttggatcctcccatatagctaatatgtcatttaattcataggaatccaataaacacatatttattattaaagactccactgactctgtcatttcagatggttcaagatgcctttccctctccagattttttaggaaaaaccgaaacaaagaaaatgcatggaaaagatttatgtgtttggttgggggaggggaaattaaacttctcataatagtttttaaattaaattttgtgctcgtccaaatcctttccttctccacccyttcctctgatattcccttactcattaaagcccaggattttgatggtattcacagggaagctgatttactggaataaagaagttctttaagttttaaattttggaacgttcccagtgtgtctgaacctgggtttcagattttactggcattttgttggcaaagcagtctttggagcccttccttatttgagcgtgtttcctgacacctttggcggtatggtactgtgttttttagatttaaaaaaaaaaaaagcttaaatagaaaagcatatataaacatatacagaagattgattgtaagatgtcaagcaaaataaaacagcagcatacactctcaacaattaacaaatgggaagcattttctttttaacggagcaggaagaggcaagatgaaggcaaagagaccagaaggttcaggaaaccctggagaagggcagctttacatctgggcccattctcctctcctagcagaagtgtccctgttgaaacagggttgaggatacagcccatcccaccatgctgagcctgtagtcgatacctgcagctctcagggccacagacagacacaggatccaactcagaatcctgtggaagggaaaacacacaatggaggggtccccagagagaggagttctgccacctgggcctgaaatagcaagggaggaaatagtattttccaaagactcataggtgggagggagtgggtgagatccagagtcctaaagctagcatcctgcttcttggggaaacctaagagcatttccacagagatcaggaggaacaaggccaggatacacccactgcctccacttctataatacttagcatcatcctggaggtattacccaatccaagtggacacggaagccaactggagacctaagaatcagaaaagaagtaaaactctatctgtggatgatattgtagtatatctgggaaaccttgagaataaacgatcaaactaaacaaacagtacaaggattcagtaagagaacaggatataaaatgtcttgccagcacagaacccacccagaagcacgaatccacccaggtctcaaggggtcagcccccacaggcagagagccgggagagatgggtagaaaatggaattgggggcaagggatggaaaataaccatttgaacgaaaatctgttgtagaattggattccgaaccaggtttcgttcacgggggccataaacccagcgtgtcatggagcaaagccctgcctgaaagaaagaggccccttgtcccactgagtgaagagttaagctggtgctaagcatcccggcaaacgagctctggcgtgttggttgatctctggcagggcggggtgcagggaaggctctgaagagaggtgggagccgagagagggaaagaggaaggtgacacacagggcgtcagggtggtgaaaggcacactggttttcaggccagctggcagggcagggcattcttccttgtcattaccccgaaggcgacggtacctggggtaaaatcaagggcccaagtggccgggtggagctgcccttctgtaggaaggaattcgttaccttcaggttcctttgtttgcccaggtgtttcagatgccccttcactctgtaggtaaagaaacttcttattagtattataatttatgtaaatttcataagggaaaatgaagtatttgaagcagaatacgtacagagctgggaaaataactgttcagacacatagcacagaactgatgaacttggccaccaagctggtagtatttacttttagaaaatgtaaggtgactctgtttcagttctcagaaaaaaagataaagcaagaaccccattttgatgttattatttggaagtcaatttccagatctttctagaaagccttrtagcctccaggactgttaaacttacacaaatgcattttaagaggctggccggccgggcatggtggctcacgcctgtaatcctagcactttcggaagctgaggtgggtggatcacctgaggtcaggagttcaagaccagcctggccaacatggcaaaacccgatctctactaaaaatacaaaaattagccaagcatggtggcacatgcctgtagtcccagctacttaggtggctgaggcacgagaattgctcgaacctgggaggtagagggttcagtgagctgagatagtgccgctgcactccaggctgggtgaagagcaagactctgtctcattaaaaaaaaaaaaaaaaaaaagaggtggtatttctaccttgaaattctgttttgataaaagcaaaagattctttcctagtgagtcagaagatgggcctctgagccaggcaaacctggttgactgttctctgatctcaccaggccacttctscggtgtagcttccacttatcagcagtaaaatgagactacttggcaatgatgatgtcttgagagtcactgggacatttaaatgagaacatggctcataccaagggcccagcatgtggatgggtgctcagtcaaaggaaccactggcttgcttgcagtgtagaatcttgagatctatagctgaagataccccttccccatggcccgttcattcattcatttataagaccttggagaaatcttacagtgagtggaaagatggtgccatgttggctggtgtgctcactgttggaagcctgccatattgaggtggcagtcaagtgtgtgtgtgtgtggatttgtgcatgtatgtgtgtgtgtgtatgtgcatgtgtgtgtgtgcatgtgcacacatgcttgtgtgtgtgcgagacaccagcccttgctatgcttcatggtgctaaaaacgacatctggcagacctgacatctggtgatcgcgaatgaagccactgtagggagacagaacaccaacagggattcagacacactaagtggctgtcttgcacgtaatggcactttgtggtgcacactttgtgtccgaatgccagttctttgttcctttcccctttttccttttcctcgactacctaccaccctctggctctagaaaatgaaatctctccatctgtgggactgttgttgtgccgtcctagtaaatatcaaaataatgcgatgcttcatttcaatcattgaaggaaccagaagagaattactgcctctttgatgttgtagctctggaaattttttaaaagaaatgtagttttaaaaaagtcattgaaaaatagctttgggaacagtggttttagaaccccagtctttggaccagctgcattctaatcatctgggacacacccaagctctggctctggaggttgggattcagagggtatctggggtcttagcatcagtttgtttttgctttgtgttttaaaactgcaggcgattctgatgggcagcattgtttgagagcctrgctctggaggcagctttgcctytgtgaccttgatggtatggccaggaacccatgcttgttgaggtgggtagctcctagcaaagactgaggcatttgttaaaattgagcaaaaagtattaatacaatacaaaacatctaaatatgttctcatctgtttctggaggttttctttgttttggttttggtttttttcrgagacagagtctcactctgtcgcccaggctggagtgcagtggtgtgatctcggcagtctctgcctcccaagttcaagtgattcttgtgcctcagcctcgtgagtatctrggactacaggtgcctgccactatgctcagctaatttttagtagtattttagtagtatttttagtagagatggggtttcactatgttggccacgttggtctcaaactcctgacctcaggtgatccacctgcctcggcctccaaaagtgctgggattacaggcatgagccactgcacctggcctgtttctgaaattttaatggaaatggttgaggagagtcttaaagtgttttcctttgctgttcggtaatgctccctattctcctctacaccctctccatggaacacgttttgtggaatgttcagaggcctggtcattctgggctgatctctaccagaactggtccagacctcttaaggaggtcaggtctccagcctgtttgtctggagtattaaggtaaagcctcagttaaggttcttatatgtagattcttaaatgtagtccacattaatataaactcattgtcttactacccatgtgctgcaagtacctcacatagacctgtaggtgcaaagatatttgattgagaacaggagttctgaaagctatttcaagaagaaatcaaaaaggtttcttttggaattttcctacaggatcattggcagaaatttttttttagtcttcctcagaaggagtacttcagtggaaaaaggatgggctcatcaaaaatgaaggaaaattttcaaattcattttaatgaagtaaataatattgatacttaaatctgttaaagacagtataaaaattacaggccagtatcactaatgagcatcaatgcagaaattctaaataaatattaactaacagaatctaacattaagacaaatgtgatttttttttctaggaatgcaagattggtttaatattaaaaaaattaatagatctcttaactcattaatatgttaatagatcaaaaaagaaaaatgtatgattatttccatagatactgagaaaacactttataaaattcaacaccctgtcctgatttttaaaaattccaaaaataggacttagtggataatttactgacttgtaagtgtctgtgagtcctagatagcatcttatatagcagggaaacactaagaaacatggcaaggaggcccactgtctccacctctgtttggcattgtactaaaggtattagccaatccaaacagacaagagaagtcaattaaaggtatcattgaaaaagaartaaaactatctgtttgcagaggaaatgagaaaccttaaagaatcagtgattctctaactcaaacaataagagaattcagtaatagagcaggatataaaattattatacagaaatcaatagtttttatatacaacaagcaataactagttaaaggaaattatgggatatattcataatagcaacaaataagataaaatacgtaagatagtgcataagaaatatgcacaatcaacacaagatcactttaaaacaatctgaaagacacaaaagtatatttgaacaaatgtaagtcatcctttgctcataggtaggacaactcaaaatcacaaagatggtcagttctccccaagttaatttatacatttaatgcacttagactaaaaataccatcaaggcttttttttttttttttttgagacagagtttcrcgctcctgttgtctaggctggagtgcaatggcatgatctcagctcactgcaacctccgcctcagctccacctcagatcatcaggccttagattctcataaggagtatgcaacctagatcccttgcatgcgcagttcacagtagggctcctatgagaatctaatgctgcygctgatctgacaggaagtggagctcaggtggtaacgtgagctgtggggagcggctgtaaatacagaggaagcttttctagctttcttactcacctgcctgcctgcttctcacctcctgctgtgcagcctggggggtgggggggtggggcagagctggggactctgccctaatatataagaaactcttaacttttgagttaactcaaaagacattaactggtcattgactgtgtatacacacgcacatgcacagacacacgccactgtccattggttaggctgtagggaaacaggtatctctgcgcggctgtgtgcagtagtgggggttctggcagaatctgataaagctaccagtgtgtttaccttctggctcagcatcccacttccagcaatttaccctgaagatatacctccagcaatataaaaatccatgcgaataagagtgttcattatactgtccttttaggaactacctaaatgcctatacataaaagagtggttgaagaggctgtgctacatccacagaatggagtctgctcagctttaagaagaaatgaggagccgggtgcggtggcttatgcctgtaatcccagcactttgggaggctgaggcaggcggatcacgaggtcaggagatcgagaccatcctggctaacatggtgaaaccccatctctactaaaaatacaaaaaaaaagccaggcgtggtggtgggcacctgtagttccagctacttgggaggctgaggcaggagaatggtgtgaacctgggatygcgccactgcactccagcctgggcaacagagtgagactccgtctgaaaaaaagaaaaaatgaggaaaagctctrtgaacttatttgcagctgctccccagcactagcaacaccgcctcagctccacctcagatcatcaggccttagattctcataaggagtatgcaacctagtggttcccgggtatattaattgtgtggggtaggtggatgggggagacaaaagagcatctacaaaatggtaactttctgtaaggaagacaaggaaataagaaaatatgcatgtatccattcatttatgcaaaaaggaacacaggaagaataaaccagaaatgaatgagattttgatttgtggtttacagaaaggaggtggagtgggagacctaggtagaaggaatgggtaggrgagtgtgacacttctcggagtatacttgtctgtgtacagttccgactctgaaccaggttaaacaatgaaaaagaaagaaggattggtggggtttgggtgtgggggtaaaatgtaatatagaagtacagttaaacctaacctgatttcagacaaataaaataaccacactaaagtaaaggggaaaaaaaaagaacaaatccaaggaaatgttcaatacaatatttgaatctataccctcaggctaagggcaaaaaaaactgtaaacaaatattgaactctagttagtaagtgtgatttcgcagtaatatggrtcagcactgctgagaccacttccccctgtgtattatggcattgagcaaatgaataaatagtgtagataatgcaagccagatttcccactattggagaaagaatttatgaatatagaaaaggaggggctagaatgaaccttgtggtattggattggattggagtttatgatgaacttatggttttcaaactggatggatggatgggtggtagatggatagattagatagagaaagaagatgagaatctagaggaaggaagaaagaaagaaggaaggagggaaggaaggaaggagggagggatggatggacggaaggaaatacagttgacctttgattcatcaggggtatgaactgcaggggtctactacacatggaattttttcaaccaaagcagattattcatgggatgtgaaacccatgtatatggaggccaattttttgtgtactcaggttccacagagctcactgtgggacttgggaggcagtctggaacaaatcctccatgaataccaagggacaattgtaatgcatatatacaccctagacacacatgcacacattttctatctctttcttagccccagtttttttaaaagaccgtttttcaccaaaaggaaccagagctccttggagaaatcgctgattccagggcaggggctgagaaagttcaagatgagcctagaacctcttatgcctgaaagtagagacctcttatgctgaaagatgactgggacacaccagtaagacccaggagccagactgaaggagcattcacttgccagatatgtggctatttgagtatcaaaataaaaaatgataggaaggcatacaatctactgaaataataagaatctataagtctactctgatataaataaattaaaagataaataataagtggaggggagaagaaaaagttactccttacagtagaacctcacaagtgaatatggaagaaatgatggttcagaaaaatctgtttggcaaccatcaagtaaataattgattcaaggccaggcacggtggctcacacctgtaatctcagcactttgggaggccgaggcgggtgaatcgcctgaggtcgggagttagagaccagcctggtcaacatggagaaaccctgtctgtactaaaatacaaaaattagctgggtatggtggtgcacacctgtaatcccagctactcgggaggctgtggcaggagaatcgcctgaacccaggaggcaggggttgcagtgagtggaggctgcaccactgcattccagcctgggtgatagagtgagactctgtctcaaaaaataataataataattgattcaagcagccaggcacagtggctcacgcctgtaatcccagcactttgggaggcagaggtgggcggatcacaagggcaggagatcaagaccatcctggctaacatggtgaaaccccatctctactaaaaatacaaaaaaattagccgggcgtggtggcgggcgcctgtagtcccagctacttgggaggctgaggcaggagaatggtgtgaacccgggaggtggagcttgcagtgagctgagatcgtgccactgcactccagcctgggcgacagagcgagactgtgtctccaaaaaaataaaaaataaataaaaataataattgattcaagcaagaatcattcatggatactaaaactaatagattaaatttcatgagaaatagatttatctccccataagtgcttattaattacaaaggcaatttagtgggaaaacccagcacaaaccacataaccctgtgggtcaaagttaacatccctgatgtcaggagacagcactgcctgcctccygatgtcaggccctgaggtcacaatatcgcttccatgtattcctgctagaaatgcacccctgagtcttataacgggggtatctgattatctaaattgagggacataggacaaaataactgcccctgctcttccaaaaatgtctggatcatgaaaaacaaaaagactaagaaactgaaccagattaaaggagacgaagaagccgtgacagctcaatgcatcagatgatcctggatttgatcttagaccagaaaaaaagagcattattactaggacaatggacacaatttgaatacactctatagatgagatctggggttggcaaagtttggcccttgggccgagtctggcctgctgccagttttcgtgccgcatgagagctaagcatgtttttttacattttaaagggtcagaaaaaattttaaagaataaaatttatatgacactttgggaaaggcaaaactatagagagagtaaaaataccggtggttgccaaagggttyggggaggggaagggatgagggatgaataagtgaagcacaggggaatttttagggcagggaaactgttctgtgtaatgctgacatggtggccacaagatgcgatgcatttatcaaaacccacagaatgtacagcacaaagcacgaaccctaacagaagcagtgagctgtggttaatartcctataccaagactgcttcagaaatcgtaacaaatgaccacaccacagcaagatgtgaatgataaggaaactgttggggaaggggacatatgggaactctttctgcacaatttttctgtaaacctaaagttgctctaaaaaaaataaaaaagcctattagttaaaaggaatatattgtgatacacaaacattatgtaaaattcaaatttttatgtccgtaaatgttgagacacaggcatggctgcctttgccctcggacggcaggtttgagcaattgagcacagaaaccatacggctgcagagcctacagtatttactctctgaccttttatagagaattctgctgacctctggattagataatagtgccatatcagccgggtgcggtggctcacgcctgtaatcccagcactttggggggctgagatgggtggatcacaaggtcaggagttcgagaccagcccaaccaacgtggtgaaaccccatctctactaaaaatacaaaaattagccgggcatggtggtgcacgcctgtaatcccagctactcaggaggctgaggcaggagaatcgcttaaacctgggaggcggaggttgcagtgagcttagattgtgccactgcactctaacctgggtgacagagtgaaactccatctcaaaagaaaaaaaaaaagcataaaatagtgttgtaacaaggctgttgatttccgtgattgtactataatcaggtaagataaaccctgggttttaggaagctacacagacgcatataggaatacagagacattagggctgcagctcactctcaactggttcagaaaataatgatggatagacagatggacaaaacatatatggtaaaaagtgaacctttaggaaatctgggtgctgtgtgaagggcatgtaggaatgctttgtactcttcctgtaacttttctttaagtctgatattatttcgaagtaaaaggttaaaaagaaaaaagtattatagaccttacaaccaaccagaacatgatttgaatttctggtttgcttgctatgtggctttatagcagtggttttgcctttctgagactgtgtcctcttgtctgtgaggaaggacttcttctcagctttggaaggcttggatgagatcacgaacctaaaatgccactcatagcacaaaaaattggtgtgaattccaggtgaccagttgaaacatctacctggtgcctgcagaaacactgttcgcagacgtctgcttgctgtgtcgtccacgtgagtcggtgtccatcctctgaaatagcggcagcacttcccagtagcagaccctctttaggggcaggtgacttatggtcaaggctgtggacactctccaccaggagccgctccacacccagttgtagaagaatggacatatttatgagatctgaccagcctgaaaaggggggttgagaggatcttgtggaggatccggagactcctggcggaggagtggggacagatagtctgagtactggtgtgcagtggcgcagtgaaggctcgccgtcagaggcagggatctgccatcagggctaccgctgaggtacagccacagaggtggctgtgggcaccatgaatatttctctctatgcaagcttctttgctcatctgtaaattctgtaatagcaccagtttaagatagaaggcagtggatgcgcaggcatctagtatttatggtgaagtgtcagggtaagaaacagtggcttgtattcactttgattggataatacagaccaacattagtaaatgcttgacttaccaaaaaggagmctcattctgaaagctgaatccactgggctccttgggagccatgaaatgatttatttagcagcaatgtggacgctcttatgctggacgtggggaagattagccaaaaacgtaagaagggcaggtatgccaggagctacggaaatgaagcgggtgtctctaacagagggcctgacccacaggcatctctctgcttctggggagctccagtgggaggattgtgatggctctgctctttgaacagtcccgattcccgtgttgcctcctactgaaacattcatcctgttctacaccaagagcggaaaggggatatgatttaaagcataccaacagagtgcattgaggaaagggcaggccgtagtgtcaaatccagaatagaatggaagaatatatcaataaaactgttctattatctgcctgggcacacctctgaccaacagtgtttctaagcagtcacctaaacaaagtcagccgaagagccagttcaaccaactatgtgtagctttgctgagtaggttcagagaccctagaactggaagtgaagattctgcatcccccattgctagtgtcacttacaaggtttttagcccagatagagatcaccttagtgtgtgtaggtagaagtgatgagggatgggtacagagaggagaggcatcacgtatagaatttttgaggagtcgtaaaacacacacatttgtccccaccattccattccttccctctgtctccctgacttccctccttatccccaagaggaggaggtaaggggaggcrctgcttgtcttctggcagcaagaagttctaggatcgacatgacagggaccactttgcaaattccatcatatttcatttttactgacactgcacaaaatgttccattttataggtgactggagagactgagagagatggattcccttactccatgttcatatcaacactgggattcgagtccagatctgtcccrttccctgtctgagtctccactctgctgtgatgtttctaaagttccttgggaaccttcctgtagctgccaggaataatatccccagggtccctggctaggaccctgcagtgtcctggggcagccacctcagctttgtgccgtggaccctgccgccagttcagaagtcacctgtcagaagtcgggcctcttctgcccctgactgtgtccccatgcgttgcacagctgtctcatgggcctcactccattttacggtggaggcgttttttagcagaaaccactgttcatttcctttcaaaaaacaatcttgtgcattcctgcctagaaagtagcttaaaaaaaatcaatcgtattgttaaagtgtgactttaacaaaaatgaaatatcttgatattttagcgttttaactttttagaaagtgctactcagatgtaatggttggtttttacaatgtaatatgtgttaaaagtagttctgaaatgaagttcggcactgcttcctttgaactaagcagagggcagcagggttatgaacagtgggaattcatcttccagtcagcttttttaaaatgaaaaataacttatgaaccttcaatgtgtgactgcctggggcccccttctccctcttcctcgccacctcccattggctttctttttcactcatgagagtgtgtgtctctctgtaagctaagaacagggtcagagctgagaaaactggggggtaaagaagatagcaaagagaagcacagactggtgtcaggccaggaccatgagctgaggaagccctccaggcccgagggagacttcgaggtcgcctcacacccaccccatgccagactgctgcagggcacgatgcctcagacttaggagggtttggggtgtgttttccagagaaagactttacaacatcttttagaaagggaggccagtctgaggtacagcccagcttccagaggccagctgctcccagtggcagactgccagccctccgtggccttggcctgtgcggcagggaatgagccacgggacaggtatggcagcctgggaaagctgcctgcacttggccgccctttctttgccaatctgtgctggaaaggagattgctccaccaactagtgaactggcagctgcaagcttaatccactgataggttgggcttaaataaatctttttttaataggatttataaaatgaatgcactacaattataaaaatattggaaaattcagtaaagtataagagagaaataaaaatcacttgaaatcttaccacccagagattatatagaacaacataaaggagacatttaaatcatcatataattctacttccacacttccacctttttttttttttttttgagatggagtcttgttctgtcacctggctggagtgcagtgggacaatcttggctcactgcaacctctgcctcccaggttcaagccattttcctgcctcagcctctcgagtagctgggactacaggtgcgcgccaccatgcccagctaatttctgtatttttagtgagacaggtttcactctgttggccaggatggtctcgatctcttgacctcgtgatctgcccgccttggcctcccaaagtgttgggattacaggcgtgaaccaacacgcccggcctcttccaccttcttgagataaccactgttaatatgtgtccttctttttttttttttttttttttgagacagtgtcttgctctgttgcccaggctggagtgcagtggcatgatctttgctcactgcagccttgaactccctgcctcaagtgatcctcccatctcagcctcccaagtagctggaaccacaggcatgtacctccatgcctggctaaatttttgtattttttgatagacatggggttttgccatgtggcctaagctgstcttgaactcctgggctcaagtgatccacccacctcagcctcccaaagtgctgggattacaagcatgagccactgagcctggcccctgtatttttctataaatacatatcgtatataaagagaatcattctacgatactgtttttaaccttctttttcactttttaacaatataatgtctataattatatatctacatcattgtaagagctccaaaataaaaaatttttaattatcagaaaaatactttgtaaaatatatctgtgttttctaaaaagagagaaattctaaaagaatatacacttttaatgagaagtgggacttacctagatgacttatgttctacttaatatttttctatatttttcaaatatgttcactccccaaggtaactgcagctawtattttggtatatttcctaataatttttgttttttttttttgagttggagtctctatgttgcctaggctggagtgcagtggtgtgatctcagctgactgcagcctccgccccctgggttcaagtgattctcctgcctcaatctcccacatagctgggattacaggcacccgccaccacacccggctaattttttgtatttttaatagagatggggtttcaccatgttggccagctggtcccgaactcctgacctcaagtgatctgcccgtctcggcctcccaaagtgctaggattataggcgtgagccaccgcgcccggccataatttttaaaagcatacttcaaaacatgattggactcacgctgtctgtaggattttgcatcctgattaaatcacctaaaagtgtccggtggtcatctgcccacattactgatgaccacatgatgggctttcatgtgggactgctgtgggttttttaattcttcaacagtgggctgtttggattatttctgatttttcacactgcatcagtaatgctgtggtgaacagttgagcccctgaattattttgtgtccctgtctgagtcctcctcaggcttcaattctgtagaaatacagtccccgggtcaggaagtaaaccatgtttaaggctatcactgggtctgaacagactggtttcaagaatttctgctcacttgttagtatcagataagctgctcactagttataatgaaatgggtactgcaaataactattgttgattgtcttgtttctttttattttattttatatttatttatttatttatttatttatttgagacggagtctcgctctgtcgcccaggctggagtgcagtggtgcaaccttggctcactgcaatctctgcctcccgggttcacgccattctcctgcctcagcctcccgagtagctgggattacaggcacccgccaccatgcccagctaatttttttgtatttttagtagagacggggtttcaccgtgttagccaggatggtcttgatctcctgacctcgtgatccgcctgcctcggcctcgcaaagtgctgggattacaggcgggaaccaccacgcccggccaattgtcttatttctttttaaaacggaccttttggtcttatacttagaagttctgtatttatgaatagtcaattacaatattatatctaaatgtaaaaatatgcttttttccaaaaaaaattcaaaataaattttaaatcaaaaggttacccagcctgggctctaccaaaccctgtctctaccaaaaaatacaaaaattagccaggtgtggtggtatgaacccatagtggtcccagctattcaggaagttgaggtgggaggatcccttgagccctggaggtccaggctatagtgagtcactgcactctagctgagatgacagaataagaccccatctcaaacgaaaaaaaaaaagaaaggttacccatcatattaaagttttaaaataaaagaaaaaaaatcttaatatagccatcattaacattttgtctaatctccttcctgccctttttgaattttacatacttggaataaaagtatatgtagtttttggccaggcgtggtggcttacacctgtaatcccagcactttgggaggctgaagcaggaggatcgcttgaggccaggagttcaagaccagcctggccaacatgatgaaacctcgtctctactaaaaatacaaaaatttgttgggcatggtggtgcacacctgtaatcccagctattcgggaggctgaggcaggagaattgcttaaaccttggagatggaggttgcagtgacccgagattcatgccactgcactctagcctgggcgacagagtgagactgcatctcaaaaaaaaaaaaaaaaaaaaaagcatctatagttttgtatgctgctttttaatttgacataccaatgcaagcctttcttccacgttgctatatagtcttcagaactataatgatttgattacaaattattccattgacttaatttatcagaatttatttaaccatttgtttattaacagtgaggttgtttccatatttttacctttataacactgttgtgaatgtggactattttcttaggttcagatccccgaagtggatggacttggtctgaatttacgtttttgttcattcggatttttcattaattcatgctggcctgtcttaggttattcccaatcattaaagcttaatcttaaaggaccatgtgacaatcaggacagttccattggcagagcctccgtggctactgggctgtccttagtaaccaaagtggtcaggaggctgtctcatttgcagagtgacccttaggaggctccaaatgtttcagactcaacacaagagtacaaaacagagcgcttttcctgagtgccgctttggttccacagtgaatgcactcggctgccactcacagaaagcttttattccacaacctttgccagcaaggaaggaaaatayacagaagcagggaggtaatcattatggaacccccctcctttttgtttttcctttttctttttgtaaggacatcatccgctaaggatggaaatgcatttatggtttctcctttctgctaaagcaaactcaagcagcttcattttcagaaatgcagaattgacaaggtttataaatgctgctttgttgactgtgagccatgcggtttggccccagagttatctcagatagcacaaataaatctggcggcctccagttgtctcaaactgagcattagctccttccccggttgtctccctccttgcagaatttcctcttggccttcagcacagactccctcttctcattaatatgccctgttaactgctgccaaacctctagcagtttagtgcatatgttcccttaatcatttctctttgttctagaagtctgtgtttggtttctgaaccaacctttttcctgcccctcccatcactgtccctggctatagcccatgactgtctaccgtctacatgtttatttacagaacatcctagattgcttttgcgatctgctcacaacacgctaaatcatcccctcggcccctgccccatcacctcgagagccctgggccttaggaagccaggtggagggttgctggaccctctagaaaacagaggtgcctgaaagacaatgttaactccctgcacagacaaagactccttcttagattttctgctggtccaacacaagaaaaggacgctttcttcttggacccagtggcatacagcacactcgatctcaatgagttattcatggcgtccaagagaaatacttctgagctgtatttcatgtgagatggagtgggcctggcacatgggcggcgaggccagcctgctcgccgaaagcgtcctgtgcctgttccagcagccgtgtgggaagacagctatctcagcagctgagcccctgccctgtgtgtcctgaggtctttttaacacgtgaagggtcttctgggctccttctgtcccaactgaggcctgcatgcgccgtcagacggagctctgtgagccatgggtgcacagtggacacagtgttgtttctctctgcttttaagtatttttcttctcttaccgagttccagccatttgtaaagttccayccagtttctgtagctgggaggggaggatgataagcttctcagcgtggtctttctctagcgctcctttgtcctcagcaggaccactgtggaagcctggagacttattattagaaactttatgttattacaaaatgccatcccttccgcatccctgtcctggctgctcccctccttccaagaaagaaaagaaaagaaaaaaatcaaagaggccccctcatctgcactgacaaagtggccaaacctgatctttgctctgttgatgaatcctacctcgaaccgcgmctgcgcagcacctgatcggcaattcctgggcacgtagagaggaactgtcctaccacggggttaaaatagggagagcgcagcttgcaggaaattctcagagtgggagtttttgtgtgatttttttttctttcctttttttgaaaaaaagttaatatcgactcatttggkggggatgtaatgcccttttctacctatcccccaaaggaaagtttgtattcttttcaatgaaaccattttaaaagcaggactgaagccgaaaacgatgcagagttctcctgcgtcctcagaaggtgtggatttatttaccatagttaaatcataattagttctcaggggatagtgtgtcttttaaacggctttattgccaccatattggttttctgaataatcagaaacttctgttatgattgtgttctagtgttcraacagaagtgcaccctaagtaggaacaaatgtcaggaattgctagttgtcacttgaagaaggtacatacattgggggtggggggagaaagaacttggcaggatattctgatgaaatagaatctaaccmagtctttaataaatggagtaacggctcaggcaggtacacacgccccctcgcatgctctttttttgatgttaaaaggtgctttcttcatctctttcattctcacgacccaggttagaaaggagggtgatatccctcatggctccacattcctgaaggccagtggaaccaaagttggcccttccatggccacacacccccagatgcatgcaaaccctgtccctcctgtgtgagccattggtgccgcgkgcgtgtccatgtctggcctaaccggtctttccccctcttcggcaggctgatgtttcagacaccgcaggaaatgggcttaatagtgatcgcggcccggcagaccgagggcaaaggtcagtcatcttttgwgatcattgctgttacttctgttttctaaactctgcaactcttgtggcccaggagcccattgaatgtgtgtgctgatcatctgggggactcaagttagtagwttctgttttcataaccgcctggaatggaggaagaggaagagggaagcagtgatcagaaggttcacccttagtagaactaaagcattctgtcaaatcataatgcttatgaatcactggacatttgcctgtgatggcaaatgtgacctacatgaattccgggctttccaatttggggatcgtcactgtgctctagagacgtttattttcctgaaggttctccataaggagccttctgtgtctgtactgagcgtcatgtgggaggccttttgcatgccagttctcaccccagctggccctgggctgggcttgcatgtacatggtgggctctgcatcagtgcccattcacacagtgaccacagagaagcagagcgctgcccagggctccaccacctgcagatcccggagacgagagcccacatcctcccagacccatctggggtctgaccctgtacaggggctgctccacggggcttggcccctccctgctccagccagtgccaggctcacccacatgtgcttctcactctcacagcctcttatgactttttcataagaaccaaagaaataagaaatctgctgttctccacttctttctcctgaaccatgtctttcaaatataattcaaatggaaaaaaaaaatgtttttgtcaaaagctatggatctcaatatgtggattttttttttgttttttgaaaaagacattcaagaagaactttgatgaactctacctctcatttggattcttctatttttctaacttcaattttaagaaaagtaggccaggcatagtggctcatgcctataatcccaccactttgagaggccaaggcagaagatcacttgagcccaggagttcaagaccagctgggacaacttagcaagacccatctcttaaaaaaaatacaaaaatcagccgggcatggtggtactcacctgtagtcccaactacttgggagcctgaggtgggagcatcacttgagcccagtgagctgtaatcacrccactgcattccagcctaggcaacagagcaagaccctgtctcaaaaataaaaaggaagaaagaaaggaagtaaagaaaaataacaactcagttaatatcaggaatccctttttaaacagctttattgaaatataattcctccatttaaagtgtggctgggcgtggtggctcatgcctgtaatcccaacactttgggaggccgaggcgggcagataacttgaagtcaggagttcaagaccagcctgaccaacatggtgaaaccctgtctctactaaaaatacaaaacttacctgggaatggtggcgggcaccttaatcccagttacttgggaggctgaggcaggagaatcacttgaacccaggaggcagaggttgcagtgagctgagatcacacgcactgcactccaacctgggtggcatagtgagactccatcttaaaaaataataataaaaataaataaagtacacagttctgtggctcttatttaatggcatatttgctgggctgagcaaccatcgccacaataggaattgcttctaaacagtggcttccaggacctctcatggatcagtatagattcagttcagtttcccaatgtctgtgtttgccttcatgaccatatgctgggaattaaacctatagtcatatagtcatgttcagacgctgtaagactctgagtcatcaaggcacaaatgatatgctcacagaagcagaacattatgctaattattggaaactttttcagcaacagagcttcagattttaaaaagcttttcttttattaagcccagaatataataagcrttgtaatacaataagcattgtaataagttcagatttatttgagtgtgtggccctggcatgacgtgtgtctgcgtctgtccacgtggcaaggtagcatgtttcccactgtggcctgtgttccaggayggggagggaawgtgtggctgagccctgtgggatgtgctctttctactctgctcatctccattccactgagatcccagctgggacagaggatcccgtttgtccagcatctgatgtccgtggctgtcgtggaagcagtgaggtccattcccgagtatcaggtaggtacagttcagtctccttctatgtccctgggatgcatgcagaatctggcttattcttgtttatagcatgtgcttgcataattggtggctgtagaacctcagcctaccctttgcacagctggcagcaaagtgctctcggagttttcagagcaccaccaggtgctaatgctgcttcaggcttgcctgaatgcattcattccccagaactccctttctacccagtttttcagatttctcaaacagcctgatgagggcaacgctttagtttttggtttttgttgttgtttatttatttattttaattgagacagggtctcactctgtcacccacgctggagtgcagtggcactatctcggctcactgcaacctccaccttccagtcttaagcaatcctcacacctcagcctcccgagtagctgggaccataggtacacaccaccacccctggctcttttgttgtatttttagtagagatggggtttcaccatgtggcccaggctggtcttgaagtcctgagctcaagcagtctgcctgcttcagcttcccaaagttctgggattataggcatgagccactgcacctggtcatgtttacttatgtatttatttttttgagacagagtctcactttgtcaccaagctggagtgcagtggcgccatctcggctcactgcaatctccgcctccagggttcaagcaattcccctgcctcagcctcctgagtagctgggactacaggtgtgcaccatcacacacagctagtttttgtgttgttagtagagatggagtttcaccatgttggccaggatggtctcaatctcttgaccttgtgatccgcccgcctcagcctcccaaagtgttgggattacaggcgtgagccaccacgcccagctgcatgtttgttttttgtttgaagcactggatgagatttgattgttggactggattgaagttgttcatctgcattttctgttgaaaagggttatttggggacctaaaaacctttctcatttcctacttctgtttaccagactctgtgctctarcagagctatcctttatccactgttgaccacatacaatgtgcagatccacttggggccatcttcccscagctattaggacccgtgtgcctgcttccttattactgttggatgttttgttgtcagttattaaaaagacaagcaacagggaacaattagctcagtgaccgaagcattttcttccctacttgggcttcacttcccatagccccctcccaaatgttcctggaagaatttcatatgggtataaataggagattcctgcctccctcccccagcagctcctatgtcaggctaaagagaaatgattggattgattcctgaagcaagatgttaagagcgtgactctcaaaggagacttggaggtcctgtcatcatttcattgaagaaaaggtccttctcactgccccttaaatccctctgtgatgtatttgctgtgtatgaatttttggtattccacagatgtagttaatgctgacrtctctgtttcctgtattacatcacatcgctgaaacggacgcttactaccaggcacccagcatccttgcatatctgatggtttgggggcatcacaccattacagggcttcaggtgcccggccttgagcacctgagctgtgcattctgtctagcaggaagcaatcaaaatagaaagtcctggccaggcgcggtggctcatgcctgtaatcccagcactttgggaggttgaggagggcaggagtttgagaccagcctggccaacatggtgaaaccccatctctactaaaaacacaaaaagtagccagacatggtgatgggtgcctgtaatctcagctactcgggaggctgaggcacaagaatcgcttgaactcgggaggcagaggttgcggtgagccgagattgtgccattgcactccagcctggacgacagagtgagactcgtatcaaaaaaaggaagaaagaaagtcctgtcatgggagaaattaactctagcaacaagttagtcttaggaaaataactaaaacaaacactaagccgagaacattaaatgagtctgtttggtctgtttagctttttcatggctctgactttgaccttggagccccactagttcccttagcgagcattctttgagggcctgctgtgctcagaggctgcgtgcgccaggcgctggaggccaggatggaagtgggaagcttgccttcagcggtgaacggggtcgggggaatttgtgttcccgttctccttaagaagcttgtaccaatgttctttccctcttctgcagtcagctacccagcctcacctgtgtgatgggacatttgattttgaattgggtttcttttttaacatagtcaagttagctgacacagtgcagctactttgattgaaataggcccctgttgtttggatttcactttttgtgtggccttcactaggaccccaactggtccctaaccagatgtcaccgtcagcacacaaatcatgaccaccctccccagacccaaggcggcctcgctgggatgcaggcattccttccggaactcgccttgggccgcccattctcactcctgctctttcttctgtccatgaagtcccccygggccccgcaccctccctccacccacacacccctacccctgctctcttctctgcttcttaaaattctgttcatccttaaggcccagctccagtgccattctcagaccctccagctacttccagctctttcctccagcactgtccagcacttgccatgttgaagcctcttttagggtatccmccacgtgtggctttgaagaggagtgatgtgtgcacctgttccgtctcccatgatgttagcagctcttcaaaagcaggatttgtttcattttggtcttkttttatgtgggaggatcacagcagctgttggaataaatgattgagaaaatgaaaaatgagcacacagtcctcctcttcatgtggaaatgctggtcctgtttacctgcgtgagaacccagagtttcatgagctgcttcatgagccgakgagatctgaagccatgaaggcgagctggagcccaagtgcagggcccgcccaggcaccagctgccacgcacgtggcggaggagcttgacagctctgggaactctgcaggtgtcctcccgccggcgaggcaggggctcattcccctggccatgtrgtgggcacagggggatgtgggaaggcgagagaggggaaggaaagggaactgggggcagtgatgaagagcagagcctcctagacacaggtttcctagaggagactttctcagcccagtgctattgatatgtgggccctggcatgtttgtcgtggggatgtcctgtgccttaaaggatgtgtgtcagcattgcggcctctactctctagacgccggtagcactccctcaggctgtgacaaccagggaagtctcccagtatcgccaaatccacccctctcccactgagaacccccgttctagagagaaaagaaacgtgaagctgttgatcagttctgggtcattgcgcaccccccatgcttggtttacttagactttttgttctcctgtgctcctattcctgtattttttctctcagcctaaactactgttttagggcagatgagcttccaatatgctctaacgggccgaagtcaaaagaaggcctgttggaaggaggaagggatttcatggaagcaacaggccgcgtagcataggattcctcacccaggcctggtggcagaaaggtttgaattttagctccgtggctttcaagtgctataacctcaggcaagccacataatttctctaagcttccgtttctccctctgttccctggggatgcgctagcaccaacacataggctgggtgtgagtaacacgtagactaatgctgagaaggtgcttggtgccatgcccggcctgcaacgtgggaagaccagccccgtggcccttggaggccatcagctactctctgctcccttagctttattttgctgaatgttctcttccagccttgcatctccagacaggcttcctttacccacacatggcacagcctggctgccagcccgaggtctaaaagacctggtggttctgacacccactcggctagccccgtctctgtgtcccaacttcagagtcacagtggataggcagaggcctgggtggccttgttcgagacactgtccagtgttggtccattctgtaagctgatgacagggagagcccccccacccccaggccacaccattcaagacgcagaggcaataggccacatgacaagtccagttccattacccaagatgaccattagcagttctgcgaggctttcgctaaggtgaatttctcctctgcatcttcacagcattcttttttttttttttttgagacagagtctcgccctgtcacctgggctggagtgcagtggcacgatctcggctcgctgcaacctccgcctcccgggttcgcacaattctcctgcctcagcctctcaagtagctgggattacagatgcacaccaccacacccagctaattttttgtatttttagcagagatggggtttcactatgttggccagactggtctcgaactcctgaccttgtgatccgcccgcctcagcctcccaaagtgctgggattacaggtgtgagccagcgcgcctggccactgcctgctactcaagacatttctacctgccttttgtgaccttggttaattcagggccatctttgtctctcaagcatgggttcctgaagggagacgccccctgagattactattctctccccaccctctggccctagcacgttagttagctactccatggtggtggtggtggtggatactgacataatgaacttcatttacaaggtaagcatcttcagaaagggttttggatgatgagaaacagtgctgggggatggggaagaatgctggggtttatgtcaactgtgttcttcagggcttttacctcctggccccaagaggcacttcaatatcggattgtcccaaagaagtgattagctgcctgaaaaagaggagaggacgaggcccatgttaccttggtttctgcttatcttcccttagctcagtgacttgcctgggccccttgtgtcctgtgacrgcttaattaatgtgcagatttccctttaggatatcaacttaygagtgaagtggcccaacgatatttattacagtgacctcatgaagatcrgcrgagttctggttaactcaacactcatgggagaaacattttatatacttattggtaagtttcaaaaacctttcccccagcatttttagattaataaaacaataaaaataaagacggtttatgcatgcctacattggcaggagcagattatcatatgaggttactttgagtcttgtagttttggagcagggtatagatgcagagagattggtygaaagcacttcacagggtttrgcattttctgtgtgtgaccacgggaaccaccaaagtggtatcacatcaaacaggtatgttcctacatccttccacactcctgctactcattgaatttgaaatggtgaaaataaacatttaacgttctattctgtaataagaaaaagaaaagttaatttcctaaatagttctcctggtgtcttgcattcttatcgtgaccttcctgggccatgaaagagctggcatcattttaaccttcagaagaagctccatgctggtcaaggcggggtaaagaatccctgtttcaccttagcacatccaaatcaggcaagaagatggattcagaggcaatctcagaagtccttaggttcctggccgtccagtcatcagcctcactctgtggcagtagaacctaatctgtgttcagaaaccagcaatggtcaaaaaacatgtaaccatgtgtttcaagtgccagccagggaatacaaggcctgtgttaccagctctgccaccaaggggcaatattattctaggcaagctacttcatacccttaaagctccatttcctatctttttttttttttgaaatggagtccagcactgttgcccgggctggaatgcagtggtgcaatctcggctcactgcagcctccgcctcccaggttcaagtgattctccttgcctcagcctcccaagtagctgggagaacaggtgcccgccaccacacccagctaatttttttgtatttttagtagacacagggtttcactatgttrgccaggctggtatcaaactcctgaactcatgatccgcccgcctcggcctcccagagtgctggcattacagacgtgagccacttgcccagtctcccccatttcctatctttaagtgagtaattgcagttgatgcagagattcctaggtaggggccacaagcaggctcatggatggcttcagggagctaacaaatgttatcagcgtggggtaagcgaaggccaggcgtagtggcttgagctcataatcccagctacttgcgagactgaggcaggtagatcacttgagcccaggagttcaaggctacagtgagctttgatcgagccactccactccattctggatgacagagtgagaccctgtttcaaaaataaaacataaaaaataggccaggtgtggtggctcaatgcctgtaatcccagcacttcaggagcctgaggtgggtggattgcttgagtccaggagatcgagaccagcctgagtgacatggcgaaaccctgtctccactaaaaatacaaaaaattagctgggcgtggtggtgcctgcctgtagtcctagctactcaggaggctgagatgggaaaatcacctgagctcaggaggttgaggctgcagtgcgctatgagggctccactgcactccagtctgggcaactggagtgagaccccgtctccaaaaaataaataaataaaaataaaaaataaagtaggggaatgaaacattttcctatggtgagaacccatagcttttattgaattctgaaggccataggatggggtctctgactttggggattcagagcagccagcagggtgctcaccggtccttagaaggacatagcctaagtggccagtagtgagtgttgctactcctcctaggaattccagttttctgaacacgggagaattttcagtgctgtacagcacttgatttaatgccttacgaacgttcagtaggtgcttcagatcctgtatgtattgaatgaatgaatacgtgagcaactgcaagtcctgcccctgttgctgtagttacttgtyttttttccagaggtaattgacaattgctttktattttaatagccagtatattgttttaaaatctgagaccagtcaatccttcccttcacactggaaacggcaggacacttgccgggaakgctgttgttacaaatggcattgttctgcctgtggcgaatgttttggggattttttttcttaaagtcactgaaaacatggtagttttcttactgcttagtttttgcagtatttcatttcttactgaagacctctcgcaggccgattcagggccctgctgaacactgaagtycagcttttctgaagacaccgccctctgcctggagaggatagtggtgttaagtaactgcacagataagcctattcagacaccatccctggtaactctcatgaagccttggtttaggaccctgcaaaaagccactgaacatgagtcggcgtcttgccaacagcgtaaccttagcaccaaagacttccaagaataaagtattaaaagatgcatttctagggttatgccatgaccaaggtttgaaatctctgagtccagagtttacttcccaagtcctgaataaaactctrttttcaagcrtgggatctgttattcaagcaggagaagaaaccagagattttattctctcctggactcagtgcagagctacaatgcttggtagaccacttatttcagaggcaacactgatacgttttgtcccatatttaatagcttctrttgaattaaattgaatcaaatgtggctttcttttttcccacctttttatttgcagtaaggttgagatggttttagcttgaacaagaataataaaagaaggacaaaaaggaagatggacagaaatacatgtcactcttcaagtggttagagacacgaaatctgaaatgaggacaaggaaggaggaagttgacagtcaagactgtaactttttccakgtggcagagaggaatgtgtgatgccatcaacaggctgagctgctcaattgtttgtttttgtccaggctgtggatttaatgtgactaacagtaaccctaccatctgcatcaacgacctcatcacagaatacaataaacaacacaaggcagaactgaagcccttaagagcckattatctcatcgccagagtygtgactgtgctggagaaactgatcaaagagtttcaggacaaagggcccaacagcgtccttcccctttattaccgatactgggtccacaggtcagtgctggctcatcttcattcttttcaactcctttattagtatcttagtagttctgtatcttttttttttttttttttttttttttttgagacggagtctcactctgtcrcccaggctggagtgcagtggcaygatcttggctcactgcaagctccgcctcccgggttcacgccattctcctgcctcagtctctcgtctcagtcacctgagtagctgggactacaggtgcccgccgccacacccggctaattttttgtrtttttagtrgaggtggggtttcacygtgttagccaggatggtctcgatctcctgaccttgtgatctgcccgccttggcctcccaaagtgctgggattacaggtgtgagccaccgcgcccggccgtagttcagtatcttaaaatgagggaccgagcactggtctgaatgattattttctgtgtctctgttagagaaactgcagggacaccaccttgaccaagttagcatcacaagtaatggagcaaacgggcatcttatgcctcctggtgggatgcgatgggaagaaccgaaatagtgagagagtttaacattggtttaatctgattctaattgtgaggaaacaatagacgcatctaaattgtcaaaccttccaggtaacagtggttctcaaagtgagatcccaggaagcagcctcagcctcaaccaggggctactgcatcagaaacccctgggctgggcccagcaccctgtgtcataacagatactccagggattctcatgcagctgaagtccgaggaccgctcactgattccacaacaacaggcctgtgccctgcaaaaatgtcaggtctgcgcacaaacaattagaccaaaagaaggtggcagaattgtttgggattagagaagacgaaagaggcatgacatctaaatgtaatgtgtgtgatcctggatggagggaaatagccacaaaggatattaaaaggacagtgggaatgacgtgaacatggaccgtttgtatccagactttcttgagtggtcatagttaatgctattataattttatgggaggttcttgttctcaggagataaagtatttaagcagaaagtgtcacaatgcctgcagcttttaaaaaactttttttattttcactttttttttttttagagagggtcttgctctgtcactggagtgcagtggtgccatcatagctcactactgaaaccttgaactcccrggctcaaatgatcctcctgcctcagcctcccaagtagctgagacaataggagtgtgccacacggcccgctaatttaaaaaaaaatttttttgtagaggcagggtctcactatattgcccaggctggtcttgaactcctggcctcaagcaatcctcccaccttggcctcccaaagtgctaaggttacaaacatgagctaccacacccagctgcaacttatctttatatgttgcaggaaaaaaaaatgtgtgcttgtgtgtgtttatgtgtgaagaaagaaagcaaatacagaaaatattttcatttggtgtgagaatggaagagaatatgaggtttgttgcactattctttcagcttttctttagatttaaaattcttcaaaataaaaacttgagaaaattctatacttcgaaagctgttaagaaggacgtgacttgagtacatttggaaaatattcaaaagaagtaggatcaggatgagtttcacttgtggctgatatgagccaactttgttttataagataaaacattgtttgccaactcggcctattttcctccaatctcagccaaaaaacctagagttgcacagtgtttcttaaaagcgctgggaggtgaggaagtggttccagccatcaccgcagatgaccagaattaggaggagtgacgttgtgtgaagaaatttcgactccttgttgaacttgcatcctgctggttatttgagcagttcttaaaaccattcaccagggtggaagaaagtcagagctcagcccaggctgccttttccctgcagcgagcctcagccctctccccagcacgcccagctctctcatcatggattattcttcagctcattgtcttaagtcrtcctgtgacacctcccagtgacygcacgctgttcttccttttcagtggtcagcaagtccatctgggcagcgcagagggaccaaaggtgtccatcgttggcctggacgattctggcttcctccaggttcaccaggagggcggcgaggttgtgactgtgcacccggacggcaactccttcgacatgctgagaaacctcatcctccccaaacggcggtaatgccgggcgtccccgagaygcggctgcctgtccgtgcccrtgcatctggaaatctaatttagagttgtaggtgaattttcttttcctccaattcatttgttaagtctttgttctttttctgtgtttctgtttgtttttaggtttgttttgttgtcgttttctttggtgtttgaagaggctctgggatagatggttaagaagtagaaaatttagtttagggaaagccctcccacaggtgggaaattgctctcccctctgtggcttggacttacgtttattgtcaaggggagtttttacatggaaatgacaatgggaaaattcagatattttcttagtagtgcagacctttacccctagtctatgaaaaaacaaaccaaaatatgctcttgcgcccaggccagtggtgagttagaggtatgctatcactgtttgtaagcatctggggaggtactgaactgtaagaacatgcttggacacttagtcattgttctgtgtttttattaatgaagaaaagggaagacagacttccaagagttactgtccacccggtggtgtggccccatagcgaagtctaaatgcctgtagagatagagctagctggtgtggttgcagtgaccttgtagaggaaatcagttcattactttgacatcattcagtgagctctcctttcctaaggaagtttaaatgtccttagttagggactgactttcttaagtaagtttaaatttactacatattgtgaagagacaggatcaagttcagaatccttaaatgtctgattaggcatcacttggatgaggaggtgggcgatttggctctgacagctggagatgaaggcacactcataccacatacaagggaggatttggagcttttaagccagtttcagatttactctgaaatgtggagcattcctgcaagactgtgcagctcacggaatatagaagacatggcattttactcagaagtcataagtttttgcccccctcatttacctcgtattaccaagaaagaaaatgttatcgatactaaacaccatcagttcagagggaggatgtgtgtgtgtgcccgcatatgtgtgtgcgtgcgtgtgtgcgcacatagctttaaaagaagacattcaaaatttgatgtgctacaagcctcatgaaagaacaaaagaaatgaagccttttgatatgcattcgytattcccagatgtacgccatgccttttccatgtccctcctatctctgttgaacttatgaatcatactcattacttttcagctttttaaaaggccaatttttgtccagttttctctcttccagtcccagctgaaattagtggaaagaaagtttgatggagctttcagctttgaacaaaatcccttcattgtaaactagcaccatctttatccaggtcttacccagtcaggctaattccagaaacttgtggtttttagtatagtctgtctacctttagccaggcacaggacagccctatgaaaaaatacccaatatatattttttggaaatgaaacattaaaagaacttaaaaagtaatttttggaaatgaggcttcaattagaattatttttctcaaaaaacaaacaaacaaaaaamamaaaaaaaaccactcttctccaaatgcccaagccttctttcaaaattagttagaaacttaagtaaaatacaagtccacaccatccccaaattacaaaatggacttacccttgagagggcatctgcagaatatcatcagggacaaagatctcgaggctaacgatgtaggtttcatttctcagactttgtaatataaggcaagccctctctcagagctgccatcatcactttttgaatttctttgggggttatttaatgaaaaacatgctatgttttgttttaagctgaagtcctattctggacactctgctttgggaaaaaatgttatcatttaatttcctttctgcaaattaaaactaatgaagtgtggccttgtcaaaggctatggagatgttccgggcatactgctgtgctctgtgctttccagcaggcgctcctccctcacgcaggagactcagttgtcctgagagagatgaagcagccttgaagcagatgctgcgttttccataaacctgattttgcctcacatgaaccaaagactctcaaaactccgcttctatagaattagctgaataaaggcattttactgatagctgttcgtgttagcgaaacctgtctacctgctatagcacactctccgatttgggccatttatgcaccccgcaacctgggatctcaaggagctttaaagtcttaatgggaacttggcattttcctgatgatctttaaaatgtggtcactaaactcaggattggcgtgtgcttttagaacactggagtagcccttgttttagaggctgtgcattgagtatcgaccgtattttgtaaaaggcaagatatcctcccttccaggctggtaacgggtttcaaggggactcttgaggaagtgccccctaaaatagaacacagcaataactgggcttcctgtccccacccccaccccagcagtgctctctggcactgggaactctgctagggagtggtggaagtaggaaggatttgtgtgcaaaggaaaatcrtggttgagtttcactgcagcaggctgacgttgcctgatgtgagagcaagtggccgactggggtgcgggtgcacaggtcgggggagcacaggccacagagcgcagcctctgggggtcccccaaggcacagcatatacagcatggtcgccccttgccctggagtctgggaacaaagagaggagccagcctccccgcactgcttcagatggaaaagggaggcagggtgggcttccgttctccagatctgtttgctcttaacaggcagaacatgggagaatccttattcctggttaatcactatgcatatttgaaataaaagaaagygtaagcctctgcaattttaacttctcaaaggatgtctctgaaaagaatcactttaaaccaatgcctataaaaagcaagtctaccaaaataaactaagactttctatgtggtttgggctccctcttatttttacaagtttcatttttaaaagtaggcaactactttgggttacagtatttttattcatatttaaacatatttttacaaaataaataaagtgttttacatagtaaggaatatgtacgtatttccaagtattaagaagccaagtgtttttttttttgacgtattattgacaaatgtattcagcgccatacacaagagaaatattattactccaaagaacgaaagttaacaaaactccaaagcaaaaacccttttaatggaggtgagaaataaatttaatgtaacaacagctagattgtttttaggatttttcttttcttttgtggaaacttcttgacttgacttttcatctgaacagtttttccccccaagattttaatcttatatgtcatacttaagtttaggaacagcttgaataattagcattctagataacacaagggccatgattcactaaaattccaagctactgtaattttatggcatttatttgcaaatgttctttgtatctcattttatctgtagcagtccccactagtctaccttaaccatcttatagctctggtaaattaaaacttacgtagactttatacaagatccattggccgtattaaacctcccccactcttagggcttagggcggaagggacgaaggcagggctgataggacttttaaaaggataaaaggagtgggggcaagggaggcggaaaatacaggctcttgcagataccctccgcgctgccctccacacccagcccactgctctacaaaggtatgaatggaatggcttttctagaaaagggcttccaagaacataaaggaattcctttccctgggaggccccgtggagggctgagccagccttgaattgggcttatttctcaaatccatttgatctggcatttttgtcaacatggtacatgttagggcctacgatgatttttttttcttttttgtaaaagagaggcatatgtattaaaatgcttcctcttcccctgccggagcctcacagaagtcaagaaacgctatccccagcttaaatgtgcagactcttcaagatggaggtcacaatattaggttgccacagtaacagctctgctgacttcacactcagccctggccgtcctgaagccagctcgtgtaagaatcttccttcatgttctaggttatgaaaacgaagtttgtttagacaaggacgttttcactagtacacattttcaagtacatacacactctgttacgcctgtccacgttgtcacttgtaaatctatgatagggtcttttttctcaacagtaacctttgttattgaactgctccgatagccttgatttatttttactaaatacagccccaaaagttaataacaaggtagacacaaaagcattttgcagtactttattgaaaaatgtcggtggtatctcctagtaatcaaacctacacctttcaagaatcacggtttaattacaagactcatgaacataaaaaaataataccctcggcttatttcctgtgcacacactcacaaggagctgtgaatgaggtatagctgagtgcgtggagaggcgggcacatcccttcctaccatccagccccttcgctgcatgacccacggtcctaaatttgcaaattgtgactcttaccatgaggcccactgacagacaccctgtagggattgtgtcaggtcctcactaagtgacacagggttggcaaaaaaaaaaaaaaaaaagtcagttcacattttgagagcagttggtgtaggtgcacttgattttagaacgatgagtttaaaacatttgtgaaaacctctttccattcagaaaggtggaaaaagtttcctaaaataaaccattttgataaagcagcaaaatgctgcagtgttgatagtgtgaagaaaattgaaggacggcggttcaatgcattgtgcagttcagagccatggcaggatttttccatgttgagatctttaagcaaaacccataaaaagtaaaaattaatggaagctcattttttaaacactgctggtgctttatgaaaggatttctgtttacctgttgcacacgtaacatgttcttacgaagttttctcgctgtgtagaaaatgcttaaaatgtctacatcattttcattacacccccttaagcatgtttttccttcacaaggtgcagtccattgacagtgttccgtattgcacgtgcaatttaactttattagcactatttgtagcaaacacgagcctagtgaattacagatctgtgtgggccagagggattttgccacgtaataatgaagcttgacagggtcattctcataaactgtctggctacatatatatttttgcatttaatgcctattcaatatattctgaaggtgctactcttggtgttatcaagagttcataggggttagggggaagtaagagcttgttaatgtatttgggaagcacacctatgttcacagacacaaaatggaattgcatggtcacccccttagtcttggtttgttggctttttgtattgaagaaagggttaaataaaaacaaaaataatgagactcttgaatgacttttaaagacagtggagttgtgtattcatgggacttacaatcatcacttctgccttcacctaagcatctaaaagggctcgtgacacaggcgtcccctcccaggtctgccgtccacttggaagagcggactgtggtagggtgggttttccctcctgaaagtggaggatatttgcggagtgaaaccgcttcaatcccccagcgggactgttgtggaacgttggggacaaggcaagacgcgtgaagcccgatttcaaggtgaggaaaccaagcccccagcaactgggtcgcaccggccctcgcaggacagaggcgggcggtcacctgcccggacccgggcgctcctcggccctcggcaccggcgcgcggggcctccgcggtggaaatccgcaagtcggcggcggggtccaattcaaacagctgtctctgcataaattaatgtaggtcgtgcgcatttgccgggctcggtggcgccgcagccccgggaggccgggtccaggctcctggcgcgggcggccagcgggtcacctcccgttggtgatgatgaccgaggcgcccaggtagtgcggcaggggcgcgccgggcggggaggtggcggcggggctcgggtgccggagccgcagcgcgccggtcgccgcctcggggccgccgggagcgcaggccaggccggaggcggcgggtgcggcgccccccagcggtccgcgccgggccagcacgcggtggtagttgagcagcacgaagggcagctgcgccggcgcgcccggggcctcgggggtcgggggcgcgcagcactcgggtgccgcgcgggccagcgccagccgcgccccgtcccgggcggcctggcgggcggctttggccgggcccagcgcgggctcctcgcggtagtggccgcagctcgggaagctcgggggcgcggtgtcctcgccgaacctgcgcacggcggcggcgggcgctgcggggacaggcgacacgttagagggcagcaaggggcgcggccgcagccaccccacccccaagccccgggcgcagccaccacccctcggccgcccacgcgctgcacccgcggggtcgctgtcgccctcccccgccttagtctaggccgtgctgtccaatctcaggacgcgacctgaaatgttccaggagccgcgttacaaagcagggaaacaggtggaatgcctgttaagtaatacacgttaatgcagcatatccaaaatactctctcaatggaatccgtgtgaaacaattattgggatattttcttttttttttttttggtcctgagatgcagagcgcaggtcacacctgcctcactgcactggccacatttccatgttcaagaccacacggggttggtggctacctgattggacggcagaggtctagaggccaccaggggccctggtgttggagggcccccgtctgctctgatttcttctgcccgtcccttagtggagaggggtggtaaccaccccgatcggtttcgccgtgtcataatgaaaaataaccactcccatctactcagtccgatgcctgacattaagtagctccctggcttgtgggttttttttgtctttgtttgtttgtttgtttttaaacactatatggcaaaatttgtcttcctttaataccaaaaagactaggaagctgatcgcaaattgcctcaaattagcacctttggtccactttttatcaagtgtgtgataaggagattgttaacctctttcacttttaaaatagtggtaaaagtcaaataccatgtgacagcattagccagcttccgacacacaaattcaagtcaatctcaagtgggtaatactttcagctgttatcaaaaccctttgctttgtcttcctttgcttggatgttctggagatcccttccttggttatatgaggggcccaagatgttcacgggtatggcagatgcaaatctaagggatccgtggctcctgggacaggccaggtcaaaaggcagggggcctggccctggtcaccaatgtggtcttttctaagttagctacttctgaaaaaacatgtcctagtgatttccagaaaggcggcattctcccgtaatctatctctcttctcagatttgggaagaaatgttatctcagcctcaagtcacaatacagagcaagagattcctaggatttgcagaaaaagcaggatgaggcccagaaggagcagagccctacctgcctcgagagaggcgtggaggaacttccaagagctgtcttcttaagcaggggctggtgtgctgcttttctgaggcacatcatcctttttctttttcttttttttttttgagacagtctcactctgttacccaggctggagtgcagtgatgtgatcttagctcactgcaacctccacctcccgggttcaagtgatcctcctatctcagcctccagagtagctgggattacaggtgctcaccaccatgcccaactaatttttgtatttttagtggagatggggtttcagcttgttggcaggcttgtcgcaaactcctgacctcaggtgatccgcccaccttggcctcccaaagtgctgggattacaggtgtgagccactgagcccggcctggggcacataatcctgatgtcaccttcacccacattttagtggcactgcaggcatctgcaccatctcggtctacactctgagcggcagttaggtctcggtgcaatgggaatacatgtcctgcagctaaacctctgttcccaccttccaccttctgcctggggttggtccagcgagcaaacaggagtcagtctgcgtcctggggagctggcggtatctccgcagaggacatctgcttgcctgccaccaggagaaggtgaaaggccattcctttctgttgaactagcatgtacagggcaggtccctactgtgtgtcgtgtccttgggagtaggcacatcacagcttcaccccattttacaggtgaagaaactgaggcctggagggtttgtgttctttgccctgggttggtgagtggcatttctgtccccaagcccacaaatttccaccatagttttccccacttccaaaactggcatgggaaaatagccaataggccgtttgtctcaaatattcacttctggttggagtggaaaggaatcttgcaaaagaaatgcagctggggtgttctcagcacatgggagctggttttgaaaatcactgtccccctttggttggtgaatgtggccaggatttacgtgaaggccagatactcggttttcctttgccctttatactgtcactagtgtccccgaggcaggcagactgccatttctcactctcgaggagcacctgcattgagagcaagaaagcacagcaagccctacttagaagcagaaagagggcaagtttgcccaaagcgtgagggttctgtctccatctgccacccaccgccatggctgcttcggctcccggccgtgcgcagtcctcccaccttccccacgagcagacctgacccaccttcgtagcttggcaccaggctgtgcctagcagtgttcgccggtggctctggaggatttttagctggagacgagctgctaggcactagggggttggcataatgccactggcattcaccgctggctggcantgtgctcaggaaaaagcgtgccacctcacaaggggatccttggggctgcccgaacttggcyggcaacattggctttttgctgctgaagacgtgagagtccagagggaagtgtccgtaatggtaggagaagggcaggctgtaggatggcgtgtacagaaggtcactgctttctgagtggggctgcagttctggaggagcagcagcgcttgcagggggactggctctccagtttccgagctggccgcattccagtttgtccatttggaaygagctgtattgctgcatggcaaagaagatggatgaagggccagcgaggggccggcaggaagctgccttccggccctgcaagaaccgtcccgacggggcccaaccccatccaagggctgcccctaccctcgccaccactgcaaggtcccactggggacaggcacacagcgagcgataccccagtgacctgctcccagggtggaaagagatcccccaccccaagctaacaagacatcaggcacacatggactctttctttctttctttctctttttccttctttctctttctttctttgtttttctttctttctttatttcttttttcttttcttccttccttcccttccttccttccttccgtctttccttccctccctccctcccttcctttcttttccttctttctttttttttttttttttgtcataatgtggaggccgtgacg

SEQ ID NO: 94141 - DNA, 122301 bp, Homo sapiens
  misc_feature (1)...(122301): n = A,T,C or G
agtctgtcactgcttcatgttcttggtatttcttagttcacatccgaagagaaggaaataaattggcaacatcatttttttaagttgaaccggtcctcattgaatgtcacaagcaaacttaatggattccttgtccttagattacaatggtaatcttgtcaattctggcccttttggtacttggacacataatacaaagcctgaccacctaatgattgcactaaacaggggcagtgggttaagtagctgagcatagtattggcaggcaatatgttcgacctatgtacagtagtgaagaataacagtttgctgtcgcttatataatactgtggtaaataattttacttctttacagtgttagtaatttatatattttttcagtgctttacaggctaacaatgtgttcactcatgtaacttcatgtggcactttatattaaaatgaagtgaagtcttacacttttaggaagtggaaaatagatattaatactgaggtatattgagattttttatgtgagatatctatattatttgaatacattgtgcactttgaaagtacaagaaatttttgttcatttagcagtctgcttttcccgctccgtcttgaaaatgctcaccagcttgtcctaatgattaattactgaggtgtcaataacacaaagagtaatagttaacagaatcaaagtgtaaatcctaggaggaggcttgtatcttattcaatccagtatctcatttttaaatcattatttttaaatcattttaaatcatttaaattattttaaatcattttaaattatttaaaattaaatcatttaaattatttaaaattaaatcattttaaattattttaaatcattatttttaaatcatttttaaatcagtatctcatttttaaatcaatttatctatcttccctaagaccattaaggaagacacatgctttagtataatcatccttgtaataaattcttactagaatttaccactcaggaaaatttttgttgttgataaaaaaaacatcttttagttggaaatacaattacacaatctatgtttctctttttatgatagctgtgaggaagcacagggctagacttaattttcaagtatggtagttatatgaacatattcttaaaatagaaggggaacatcacacaccagggcctgttgtggggtgaggggagcggggagggatagcatttggagatatacctaatgttaaatgacgagttactgggtgctgcacaccaacatggcacatgtatacatgtgtaactaacctgcacgttgtgcacatgtaccctaaaacttaaagtataataaaaaaaaattcattgtctccaattcattaaattgttaagtaaaagctgtattaaacattatgtaataccttatttagctgtaatttatacatgcttatctaacagcatatgttcttctctaagtctctatttccattttcatgcaagccacctcaaatcattttggaaagctgctaatcagtcaatgcttattgagcatatactatccattaaaagctacatcagtgaaaagttcacaggagcctctgctgtggaggagtctacattcaaatggggagggcatttaaaaaatagaaaatagttagtaataaaataagttaaaaactcctccatgccatgatctaatcttatatttctctgtgtttcacaatgtcagagatattactgagagaagtgaacactgctaaactaaacaaagcaaaacataggagaaattgatttaatcttttagccttgatgatggagcaaaacctggggagaaactgatggcgcaaggggcagagttgtattactagcacttgcagagccatataaagtgtgtatgtgtgtctgtgtgtgtatagttagccctccatatccatggattttatagtcatgtattcaaataactatggatttaaaatatttggggaaagaattgcaactgtactgacatgtacagactttttttcttgtcattattcccttaacaatggtgtcacagtaattacatagcatttacattgtagtagctattacaggtaatctaaagatgatttaaagtatacaggagcatgtgaataggttatatgcaaatatgacaccattttatataagggaattgagcatctgaagattttggtatccaagggaggtcctggaaccaatgctccatggaatccaagggacgattgagcatatataaatatatatacacataaacacacaaacacacaccatatatattatgtatgtaaacatatacatagataaagtgtattgaatacataaaagggacacattttggatgtgtcttacagaactttaaatacgctattttttaaatcctacttttccactttgtgtaactaagtaagtgctcaataaatcttcattgagtgaatgaatagaggaataattgctttcaaagagttatgggaaaatagtatgctccctatagataaatatagattaaagctgaatactaatcacattagggcataaaacagtttttgtacaacagtaaaaatagcataagtttgcatccaaattataggtatacaaaaagcaacagggccagcttttttcactgagctatacctagttaattcagggcctttcgcataataaatgctcattagatttgattgtattgatttttttgaaaaataaattaaaagccaatccaagcatgtcttataacaatgaaaagtttaaaaataggtatgttagtgatttagtaattaaaatgagccgactttaattagcattagttagtgagttttgaaataccaaccttcaaagcctcataaacagtgaactagcacagctctgacactaattgggtcttaggagcctagtaaggctgaatgtcatttacttagcagtgaacagcttggctaggttacaaggactcccactccccaaaaaattcatctgtgataaatcagctgtaaatctttatatgtaaaatctagtgtggttagtgaatgagcacctagaacaaaaagaacagaaacactttctggcttctaccaatttccatgcaacatcgctgcctcttaccaccttctgctaagagggggtaaaatagaggaccttgaggctggagtggaagtggctgaacccggcttctcctgtcattttcaatgctgattacctgtcagcttctagaagattcaattttcccttgcatttttgtctattcctctctgagaaagctggcaagaaactgcttgctgaaatgcttttctcttggttttcctcttacctcactggcctttctcttccttggtctttttattggcgctttcttagctcccttgcctgcaaatgctggagtaacccaggaattacattacttttccattggtgcataacaaattactacaaattgtagtgctttaaaataacagacttttttttaatctcatagtttctgtgtgtcagaagtctgctcacagcttacctgggtcttctgcaaggctgcagtcagagtatcatttgggcctgggatatcatccgaatgcttgacttcagaaggatttctttctaaatttactcaagttttctgcagagcttattttcttcgagctataggagggagggccttatgttttgttggctggaggctgaaggccttgcaagctggcagctggaggctgccctaagtttctagaggcttccctcagttccttgccagattgtttcccccacatgatgcttgcttcacatacatctcaccgtcacatattctattggttagaaacaagttacagatcctgcctacattctgggagatgggaatcatacagggatgtgaacacgagaaggtgaggataatggagcacctgagtctgtccacttgagggctagttctctgtcctctcccctctatctgcactcatttcttcttacatctcaacggctatatctatggtgttaaatttgatcgtcctcaaacttcacaccagtatagccaactgcatagtttatatatagttcctcttggatagatctagtggacatctcaaatttcatatatctaaacccagaataattatttcccaccaatcacctgttttttcccacactcttctagcctcactaaatgccagctcagttactcagataaaaacctttgtatcatccttgactctacattcttcatacccacatctagcttatcagaaaatcctgtcccgtctattttcaaaatatattcagtctctgacccatttctctccactttgtaaaaatgcttcctgttttattcccagtaaaagctacaccatctggcttttttgttacttctctagcctcttctactactgttccctttttcattccattccagaatagtggctaacttgctgttttctgagcagctcaggtaccctctcactttagagccgttcaactcactgttcccttttactggaacactcttcccccagaagactgcatgtctgactccctcacctccctcatggcctttgatatgtgaaacattacagatgagtcctaccctattcacctttttgctgttgcaatctattttttttccttcctgtgttccaagtgtcctttatactgctctcccttctcctttttttcctgtacttataatcttacaacattctatataggttattcattatatttattgtttatggtccctgtttcctactagaatgtgagtttcatgaggacacagatcgctgtctcttctgttcattgctttatctgaagccgttaaatgttcttggtatataaatagatgctcattaagtatttgttgaatgaatgaacaaataacgcagttagtcttgttctcaccttggtatctgcagcatcttcaattaatcctggattcataagcacttacaaaactattttaccttcaaaacgtttgaaacttgccatttcttgtttagcatcttcagttggcactagggtctgatttaaaatttaggttacttggtagccctctggttaccattccagccctaatgggggtaaagtctatctccatttcctagcaactggctcagaacctacttctagtcagattgaccacaaagaacctcaacaccactgcctctgactttgctgttgatggatactcatgcagtttaaccatatgccagattattttacatcaaatgttgcctctcaccaaacatgtacatgtaccttggtgaatatctcagttcttgtttcactccaggcattaagaaggaggtaaaacaggcagtggtagtcacctgactcctctcccagcatacccctccagggttttttcttctgtggactgtttttcttttatcctatgctctttttttctgtgtccctacatccttgagaactattaatatctgctttttgggtgggactttctgttatgcacatatactctaaagtagtaaataaatgtatcattttctctagattttttaactttaaatcctcactattgttatagaatgaaaaatatattcctttcaaccacatttgaggcattagtctgctggttaatttgatttagggctcaaacattagagaagtccatttctgtttccttgaacttgcatgaaggaagttgctgagaagtctccaagcatattaggcaaaccttggccagaaccttccatttgaggttgggtacmggtgagtggtgactcatgaaggtagctggtataaaaaagagagttatctcaaccacatgggttgagaaaagtttaaagactcattctctaccactattggaaaacaggtagctaggcccttgtcatgtgctttacgatgcttccttttcaactttgtttcttaaaaattattttaatcagatatcatttgtatgacaatatttactgttaatgaagtagtatatggtgattttctctgagtaacatagcctgtacttacctctggctttttcattgtctttgaaatctgacactaattttctaattgcatttttttaggaagcagaatctgaaactttctgaggagagcatttgagcttcagatttctaacaggtaaygagaaaatatggaaaagacccacactacctacattacactttcacaaagtaaaagttaaagttctggtaggaaattttgtaaaaaataaaattcacactgaattcatttttaaaaaattgtatgtacttttaagcacgatgtttattactgagaatcagcccaactacacaaagagacagatgtcagtttaagtagacaaatgtttcaaaaataaaatattttttatcagcagtaaatgttttacttgatagactaacttgatagtcttaactacacgaacagttggatacaaaagaaaatgtgtgtattgccagcaaacattttcaaaagataagcacttgtgccaagtactacatgcttagaaaatctttcatttggacagctgagaccaccacgtgtcttaaaatatgccatccatcatttcagtgttaagagcgccccctggtgtggttgtatatttatatgcttccgtgacttttagacgttttaaaaatttcattttgctattagatggtgatgggccttttttgccgggttgacttggtcagtatggtgtgtaaccatctagacatttgtatttaatatttttcttgtccttatccatgaccgtgtctggagtcagtggtcagcttgaaagccgaatttgggaatatttaattcctaaacttcctcagtcaagctaatggccaataatatgacatttattaagtatgaaattatatattgcgataaaattttacaggataatcaagttatttggtggtaataactttgttaagtggcaaattgctgtgaacaatttctttttggtaagttcatggacattataataatttaacatgagaattcagacaatatattttgcttttaaaatatctattgtgtagaaactaaataacccaaatgttgatatttccttacaagccagmaactcctctctggtgatataacttgcaaatataagcaaaataattcacccatgtgtcataaataggactcttatttattacctgccaccagggaataaccccatagaattgcagccaaaattggcagcaaagtacctgttttgtaactttttttcttgtattttatttttaatcctttaggaatataaaccactcttgcaaagtgaaagtacacataatattctaaatcacatttctgtatatttgataattgcaattattttccctaattgtctcttcttcagactatattatcttcatttaaccatttctcatataaattgtttgaaatttaataatttgcagaactacaattgtgaactgtttgcagtagactgyttttgcttttatttttttctctatgttcctctctcctttgattctgaaaccataagctcagtacaatatttacattaattcctggctggcttgttgaaagaatgtttttaaaaacatagattaaaaaaatcagagcaatgaatctgccttagtagacctgtgtttgaatcccagctttcatatttacttgtaaaaatcatgactgtggacaagttgatgactctctcggagtctcagtcttttctgtaaaagaggaatgcaaatcactacttcagaggatgtccttaatacattctttacattaatatgtgcttaaaacttattatatgccagatatgggtaccttatgacaccccttatttttcacaagtgtgtgaatgtggtattattatttctctattattgatgaggcttagtgatgctaagaagcctcataaatggacaagccaagattctaattcaggtctttctgacttaaagtgagctcatcatcagtggccatcagagaaatgcaaatcaaaaccataatgagatactatctcacaccagttagaatggtgatcattaaaaagtcaggaaacaacaggtgctggagaggatgtggagaaataggaacacttttacactgttggtgggactgtaagctagttcaaccattgtggaaatcagtgtggcgattcctcagggatctagaactggaaataccatttgacccagccatcccattactgggtatatacccaaaggattataaatcatgctgctgtaaagacacatgcacacgtatgtttatagcagcactattcacaatagcaaagacttcgaaccaacctaaatgtccaacaatgatagactggattaagaaaatgtggcacatatacaccatggaatactatgcagccataaaaaatgatgagttcgtgtcctttgtagggacatggatgaaactggaaaccatcattctcagcaaactatcgcaaggacaaaaaaccaaacaccgcatgttctcactcataggtgggaattgaataatgagaacacatggacacaggaaggggaacatcacacaccggggactgttgtggggtggggggagtggggagggatagcattaggagatatacctaatgttaaatgatgagttaatgggtgcagcacatcagcatggcacatgtatacatatgtaacaaacctgcaagttgtgcacatgtaccctaaaacttaaagtataataataataaaataaaaaaagtgagctcacaaccactgtgctatgcatttaatttaatcatgcttattcatgtctactgatttgttaattcatttgtcattactgtcaaataatcccccactgcacatagaggaaagcaaccttcagggaaagcatagaggaatcattttgtatggatgctcttgtctgaaagccagaattgctttgggcatttattcttctatgaagttttgtcaaaccaggtggtgcattaagacattgcttgttattaccatgattgagctgataatagcagtgacaacaaataggggtattaggttagtgaacttgaaggcttctttatgaataatataaaatcggggtaaaggaatgttaattttagaaactgttgcatccttctaatccaccatttattttgtgttttttgtttcctggacctgggagcatagtataagtttgatgtgcattgccattcaatttaagtgtctaattacttgcattggctttgtgaagcttgtatcattttctttatgggttaagaattattttttgatttttatataccagatttcctgtaattgctacagaggccaatgtaataagtttctcatttcattagtaagtagttttgaaggctactaagtagctcatcacagaaatgcagcgtgaacaggcctgttgtttgcttaataaaatctagtgctgcatattatttccttggtccttgagatttgctctaagaattaggctgttcagtcacaattcagagcacattgttaggctcctcaatggctgagtgactgttttcttgtttaggttgtgtcatgwcctgcttgggtcagatgtataggcattattatgagtatgtattcatattattatgtcttactaagatagcacattatcccaaacacgaattaaccttatgaaaatcagtttaacctttaacagaaccaatgaatgagtgaagaaatgggagttttcttagtattttaccctcatttctgccctacagtggcatctcctgccagcccatcttaaacacacacacacacacacacacacacacacacacacacagagcacatttggtaagtgggctctttgacttgtttactgtctgtggaacctctgatattgttttagtttaggccctgatactttgaacaattggaatagtttcctaactggattccacctctccatttttactcctctctaatcaattaagagcaggctaatttttctgaggcatagaactaatatcaggttaaaataattcagtgtctcattgctcaaaaccatcttctggttcttgcttacctctcttctagttttctcactgcctgccattgtcctcactccttgaatgttgtgctttgctctgctgacaaaattacagatcctagaatgctttttgctttctttgcctccctttgtctttatgcaccaactccgtatgtcagtgacagccttctgtacttcttcatttaatgagtccttttatttttgtttcaaaacccagctctacttttattttttactgtaatccttcccagactaacttcccactgcacaagcatacacccagcctgaattaggtatctcttcagtgggccactaaaggccttatgtccacttctgttactgcaaagttctatttacagtggacaacttgaagcaggtattattgtatcacagtacgaggtacattgaaagtgttcaggaaaagcattatttatgaagctcatgaagaggctgaatgaaaaatataaagacgttgtattagaagtcccatgaagcccatgccttcagtcaggttttaaagctgatagatcaaatgcctactatcagccattagtgggcaggatggggaagcagctgttagttgacttcatgtatgctctttcttctatttacattgactctctctcagcactcatgtactcctcagtgcacccaactatccctcatgacagagagttcttgtggcttatttaatataatatcctctctttcctacctgctgaatcctattattgttgcagacaaaaacaaatacagaagtcccctgttttctaattctccttgttggtatgaaagataatctgccataattctatccagtgacatataaacaaaaatccgatggaatttctgggaaagtcctgccttattgatacagatttttgcctcatcttccttcaggccccttcctcctttctcattcctggaaggtagacatgatgactggaactagagagtcaccttgcaaccttgagggaaaggccagaaattactgagactttagccctgacatccttaaacttctaaatcaataccagcaattgccttcctttggatttttcactactaagagaacgtcctcaggttgtgttgaagcctttgttatctgggtttactgttgcatcaattgtctcagttccctaatggatactcattagtattacagttaaaataaatgcattaaaagttaatggtataagtttctcacctccccacctatattttgtattttttaattcaacaaccatatattaagacccaccattaccatgtactaccttagacactaagatataagtattgacacaccattattatgcaaatggctttcagtcttatgaaggcacagaaacataaaattaattgcaataagcaatacagtgtactatagaatatataatatgataggcacaacagtagttacgtagaaaagcctgagaattgacagaagatatcatttgcattttgatcaggatgccctaaaatatgaaaaatttcgataatcaggaaatgaatctctcgtgtggaatttctggcagcctggacaggactaattccttgtgccttttcaataacacagtgtaggtggtcacctacttgtgtcggccttactgcctcttaataataatgaaaatgagctcaatctaggggactttgagctgctgacaggctgtctttggaaagccaaattggtgaaaagcaatctgtggagaaggaggggctggggatgacacaggaagttaccaaggatgctattgacaagaggactgaagcactaagcagagagctgtaacaatgagggcagtaaacaggaaactgaagctctgtggttgaaaggcaagaattagttaatggacagagacatcaaaacatcaggcagcccacagcccagaacaaattcacaatgagggagggctagggaacaagtctcctcaagagagcacaaaaataggctgctctactctgggagtctcagcaaagtctctgtgagaaaagccagaagcagaccataataaggatactatttataaaatcacagaggctcaaaggagttaaaatgagaaaatattcctaaaataaaacataaaaattataatgagttgatgttttgaaaaggcgctaaatgcatgaagaacctgattcaaaaacagggcctggggactttgatttcatggcatgatyttgagatgtatttggtgcagattttgaaattaaaaaaaaaaaagttccaggaaaggtaaaattaatctggaataaaatttctatggttgggccaaatgccattcggaattatcaggtcttgggataagctacagaaggaaatttaagcacattaccacttcttccaactgtgacacacagagttttcccagaagacaagtgaaatgaaagctgccaatgatctaggttttgaatagtaaggactgaccatcttcagtgtgccttaacaccacccacttgagagaaactgtgaataccaataaggcatcaaggtatgtttatgctatcacaaaatactccatactgttactctacccagggttaatggaccaagttatgctttgatgcatgaccaccacttctgatagtgaattatagatacttttctttggcacaagtccaaccttccttaaaaataagtaaactggcttctgtgactatagtcggcctgcacacttcatctaatacagaatgccaattatgtcatctaattttactgagagtgattttctgaaatatatatattatacatgtttgcatgttgtatagaaatatatattagatcacttataatattacagatgatttaaattattcccagtgcaagacataatgctagtacatgcatgatttttttttcttttaaagtgctacctatgaggcagcataattatttcacaggatgtcaaattccatagaatagagatgtaacctatataccttttaactttccttgataatttgatgctgataaagaatgtacaaattaacccacaaattttttgaaactattttgcttgtagttggcagactgctttgatctatgaaacacagtaatgaaactctagagtatactgttttctagatttaagttctaggcatctaggattccataaatatctatgttgacttccatgtcttcaatgtttacaataatttcggttatttcgaccttagtttttagattgagaagttctgaccttttgtatctttcttcatttgtaaatttgttctatggttaattattattattccccataccttatcctgagctttgatatttctaaaatgtggcaacaaacagcataaggcagtataggaacacacaaagcagaatgttaccaaaaaacctctcagggatatttaattgctattagttttctaaaagtgttatcttatccttatttttattttttatgtagaaaaatatataatgtaaaatttttaattctagccatttttaagtgtacaattcagtggcattagttacatacacagtgttgttgaaccatcaccactacccatttccaacattttttaataccctaaagagaaactgtaaaccccttaagcagtatctccccattcctaccttcccaacagattctggcaatgtaatgtgcttttagtcactatgaatttgcctattctagatgtttcatataagtagaatcatacactatttgtccatttgcatctggcttatttcacttagcatacagttttcagggtttatccatgttgtagtgtgtatatyacttcataccttcttatggctgaaccatattcctctgtgtgtgtgtgtgtgtgtgtgtgtgtgtgtgtgtgtgtgtatgtctttgtgtgttcatactacattttatccattcatctgttgatgtacacttgggtgtttccaccttttgtgatttttaaagcagctgtatttcttaaactactacatttttattgagctaagtctcagagtctcttaaagatctttaggcacactttcttttggaaactgaatcctgcactgaagttaacatgttaagatgaacatatctcaattaaatgctgctgtatttaaatatgaagtggattaaactattgactaatctatatgtaaaactgtacacatatttacttgtaattcataattttagtgtcaatatatattcatgtgccgcataacgatgtttcaattaagggtaggctgcatatgtgacagtgatcgcatgagtttatagtggatctgaaaaatacctattgcctagtgacgttgcagctgtggtgaagttagagctgttgtgacattgtaacagtcataatgtcatagtgcaatgcattacttacctttttctggtgatgctgctgtaaataacccactgtactgtcagtcataacaaatctatcacataccattatatacagttcattatacttaataccaaataactatattactggtttatatgttcactctactatgttttttattcattattttagcttgtgctccttctttttttttttaaaatttaactgtagaacagcctcaggcaggtcattccataggatattccagaagaaagcattgttctcacaagagatgacagctctatgtgtgttactgcttctgaagatcttccagtgggacaagatgtggagatggaagatagtaatattgatgatcctaactctttctaggtctaggccaatgtgtgtttttgcattttagattttaactactttaaaaaaatataaaaaaaaaattttttaaatagagaaaaaaacgtatagaataaggatataaaaatatttttggacagttgtacagtgtttgtgttttgagctaaatattatcacaaaggagtcaataaagtkaaaaaagtaaacacacagtaaaatgttgcaataagctaaggtttattattgaagaaagaaatttttaataagtttagcatagcctaagtgtacagtgtttataaagtctacagtagtgtacagtaatgttctaggtcttcacactcactcagcactcactcactgcctcacccagagcaatttccagtcttgcaagctccattcataagtgccctataaaggtgtaccatttttatcttttataccatatttttactgtaccttttctatgtttggacatgtttaggtacataaatcattaccctcgagttatagttgcccacagtattctgcaaagtaacttgctgtgcagctttgtagcagacgagcagtagcgtgtatcatatagcctagatgtgtagtaggctgtatgattgaggctgtgtaaatacactttatgatttttgtacgttgatgaaattgcctaatgatgcatttctcagaacatgtccccatcattaaatggcacatcacttatttatattttttcagacagtacacattttcaaaggctattgaaaaagcttgtggctctaagaaataaatggacctatgttactttatgcattgaatgtctaggttgatagttggctgttctgtaacatgctatatcttacgcagttttttccattgaaaaccattttcacttctgtttcaccaggaggactaggcctgcttactgtcccaaaatgtagccgtcagactcttcttccaccatgattctcgaacagtctgccttattaacatgtgtgtgtgtgtttttgaggggggacttgtttgcgtatctcgtaacagttactgcattttttttttctgattttaaaagcaacgcattttcattttaggatgtttacgcactagagaaacattcaatttgctaactttgctattataaacaatgttgcaacatatagccttgtgcctacctttcatgtctgtgtgcaagtattcctgaagttaaaactaggtgcatttgtaattttgatagatgctttcaaattgtcctttatgtcatgctgtcatacacattacattctcatcagcagtgtgtaataatcccccttttcttacatcatccccatcaatatcataagtattaccaggtttttgagtctttatcaaactactagggaaaaaaggtcttaacttttatttctcttattatgattgaaagtttttcttgtttaagaattactcatatttccatttttatgaattatcagtttatataatttgcttcttttgctttcaagggatttttttgttttgaagtttggagacttgcacattgcctagcatattagttgtcaatatttttccaagtttgtgttttgatatttttcctctggagttttgtcattcattattttttaatgtggttttgtttttgtctttctgtttatgataaacaatagcttctatgtgagattattttaaaatatttccatgatttcttttagtaatattatgcacactcttcatattctatatttaaatatttgatttattgataatgtattatattggactgataaggcaagataacaatcaagtgaagaagaaagtgtcggggaataattatagtaaaatgcttccaaagaaagttggataaaagcatttaaatgtttttatttgttttctgaatggtaacttagttgccctaatgtcttttattgaaatattcatttttttacgtgaatttgctatgccatgtttatcctatacacaatttccaaatgtgctagggtttattcgcagagtttttaatgctattgacattatatcttcatgcttagcactatactagtttagttattctagctgtaaaatgtatttcaacattcgagatagatactgtttttgtgtttcttttcttgtcttttttcatcaatttcacagatcttcattcctgtttgtattaccatctgaactccagaatcaatgtatgtacttctccagaagaagacaaaacttgttggtattttaaaattgggatcatactatatttatagtttgacttaaaaataattgtcatctttatgcttagtgtttctatccaagaatatgtatctctggtcacaatttttatctttcaatcattgtgatgtttcttcataaataacttacataaatcttttcagattttgttgttgttgatttaattgcttttgttagcttctcatttactcccattattctcccaactcttctttacactctctgtgaccttgttttctcagtactacagtttatagctacatctttacattcttgttttgaactggatctttaccttcaaacttaaatgtttttcatagaattccaatttgccaacccaacaacatttctgtcaacccaccatatcttcattccatattttttttgcacacttcttttttttgccttatctgtaaagattaatatttacaaaagctgaagtttctcacaattcacttattctgtcatcctttttcatatggtttctgctcccacaactgttaaagtcacagtattatgaagtgacataatggtctcatagtcatcaattcccatcaatgtttctctctattcatcttcctttccccaatacttcttattgcctctgctctcttaaaacactcctatagatttttcattgagtttctctgagttttactttcccttttgaatcttacatcaaaaagtatatgaatgctagtaacctgcatttgggctatactttttccatgctttctccattggaatgtcatatttcctatgagttctgcataggaattaagcatacacctcccaaatttatatctctatttctaacctcttttctcattctagttacatcctcttgtttacattttctttggtgagccatttgtgaaagatatatgctcactttttaattgtaaagttgatgccaggacatactgtgttagttctcacattgctacaaataaatatctgaggttgggtaatttataatgaaaagaggtttaaatggcttggtggggcgcggtggctcacacctgtaatcccagcactctgggaggccgaggtgggtggatcacctgaggttgggagttgaagaccagcctgaccaacatggagaaatcccgtctctactaaaaatacaaaattagccgggcaccgtggtacatgcttgtaatcccagctactcgggaggctgaagcaggagaatcacttgaacccgggaggcggaggttgtggtaagccaagatcacgcctttgcactccagcctgggcaacaagagcgagactccatctcaaaaaagaaaaaaaaaaaggctcacagttcagcaggctgtacatgaagcgtagttttggcatctgcttctggtgagggcctcagggagcttacaattatggcagaaggcgaaggggagctagtgggtcacacggtgagagcaggagtgagagagagtggggaggtcccagattcttttgaacaaccatatcttaagtgaactaactgaacaagaatcctctcatcatcaagaggatggtactaaacagtttattaggaatctgcctccatgcgccaatcacctccctctagataccacctccaacattgggaatcacatttcaccatgagatttggaggggtcagacctccaaaccatatcagttagctagccagttacctcagttttaacttttaccttgtctttaaatatgcctatggaactggtttttgccagtgtattgggaacagaaataatatgtgacacttttaacttgatgttgcttgaaattatgtgtgcttttgtgtctggaattggtgggttcttggtctcactgactttaagaatgaagctgtgtaccctcggggtgggtgttacagttcttaaaggcggcgtgtctggagtttgttccttctgatgttcagatgtgttcggagtttcttccttctggtgggttcgtggtctcactggctcaggagtgaagctgcagaccttcgcagtgagtgttgcagctcataaaggcagtgtggacccaaagagttagcagtagcaaaatttatagcaaagagcgaaagaacaaaccttccacggtgtggaaggggacccgagcaggttgccactgctggctggggcagcttgcttttattctcttatctggccccacccacatcctgctgattggtccattttacagagagctgattggtctgttttaacagggtgctgattggtgcatttaccattcctgagctagacacaaaagttctccacctcaccactagattagctgtgctgattggtgtatttacaaaccttgagctagatacagagtgcccattggtgtattcacaatcccttagctggacataaaggttctccaagtcctcaccagatcagctagacacagagcgcagattggtgcatttacaaaccttgagctagacacagagtgctgattggtgcatttacaaaccttgagatagatgcagagtgctgattggtgtatcacaatcccttagctagacataaagattctccaagtcccctccagattagctagatagagtgccaactggtgcatccacaaaccctgaaatagacaggatgctgattggtgtgtttacaaaccttgagctaggtacagagtgctgattcatgtatttacaatcccttagctagacataaaggttctccaagtccccactagactcaggagcccagctggcttcacccagtggatcccgcactggggccacaggtggagctgcctgccagtcccgtgccatgcgcccgcactcctcagcccctgggtggtcgatgggacagggtgccgtggagccgggggtggcactcgttgaggaggctcgggccgcacaggagcccatggcggggtgggaggttgggggggcactcaggcatggcaggctgcaggtcctgagcgctgctgtgtggggaggcagctaaggcctggtgagaaatcaagcgctgcgttggtgggccggcactgctgggggacccggcccaccctccgcagctgctggcctgggggctaagcctttcactgcccggggctggcaggccggccggccactcccaatgcggggcccaccaagcccatgcccacccggaactctagctggcctgcaagccttgtgcagcccgggttcccgcccatgcctttccctccacacctcccgacaggctgagggagccggctctggcctcagccatcccaggaaggggctcccacagtgcagtgtcgggctgaagggctcctcaagtgcggccagagtgggcgccgacgcctaggaggcgccaagagcgagcaaaggctgcgagggctgccagcatgctgtcacctctcactttctccatactttgcctccttgtgagatgactgtacattaatgcccagtaaaactttgaaagccatttgcagagactttcagccaaggttcctaaactactgtggagcagactcccttcctcctgtcatgctcttactaggcttatatgagcaagaaataagcatctattgtgttaagccacttagatttcaaggtttttctattatatcagttagcattgcctcaaccaatacaattgctctgtgaacacttcctgttaaaggtattttagatgcttcaaactatgtctagaatacattttcatatgtttttttagacctaatctttctccttttccttctattaatgaacacaatataccattatattattatatgccaaatacccagactaaaatagtcattttaactttttatttcatattttcctcaatggagtataatactttccattgcctagaaaagttttcctacatacattgtttcttttctctccgttttctctttctttttctttttttttttttttttttggagacagagtcttgctctgtagcccaggctggagtgcagtggcatgatctcagctcattgcaacctccacatactgggttcaagcaattctcctgcctcagcctctccagtagctgggattacaggcacacaccaccacccccggctaatttttgtatttttagtacagacggggtttcaccatgttggccaggctggtctcgaactcctgacttcatgatctgcacgccttggcctcccaaagtgctaggattacatgcgtgagccaccgcgcccggcctctatccatttttatagtatctattctatttcaggttcttgttatctctaatttgagagttgccataacttacaaccaatttctccgtttaattatttcttcacattctccatacaactgattaatattccaaacttggtgtgatatgtcattagtttttactcaaaactatatgtaataaagttcaaaatctttatctgtattctgcccttcagtttaattttgctgttattttatgtcacttcctatatggtataatatattgtgtaaacaaaaatacctaacacatcttttacaccctgctcattttcctacttccctttgttctgtttacatggaaattgtaaaccttcttaagatccagttcaaatgttgcttctttcacaaagcttctctgatccccttctttaataataagtaatttcttcatcccatgatgaagtgccatcagatggagtgtcatttatgacacattgctttaattatagctacatgtgtgtcttatctcacctactagaggagattcatgatgacatgctttaagaaaactattactaattgaatgttttacctggaaaaaaaattgcatgttaaaataaacttattttcaagagttgtatcaacaattttcttatcagcaatttttccaaaagataaaagtgggtgcaaactgaattagaaaatagatcctcaatgtgtttctaaatagattattactagataacataaaacatattccatggtcattaaatgattgttatgaaatgagagactattactttataatattcaactaaactgactcatgattctttacatatttttcaatttaaaacaagatgagtatgggcagtatcacatacaccatgaaaaataagtatattctctttggaggtaaaaaatttgtgatgaaatgagactttgatgtttcccaaggaatgctgtatccattttaatatgcagaaagacggtaatctcaatcacgtgcttagaatactgctgttgtcttcatagttttcttcatttgagaaaggagtaataatagttcacatataaggctgagcattacaaaagtattaagattcatgaatgtagagaaatacatttttttattttatatgcagagagttaattatacttcgctgttatcaatctgcacaagggctctcttatatttttctgcaattaccttttttacatgatttctcatattcactgacatttctctctgcccatatccatagacaagacttcatgtgtatccctgaaaactatataatattactccatatattgatgtgttcatgttttcatttgtataaatgatgttgaattattctatttaatagttttatcgctcataattttcttatgatttactgattgtactctatgtgcacttttcttcttttcgttattgcctggaattccatcttgtgaatattatcacattttattccatttatctcttatgattggcacctagtattaccagtggaaggttttgtaatttacttgcacatataatttttactatttcctgaatgctttacagaatggctgactcaatttctaagtccgtcagcaaaacccagcagcttaatttccctattatactttctaacatttggtgttatccaactttctgaattttgttaatttgaaaactcataatttgaactttgtgcttctttagtagggaatatgagccttattttcatatgtgaagcttttgtcaactccttctattgggttttctgtttttcttttttgtttttcagaagttccttgtataatctagattaatactttgttagttttaaacattgcaaatattcctccctgtctttaatctttctttgaactttacattgagcagaagttttctttgtattatgtcaaatttgttacattttgcattatgttttcctaaatcaaatttattaaggtataattcatatacagtaaaatgcagccacattaagggtacagtttgatgagctttgacaagtgcatacatctgtgtgccctccaccgcaaacaacatatagaaaatttccatcccctccaaaagttttcttgtgaccttttgcagtcaatttctgcctttgatcccagtcccaggcaaccagtgatctgttttctgtcactaaatattactttttcttcttctagaatgtcatataaatggaaccatgtaatttgtacattttgcgtttggcttcattcactaagcaaaatgttttgaaagaaaaggaaaacaggtatatatagacacacacacattcacacatacactatatatattgtttgccatttctggtgctcttcattccttcctgtatatccagcttgttatttggaatcactttttttcagtcctttcaacttcgtttagcatttccttttagtgcagatatgctacgagtagctcatattttaaagacacaaaaggtttttatttcaacttttaaaatttgtttgttttgctaagcaattctacggacataattactttatttttgtagggtactttcagtagatacagaatttggctgaaaaacttttccttctctactttggacatgccattctgacgtcttctggcctccgctgtttgtgatacaaaaacctacagttggttgcatgattgttaccatctacatagtttcatttgtttttaggtgcttccaagattctctatctgtagctttcataagtcgactatgagtttctcggttgtgattttctttgtatttatcctatttggagtttgtaaatttcttggacctgtaaatttatagctttttcctttctttctttttaccaaatttgggaagattatagccttttatttctgcaaatatttttttctttcactttttgtctctattctcctggaactccagtgacataaatgttgaatcatttgatattatccctcaagtctctgaacctttattgtttttcaatcttttcttcactgtactccaaattttattcaatccattaatctattttgaattttatggatttattttctttttccattttaaaaccatttggtcatattcagtgaattacatttcagttattgtactttttggctgtagaatttccatctcattctttttttattgttgccatttttctgctcctctccctcctccatccctccacatgctagtagatcccagtgcctgttgtttccttcattgtgttcataagttcttgtcatttaacttccacttatacgtgagaacatgcagtatttggttttctgttcctactttagattgctaaggttaagagcctgtagctcgatccatgttcccacaaaaaacatgatctcattcttttttatagctacatagtattccatgatgtatatgtaccacattttctttatccaatctgtcattgatgggcatatagattgattccatgtctttgctgttgtgcatagtgctacaatgaacattcgcgtgcatgtgtttttttatggtagaataatttatattttggggaataatggaattgttgggtcgaatggtatttccgcttgtggctgtttgaggaattgccatactactttccataacagttgaactaatttacactcccaccaacagcgtataagcatttccttatctccacaaccttgccaaaatgtgttattttctgaacttttattaatagccactttaactggtgtaagatggtatctcattgtgcttttgatttgcatttctctaatgatgaataacactgagattttttcatatgttttttgactgcatatatgtcttctttaaaaaagtgtctgttcatgttctttgctcactttttaatggggttgtttttctcttgtaaatttttaagttttttatagatgctgcgtgttagactgtcagatgcatagtttgcaatatattttctctcattctgtagtttgtctgtttactgtcaatattttcttttgctgtgcagaagctcttaagtttaattagatcccacttgttagtttttgcttttgttgcaatagcttttggcatctttgtcatgaaatctttgcccattcttatgtccaggatggtactacctaggttgatttccagggattttatagttttgggttttacatttaaacctttaatctatcttgtgttggtttttgtgcatgttataggaaggggtccagcttcaatcttctgcatatggctagtcagttatcccagcgccatttattgaatagggagtctttccccattgcttgtttttgttaggtttgtagaagatcagatagttgtgggtgtggccttatttctgggctctctattctgttccattggtcgatgttcctgtttttgtacaattaccatgctgttttggttactgtagccttgaagtatagtttgaagtcaggtaacctcatgcctccagctttgttccttttgcttaggattgtcttggctatgggagctcttttttggttccatgtgaattataatatagtttttttctagttctgtgaagaatgtctttggtagcctgataaggatagcattaaatctgtaaattgctttgggcagtatggccattttaataacatggattcttccttctatgagcatgggatgtttttctatttgtttgagtcttttatgatttagttgagcagtgttttgtaaatttcattgtagaggtctttcacctacctagttagctgtattcctaggtattttatgcttttttatggcaattgtgaatgggattgcctttctgatgtggctctcggtttggctgtcattggtgtataggaatgctaatgatttttgaacattgattttgtattctgcaactttgctgaagttggttatcagctggaggagcttttgggccaagactggggggtttttagatctagaatcatgtcatctgcagagatagtttgacttcctttcttcatatttggattcgttttattttttttctcttgcctgattactcttgttaggacttccaatattgtgttgaagatgagtgatgagagggcatcacatctttgtcttttgcctgttttcaaggggaatgcttccagcgtttgcctattcaatataacgttggttgtgggtttgtcatagacggcttctattatttttaggtatgttccttctatacctaggttattgagagttttttaacatgaagttttgttcaattttatcaaaagccttttctgtatctattgagataatcatgtgttttttgtctttagttctttttatgcaatgaattacatttattgatttgcatatgttaagccaaccttgcatttggtgatgaagcctacttgataatggtgaatttgctttttttttttttttttacacaaacagtaatactcacataataagcaggctcagaaatacatcagaaagttgaacttcatttttgagtaggctaaccaacagtaaatgattaagtgtttttttgtttgtttgtttgtctgtttttctatctcttaactgtaatcacatacggcagcatgacaggttagtgaataacgaaaaagctgattgactttggtacaagtgaggctgattcaacgggctcaatttcattctctcatgagggccagcgatgtatacctcactatcttgcaaggatttcttccaaaagatgtgtatgttgccagattttggtatgaagatgatgcttgcctcatagtatgagttgagcaagagtccctcctcctcagttttttggaatatttctgtaggaatggtatcaacttttctttgtacagctgtagaatttgaccgtgaatccatcaggtcctgggctttttttggtaatggtaggctatttattactaattccattttggagctcattattggtctgttcagggattcagtttcttactagctccgtcttgggaggttaatttcattaatagatataaggttattcaggtatttatttttccttcagtgaattttgctagtttgtgtatttttaaggatgtggtaaatttcactgaagctattaaatttgggggaatagagttttatagtattttaaaattgtcttttgggtatttgtggtatccagaatgatgtcttcttttttttttcattcctgatattaataatttgtgctttctctctctttttgatcagtcttgctataggtttgtcaattttattaattttgaatttaactttgtttgcttctttgatttttgtctgttgttttctgctttagtttcatgatttccactctaatctttacatattttttccttattttggctttgtatttagtttgctaccatttttttcaatttttgtaaggtaatttgtgttgctgaccttacaactttatttttaatgtaagcaattaatgatataaatttctttctaataccaccttagctgaattccacaatttttatatattgtattttatattaaaatttttcattttataattgatccttgagagttccttttcaattgataagttatttagaagtgtgttgtttaatttccaaatatttggagctttttcagatgtctttctgttattgattcatagtttaattcccttatgggctagaaatgtactttgttcatttctatcattttaaatttcttaaagtttagtatatggtcaaggagatatacatacacacattatatatgatatgtgtatgtgtgcacatacatagaaatacatatactaatataatatataatatataaaattctacctacagatcaaggcttttattgtataagataaatagtggtgatgtatccggatggaattttggaaatagtggctatttcccacccagcagaaccttggaggccwctgtttcaggattttcactgattttcctagttatcttgtggtgggtttcctggaacaaaaggctataaaacagaacacacctatatctgtaggcccttgggggattcacactgtaacactggcacatttccatgttaaggaaatgctggtcctgcttctccatgcaggcatctctttctctctggatttagagtaattgtttatattgagacctcagttctccaatgggcttaagaaaattgttaatttgctatttgtatagttttgtttttgttttttgttatctaaagataaaactgaagttctttctagctatttttatttctgacctattattttttatgtattggaatattcaattatctaataatttatgtctacattcatgaacccttttcttatctagttttagaatctgggatttaataggcccatgaaatacattgggtaatcatttaaaaagtttatgtgagatgggtatctgttctttgaaatcttgatagaattgtgaaaacatctaggccataaaggccattttaaaatagaatttaagtttatttaatggttttttaatgtagttattttttctgtttctttgccagtttttctgtttctgtgtcaagttggcatggtgttgtattccttcctgtgacaaagggtgggcaaacattcatccaggtcatgtgaggaagaaaaaaatcaacaaatagatacttctctcttcctctgtgccccagagccctctcctcacctggatcctctctatattatttttttttttatctcctcaagtttttctcctagtttattttgtattctggagtcttacggctataatctctcacttttgaggcttacgccatgttagttttgtggaagtgatttagttcatgtttgtggtcctctcctcaagaaacaaaaactcccatattttctattggaaacaattgaggctgggcttggtagctcacgtctgtaatcccaacacttcaggagggtggggcagacggatcacgaggtcaggagatggagactatcctggccaacatggtgaaacctcgtgtctactaaaaaatacaaaaattagcccagtgtggtggcatgcgcctatagtcccagctactcaggaggctgaggcaggagaatcgcttgaacccaggaagtagagcttgcagtgagctgagattgcgccactgcactctagcctggcgacagagtgagactccgtctcaaaacaaacaaacaaacaaacaaaacaaacaaaaaaaaatgaataacctctgtacctctactgtattaaacacctggcaacaattttggcaatgtgagagacatatgccatgattttagtttcctaggcttagtttataatataggtaatcagcagagactccataacatttcattataatcttcagtgttctatattgataataaatatgtgtgacaatgatgattatttaacttatacatttgaataacacttcagattttatactgtttacactctttattctattttattctccttcctacatgtgtagkataggtattaatagccacattactgaagattagggaacttgttgcacagaagaattaaatgatcagcttaatataaaaaagtaaatggtagagttctgtcacattctgtatctagttcttatatcactgaacacactgctgcataggattaaacattctttgcttattgtgttgtgtactaatttatgtcagttcaagcatagattgttaacacatagagtcaaatatatttaaggtttatttgggatttgccgcaaacttcaaagaaggttgctgccaaatagagtccatattttcttctggaaaagtaatttctctcagaagaaattatctatgctatctaacaatattttctttgatgagagtgactgaattctctctggtgcgtctttcaagtgtctctcatggcttttacctcatgattccttattgaatttatttgacaccttgttaaaaataattaattgaaaatgcatatttgagactgaattcggagcagaagagctttaactaaaacaaccagatacgaaacgcagaagtggtttttaaagaagcaagggcagcataaggcagtggatcttactttagcatgcatacaactcatttaaaaaaattgttaaaattcagattctcaggtttcgactgtagtaattctgactgactttctgtcatgggctattaaatctaaattttcaactcttacgtgagattggattactttttgaggtatactgcctgcctactgctgtaatatctatctatctatatatatatatatatatattttttttttttgagatggagttttgctttttttgtccaggctcgagtgcaatggcatgatctcagctcactgcaacctctgcctcccaggttccagtgattcttctgcctcagcttcctgagtagctgaggttacaggcatgtgctaccatgcccagctaattttgtatttttagtagagacggggtttgttggtcaggctggtctcgaactcctgacctcaggtgatctgcccaccttggcctcccaaagcgctgggattacaggcgttagccactgtgcccagcctcctgtaatatcttaaccaaaagcaagatatcagattagatagagctgggatccccaacccgcaggccatggaccggtaccagcccatggcctgttaggaactaggctgcactgcaggaggtgagaggcaggcaagtgagtgaggcttcatctatatttacagctgctttccattgctcacgtcattgcctgagttccacctcccgtcagatcagcagaggcattagattctcatgggaccggaaaccctgttgtgagctgtgcatgctgaattgtgtgctccttaggagaatctaatgcctgataataggtcactgtttccgatctcccccagatgggaccatctagttgagggaaagaagctcagggcttccactgattccatattatggtaagttgtataattatttcattatatattacagtgtaataataatagaaagaaagtgcacaataaatgtaacgtgcttgaatcatcctgaaaccatcccgactggtctgtgaaaaaattgttttccacgaaaccggttcctggtaccaaaaatgttgggggtcatatgtcagctttgaagaagagatgcaatgcttggtggaatgaagacatctgattgaaatatctggcatattgccttgcttatcctaatccatatctaagtagatcaggattccctgtctagtcccaagtaaggattaggatgatcaaggtaattgtgaccatgccacaatgacactgaaaaaattttatttatttattcagtcacacattcaaaaataattgttgagcaccctaatatataaaacagctgatacattgtaataagtagaattatatactgttttactttaacacaaataatatactgctttaacacaagcttgtctaacccttggcctgtaggccacatgtggcccaagacagctttgaatgtggcccaccacaaattcataaactttcttaaaacataatgagagttatttgtctgaatttttttttttttttttttttagctcatcagctatcgttagttttagtgtattttatgtgtggcccaagacaattcttcttcttgcagtgtggcctggagaagccaaaagattggacacccctgatttaacttttaaccatggtttgtaattgttgtctcttttagtgactttcctacctctgaactgaaagcttcctaagagtggcatgttagtttgccgctctgcctccagcccttagcatgaggagtcgatatacctctgtagagggaatgaatgaggtgtgaccttgaggtggttccgctaaagggtttttgataaatgagagtgggttgggaagtcctccagatcaaatttaccctcattttatagatttttytgcatgagaagtggtcatttaataatctctattatgcaagaaaatctatcacctatcagccaagagaaggctacatggttttttaaaaaggctttgttttaaaaacggcaaaattcgaggtgattgtgaacataccaaagtgaaactgaaaacattttattcatttattcaatcatgcatttaaaaatagttatcgagcaccctactgtataaagcacctgatacactgtaataagtagaaagaattttttatgcttaaaacttacagtgttggggggaaaacagccaaataagtaattcatgcaacactggcatatctaaagtcgttagcacagaacagaggccctgtgtttgtggaacagttaagactaatatgccatctgtggttcattttatagagatgattgattactcatgtgtgtgccatgccaaagggcactgaccataataatgacaaaatttttgtgtacttacttgtttttccattacaatgaaagatgcttgagatctagtagtctgttttctttctttcttttttttttttttgagacagagtctcgctcagtcgcccaggctggagtgcagtggcttgatcttcactcactgcaaactccgcctcctgggttcacgccattctcctgcctcagcctactgagtagctgggactacaggcgctcgccaccacacccagctaatttttttgtattttttttagtagagacggggtttcactgtgttagccaggatggtcgcgatctcctgacctcatgatccacccgcctcggcctcccaaagtgctgggtttacaggcgtgagccacggcgcccggcttccagtagtctgttttctatgttcatgtattctttatcaagttcactgcaattctctgaacaatggaccttcagtaaaagacactgacaaactgacccttcccaccttctgctggatgtgcaaaagattagtaagacaggagattcaataaaggtcactgactgcatagaggggcattgattaattgagaattgacatattatcttttcctttacctattctaatttttccaaccatcctgtgtgttttcaaatagtccatccaagtgtggatgccagtgtacttaccttttgtaatgagcataataagactcactggaagcctctgcatagtattttgggaagaaatctctattttgcaattttgatgtttctgaaatttaaatttctaatcagttccttttctgtgttctgctgagaaatgcgtaggttcaaagatttattcaaacatctcatatacaaagtaagttctgaagctgagggaaaaacatgcttgaagggggtctcagtagggtgaccctccagctcttctcagtaacaaaactgtaatctactgagatgcttagggaacctgcccttctttcagctgtcccggttttatcctcacctcctggctttctttaaatttcattgagtctgactctgcaactagactattagcctcttcaggctatattcactttatcatgtttccttaagagggaagagtatttgagaaagtttgatttactttgtgacctaggattatgacttgattatgtaattattcagaatgtttagagcctaaagttagataacaaattaaagttgcccaattaaagggtgtcagaaaagttagagaaaagagtacagtaaaaatgtgaatattcagcttatatttgagtttattcagcatgttataatggagagcctatagacctgggggactgagagactgaaatgtgtaccccggcttttctattgaccttgtagctacatttatatcctgaaaacctcaatgtcttcatcaatagaaaggggatattgaatctacctatatcccaaattgttattataatggaaaaaataatttatgcaaataacttagcagagggcctgactcttggcaaacattaaataacttttactttccttctaattcttcctattgtccatgcatacacagttcaaccaagataaactctagcaaagaacagtaactggttgtcagttaaccatttagcttgaataacagaggcttaaaattaacttgcttcccctcagttatgactctatcctcttttttcttgtatgtctttttaaaaaatatttcccactctgtagcatgagcagctgctgaaagcactgagctaagatagaatcactctttctcttcatacactaaatctaaaagacaaagtgaagcaaaatactgaatctaacttcccacttaaaaaaattctctgaggcttaccctcacaaacaagctacaaggacttcaaagtaggactcaatcagtaagcggtgatacctcagcaattacttattacatgaatgtctgtaacacagatttatttctagtctacatacaacctcagctatagtgaaaacctatcaatgagaagttatattctgcttcaagtgaatccctcatagactataattcctttattatttgcagcagattgtttttctgcctgtggaaaagcatcctaatgcaaaaaaaatgacattaaataatattttcagcattcatttgaggtcctatgatgtacaagatgctttgctcataactgcaggggataacaagtttcagacaaattataattttatgatgattacatcataatagatataataactataaataactataatacagaatagacctttttaaagagttatgagtaaagtaccatgagaatttaaagaagaacttcagttcaggtttaaggatggttggaatttcaaatgtggtcgcattttagtggccattagagatagaagatagagaaagaattaagaggggtcattcaaggccgagagaacagcccaataacataactagaggccagaaaggacaaagcatatgttaacgatggcaaagaaattcagtattcatgaggtttaaaggaagaatatgagttaagatttgaccatatcaaggtcattgaataccaaacaacaatttgtttcattcacaaatattcagaaacacaataattttacaggctgtaatagttgtagggtataatgtcagtcttgtactcagtatatatttatatgtatactttatcacycagaggactgaccgagagtggccaccattggtgaggatataaggagggcctacatatccataatagtcacgggtctcgtttcctgcctgagagtgagagagaagaggagtgtttgtggtcctcttgtggtttgataaatcttataagcattggtattttttcaaaacagaaaggtaaatataaatattattaccagggaaacaaagtgttatctgctaagacaattaatctgtattagagacattttagaggttaaagcttattttcacagaacactgcaacatttctctgaagccctgatatcataagaatcctttgttcaaataacacttccagggacagttttaataatagaaaataaaaggattacatattcccctcatcttggacgagaaataagagtgatactcttttttttttaagttcttaattcaccatttgtgcaaaattgaatctgcatttctgcagctgtaggagaatacagattatttttaatttgttgaaacttcttttatttacagttaayctgtaatttccaaggttaaagtctggaattttgttgattagtactgaggagaggcaaggaagattcaagatgcacaaaacatacaatataaaaagaaaaaggttttattagaattaacaagtaggatagataattattacactgcaggccataataataaatgtgactgtcatgagttctgagtagaatcaactctgtgtcaatttattgaacctatagttttgttcatacttatttcacaaaattaatagataccacaaaatgtaagagaagagtctaactttaaaccccagttggagatgattattacttgctgtctgagtactttcatgcttctcaagtgacattttctttttctttttttttttttttgagacagagtctcgatctgtcgcctaggctggtgcaatctcggctcactgcaacctccacctcccgggctcaagcaattctcctgtctcagcttcctgagtagctgggactacaggcatgcaccaccacgcctggctaatttttgtatcttcagtagagacggggtttcgccgtgttggcctggccggtctcaaactcctggcctgaagtgattcgcccacttcggccacccaaagtgctgggattacaggcatgagccaacgtgcctggccctcaagtgacattttcttaaaccacatctaatttattggaatatactaaggatatagaagaatgatagaattgttataattttttaatcaacagatacaattccctatattaaaaatgactactgtaaatgatcataaataatgctgaaatatcttcaacaggagcagtcaactcatcagtgatacattgacgtaaaaagtgatcaatcctgcagtataattaattaaaatcattcattgccaaggagcttatcatcacttactgtcgttcattagtatgaggtatataactcttactttacatatatgtttttaaaggaaacttttctaagctggctttattaaaaagtaactatagacttagtttatatcctaaataactaagtaaacttttcttttggctataaatgttgtatagtttgcactcaggttgactatacagttagtaatttttgtgggaaaatgaacacatctaaaaaggatccacttaaagagacacattatggatcactttttcctggtttgcacaggactggggattaaagattcacactggaaagccgaattttgtatcaccttgcagaaagcacttctccagtgaataaggaaacaaaatggaagtctatttctgaaatctgaaactgctgcaagtttggtgttcaatgacaaaccaagattaggcaaataagtctttaaaaaccgtccctttaatataccgatttcctttcctttggataaatacccagtaatatgattgctgaatcacctggttttctatttttaggttttgaagaacctccatgctattttccataatggttaccaacagtgtataagagttcccttttctccacatccccaccagcatttgctacttttgtctttttgataattgcctttttaatggggatgagataatatctcattacagttttgattttcatttctctgaggattagcgatattgaactttttttcatatatttcttggccacttgtatgtctccttttgagaaatgtctattcagaattttaaaatcagattattagttttttttctgttaagttgtttgtgtttcttttatattctgggtattaactgctggtcagatgaatagttttcatgtcttttcttcagccttacaagttgtctctttactctgttgattgtttcttttttatttttattttaagttctgggatacacatgcagaatgtgcagatttgttacataggtatacatgtgccatggtggtttgctgcacctatcaacccgttatctaggttttaagcccagcatgaattaggtatttgtcctaatactctccctttccttgccctccaccccacgacaggccccagtgtgcgatgttcccctccctgtgtccatgtgttttcatcgttcagctcccacttacgagtttcttttgctgtgcagaaactttttcatttgatataatctgagtgatctatgtttgctttcattatctgtgcttttgaagtgttccatataacatctttgtccagtccaatgtcctgaagtgtttcaaggaaaagaaattcatatattgaagagataatttgcactcccatgtttactgcagcagtatttacaatagccaagatatggaatcttctgaatgcccatgaacagatgaatggataaagaaaatttggtaaatagatgtacatacacaattgaatattatttaatcatataaaggaatgaaatcttgtcttatggcctactccctagagtcaagctaccacaaagctattcttttatccccatcccagttggtggtgcattcttccctcagggtcaagctgaagtggtgccctgccctgagggacctggagccttttaactgtggggacagtcatgatctggtgccacagctgaggcatcaacccatttcccagggacctcaagccactggcatactggagcagtaaccccctgccctgtgcaataggtgaggcagcagcctgcaccctggaaatatgagcccctggcccaatgaagcagctgtacctctaagcatcatagttgatgccacaccctgaacccagtgatccagaggctctgctgacccatgtagctgcactttctggggctaaacagacacagtgcctttagtcccagggaatcagagcattggctgagctgtggttatgcaccttcaggtcgaaaagcccacagtgtcctccctacctggaactggactagactcctacagtctgagctgccaagacatcccccctcttctggaagtgaaagcatcactgtactgctccctgtcccctggggcctaaatcatatcaggaacttacatccttgctgctatacctggccttataaagtctgggatactnnnnnnnnnnnnnnnnnnnncctcatggtaccttattccctggagcccacctgccagtgtgccctgtttgttctgggtcctgaattgcagctgtgcccaagtttctggggcctgagcctctgtaggacttcttttttttttttaatttttattcagatccatgctggtgcctcccagggtcagaaccatagctacatccaagctcctgggacaaagctactgggatgtgcctcagagagataggcctcagcttagtgggagaattgcattctcttgtgctttggagagtgagcctatggcctcaagttctgggaactacggtattttgacaaaacccttagcccaggaacccagttccacagctgttccaagcatatgtgtcctatattccagtgctactgtattatatactgtattatattatagtgctgcactatatttcagtgctgcttgaaagccatatcagacccaatttcaagaaaaatccccagctaagactccccactgtgagaaaaacaagaataagaggatccctaaagcctttgccctaataacctatgcagccaccattactgaaacaaattcctacagtctaggccatgtaagcacctccagtcatcactaacattgatcacagtggaagaagctgaatgtagattacacctctgggtccacatggagagttgcttgcaccgtgttcaacctgtatgtgaaagtctccccctatgaaagctgctctgtaaagtttagaagaagtgactgcactgtctgatgcacagacatcaattcagagacacaagaaacatgaaaaggcaaggaaatatgactccaccaaaggaacacaataattctccagtaactgaccccacagaaacaacaatttacaaattgcctaaaaaggaaatcaaaataatgatcttaaggaaatttagtgagatacaagataatagaaataaatgattcagtgtaattaggaaaacaatgatccaaatgagaaattcaaataggagctgtattaaagaaccagacagaattcttggagctaaataattcaatcaatgaaataaaaaaaatatatatggttgaggtttaacagcagacaagatcaaaaagaaagaatttttgaactgcagtataggtcttttgacatgactcaaaggaaaattaaaatagttaaaaaaaaaaagcctataggcctgatggcacaccattaagtgaataaatatttgattattggagtccccaaaaacataagagaaagacaaaggaacagaaagtctatttaatgaaataattgctgaaaatattccaggtctgggaagagatatggacatccagatccatgaagctcagagatttccaaatatattcaacccaaagagattccttctgaggcacattaaaaccaaactgttgaaagtcaaagataaagagagaattttaaaagcagtaagagaaaaaccatcaagccacatataggagaatctctattagactatcagcagatttctaaggacaaatcttgcagtttaggagagaatggaattatattgtcaaagtgctgaaaggaaaaaaataaatctatcagccaagagtagtatacctagcaaagctgtctttcagaaataaaggagaaatacttctttgacagacaagcataagccaagagaatttattacaactggagctgccttactagaaatgcttaaggaagttcttcaagtagaaaccaaaggatgatcattactatcattaatacatatgaaaatataaaactcactgctagaggcaaatacatagtcaaatcctgagtgttccaatactttaatggtgttgtgtaagtcatacatatctctagtatgaaggttaaaagtcaaaatcatcaaaaataactaaagctgtaataaatgttacaaagtacacaatagaaaaagatgtaaattgtgacatcaaaaatttaaatgggattaaagtctcgagtttttgtatataacagaaattattagcttaaaatagtagactataagatacttttgtcagcctcatggtgaccacatacacaaaaaacctacatcagctacactaatgataaagataaaagaaacaaaagttagcactacagaaaattatcaaattataaaggtagatgacaagagagaaataaaggaacaaagaaactacaaaagaagcagagaacaaatagcaaaatggcagtagcaagtccctatgtatcagtaacaaccttgaatgtaaattgatcacattcaaccaatctgtgtaatttgattggataatttgatccatttacattcaacacagagtggctgaatggataaaaatcaatatccaactatatgctgcctgaaagagacccactcaagctttaaggatatacagaggctgaaagtgaagggatggaagaagatattagatgcaaattgtaatcaaagaaagcagcagtggctatacttatctgatagaatagacttgaagtcaaaaagtaacatgggacaaagaagattgtgactgaatgtcatgaataagtttatcaaggtgacctaatcattgaaaatatatatttacacaacattggaccacctaaatatgtaaactattaatgaacataaagagaaatagatagtagtacaataataggatgaggcttcagtaccccactttcaacaatggatatattaaccagagaattaattagtaaatgctggacttaaattgcacttttgaccaaatggacttagcagacatatacagaactttccatccagcagcagcagaaaaatagacattttttccagaatacatgaaacaatgttaggtgataaaacatttctttaaaaatgtatgaatatttaagtcctattgagtatcatttctgacactaattgtatgaaactagtatttagataaatcatgaaaaattcataaatttgtggaaattaaatgacatgttcctgaacaaccaatggattgaagaagaaatcaaaagataaatttaaaaaaatatcttgagacaaacaacaatgggaacacaacataccaaaacttatggaagacagcaaaagcagttttagaggaaagtttatagaaataaacgcctacattaaaaagaagaaatatctcagaaaaatagtctaacattaagcctcaaggaactagaaaaagaacaaactagaagaaggaaatcaataataaacatcagaatagaaataaatcacataaagaatagaaagccatatgaagagtaaataaaactaagagcttttctgaagaaaaaagagttgtctaatcataaaaaagacttaaatgaatgaaaccaaagatgaatgagaacaaattactgcagacactttacaaataaaaaggatatcaaggaactattacgaacaattaaatgccaaaaaattggataatctaggtgaaatgaaaaaattcctagaaaaatacaacctaccaagattgtaggtatcaccttgatacctaagtcagacaaagacatgacaagaagagaaaactacagaccaatttctctgatgaacagtgatgcaaaaatccttagtaaaatattagcaaatcaaatccagcaacacatcaaaaagatcgtgacagaatgagatttatccctggcatgcaaggctggttgaacatatgcaaatcaatcaatgtgatacatcacattaacagaataaaagatataaaccacgtgatcatctcaattgatgcagaaaaagcactggtgtactccaacgtcctttcttgataaatatgctcaacagtttaggtatagaaagaaagttcctcaacataagggtgttttataaaaaacccacagctaatattataatcaatggggagaaactgaaagtttttccattgagatttggtacaaggcaagtgatgtccactgtcactacatctattaaatatagtactgaaagtactagcaagaacaatcagacaacaaaacaataagaaacaaaggacatgaaaagtcatctaagttaaaaggaagaagtaaaattatctctatttgcccatgatataattctatatgtaaaaaaaccagaattccacaaaaaaactcatagaactaatamatgaatatggcaaagttgaaggatacaatattgacatacaaaaatcagcagcatttatatacacaactgaaaacccagcctaactaaaaaagaccctaagaaaacaattccatttacaatagcatcaagaaaaaaatatacaagaacaaatttaactggggaggtgaaagatcactacactgaaaattataaaacatttaatgaaagagattgaaaagacacaaataaatagaaatgtaccttgttatcatggataagaagagttaatattgttgaaatattcatagtacagaaagtcatatgcaaatttaacacaatccatatcaaaattccaataatgttcttcacaaaaaatagaaacaacaactttaaaaccaatatgaaacttaaaaaatcctgaattgccaaagcaattctgagaaagaaaaacaaagttggtagcatcatatttcctgatttaaaattatattacaaatctataacaatcaaaacagcatggtactggcatgaaaacagatacatggaccagtggaacagaatagagaccccagaaataaacctaaatatatactatcaactaattttagacaaggacatgaagacaacataatggagataggatasttcctttaaaagatggtgctgggaaaactagatttccatatgcaatagatttccatatgcaaaagaatgaagtaggcccttataccatacacaaaaagtcaacccaaaatggataaaagcagcttaaatataagaccaaaaccataaagctcctggaagagtatgtaggggaactacttctggacattgacctttgtaatgattgttttggacagcaccaaaagctcaggccacaaaaaacaaaaataaaataaatgagactacatcaaactaaaaaaactcctgtatagcaaagaaaatagcaaagcaaaatgacagcctatggattggaaaaagatacttgcaaactatatatctgataagcgtttaatgtttaaaatttagataaaactgatatcactcagtagtggaataactaataacccaattaaatcatggtcagaagacatgaatagacacttctccaaagaagacataaatggccaacaggtatgaaaagtgctcaacataattaaccattaggaaaatgaaaattgacaccactatgagataccatctcacacctgttaggatggctattataaaaaaaacaaaagataacaaatattgacaagggtgtggagaagagggatctcttgtacactgtgggactgtcgattagtatggccattataaaaaaaaagtatgaggtttctaaaaaaatttaaaatagaagtacagtatcatcaagtaattcctcttctggccgtatatacaaagggaatgaaatcaccacctcaaaaagacatctgcactcccatgttcactccagcattatttacagcagccaagatatggaaataatctagagtgtccatagctggatgaatggataaataaatagtagtgtgtaaatacaatgggatattatttagccctaaaaagcaagatcttgccctttgttataacatggattagcctggagacattatgccaagtgaattaagtgagacatagaaagacaaatattgcatgatctaacttacatgtgaactcaattcacagagataaaaaaacagagtagtggttatcagaggtggaagcaaatgtgggaactgggagatgtaagttaggggatacaaagtggtagatatgtatgatgaataagtagatatctaatgtgcagcataatgactataggcagtaaaattgtattgtatacaggattcatgctaaatgtgtagctgttcttgcctcaaaaacaaaataattgagtaactatatgaaatggtggatatgttaatttgcttcactatagtaacctttttagcctcataatatcatattatatcccttaaatatacaaagcaaaatctatttaaaataaaaataaaacaaaaaacttatgaatattacatgaagacatggaaaagttttttttttactttattttttattttttcatcatatggaaggtctgtcattagtattgttttttctgctttaagttatgcctattgtcattttactttgttggttatataatatgaaatattaaaataagatacaaaaatacatacacctgttaccatcaacattaataaaaggaagaagattgcaggggcatatttagggccagtacattaaaaggaaatgtgaatccatgcaacatacaataacagcaaagagaagatgaatatgcaataacaaaagactgaattttaaacatgcatttcatatgaggcaattacaaggacacaaataatgcctctgagactgtatatgtccttattaattaagcttacattctgtgccaagaattaggaagataaaggaagaagaaaaaatcctggatcccaggtgattttaaggataatttctaaggacattcaagatattttctagtaaagggtttgttatcttccccatgtctttaaatatatagaggttacatagagatgtctatggatgttccttttattttgttttatatatatttaaagcaacatctaatagaagcaggagggagtaacagtatatcaaaaattacattgatctacgaaaatccataaactggatgaaaataaaaaggggcattgtgtgaagatgaatgaagaaccaaacagggcaaaaaggagagggaaatacaaattacatcattaaaacatttgatttaaatttttttaaaaacctgaattcaacccatatttactatttgttatccatataaatttgcatttcagtagtcttatctttagcattaccatctgtgaaaagggaatgagaattattgatgtatttaccttgcaggattrtaacacagataaaacaagataatggatgtaagagaactctcccatctataacatagtctcacacacacataagtagttttgtggtatattacttacttaacatgtagcatattttacataatgtgatattgagaggtgacagcgtgctggcagccctcacagccctggctggctctcggcacctcctcggccttgatgcccactctggccccacttgaggagtccttcagcctgcagctgcactgtaggagcccctttctgggctggccaaggccagagccggctccctcagcctgcgaggaggtgtggagggagaggcatgggtgggaactggggctgcccggtgcttggaggccagcgcgagttctgggtgggtgtgggcttggcgggtcctgcactcggagtggctggccagccccgccagccccaggcagtgagaggttagcacctgggccagcagctgctgtgctcgacttcttgccgggccttagctgcctcccatgcggcagggctcgggacccgcagcccaccatgcctgagcaccgccccccctaccctggctgtgggctcccacgcagcctgagcctccccgacgtgcacagccccctgctccacggtgcccagtcccatcaaccacccaaaggctgaggagtgcaggcacacggcacaggactggcaggcagctccacctgcggccccggtaggggatacactgggtgaagccaactgggctcctgagtctggtggggacttggagaacctttatgtctagctaagggattgtaaatacaccaatcagcactctgtatctagctcaaggtttgtaaacacaccaagcagcaccctgtgtctagctcagggtttgtgaatgcaccaattgacactctgtatctagctactctagctactctagctactctggtggggagttggagaacctttgtgtccacactctgtatctagctaatctagtggggatgtggagaacttttttgtctagcttagggattgtaaacacaccaatcagcaccctgtcacaacggaccaatcagctctctctaaaacagaccaatcggctctttgtaaaatggaccaatcagcaggatgtgggtggagccagataagagaataaaagcaggctgccagagccagcagtggcaacctggtagggtccctttccgtaccgtggaagcttcgttctttcgctctttgcggtaagtcttgctactgctcactctttgggtccgcactacctttatgagctgtaacactcaccgtgaaggtctgcggcttcactcttgaagctagtgagaccacgaacccaccgcgaggaacaacaactccagacgcgccgccttaagagctgtgacactcactgtgaaggtctgcagcttcactcctgagccagcgagaccacgaacccaccagaaaaaagaaactccaaacacatccgaacatcagaaggaacaaactccagacatgctgcctttgagaactgtaacactgcaagggtccgcagcttcattcttgaagtcagtgagaccaacaacccaccaattccggacacagtgttttcctaagagacctcgaaagtagcacaaaggcaagatttagtagagaagattgctctagaaagcttcattttgatttttaaaatattaggttggggacggataaactgcattaaatacttgtctgtctttgtggacaactttaatctcatggaatgttaaaaaaaaaaaaaaaaaaagaaagtaaaccaggcttaatttaagccaatgagcaacaacaattgtgatatgaaagcactggaaacatgaagagaaaatgtccacctgatctgagaaggaagacatgtgccatgtttataaatatatgctaaacacttttggagggaaactgggagaaagtgtaagcatataattacatagtttgagactcttaaaggaacattaccttaagatattttcatagtctttaaaaaatatgactaatgaaatatttgatgaagtgggaagcatgccaactagatcattgtaactggacagggagcagtaactgaactcaaaattttgaatatacaacaaataattattttagtataattatatcccaaattttttatctggcaaccctgtttctagagggcaacataactttgttttctaatgcttttctggcttacattgtatctttttctgggaggataaggaataaagaatgaagaaattacgcgcaaagcctcaaactactgagatctgatttcaggcactttgccaaaggttgttaaatgctacaacccatagaatcacaaaactgaaaagaacctttatacaactcctgggcaattccctgattttaagaggaaaatggaagacttaacttctctgagacagaacataatgaaatataaaaatatttatcacagatactggttgctaaggaggtttatggaatctacttccttrtagtcattcaggatcccctaatggtaattcttaccgtgtatttgggagtggaacgtaggacttcttcaggtacctattagctcaggaagcctatttttaagcattactggaatccccctttagtacaatctcttcacagttttatagcactatgtttttcacctcatgaatccctaaagttccagtaacttcattacagatagttgtggggataatttaagcaagttccacattcctctaatttccttttgcacaacttctcttacaaaataaccaatgcatgagacactttgccaatgtgacagctgagttttaaagcctcagctgtagttagaaattcctgtgactaacctttggagagctgattcaaactaggtacccctcaagtagattgcagtactgtcattgattctttgttgcttgaataacatatgaaatgagagcaatgtttctggaaggtgattttctgacttataattagagctttatgccccaaaagcagcatattttaaaaaaacaactggaaaattctctatgatcaacatatctccaacgttagcatttctataaaatcaacattgattggacatttcatgaaggaagtcatagaaactagctaaataagcaagttcttgccatatcaaaagagaccttccaggatgtttaacatgattcccttgtttagttccgtatatttcctttaaacgattagcctttccagtgaaacatgcagacaaaaccacaatataggtcctacaatcttctgggcttctacctacctaaaagggccaggtcttaggtaggaagcaaagtctcttttttgcttcttgcctaagcactggtcccttagacactactttttgaattattttgatcacatgaatggaaatcacttcaaactgaaatcccattgcagagatttcacctcaaactgaaatctcattgccttctaagctggttgtcatttaccaagggaagggttatctctactctgttgacatatagtctactctgtctagaggctattgtgtctaggcctcactttcctgagagtgagtttatctgttctaaaatctgaagagctatacaaataagggatacattcagaacttcttttttccccccactattaccattttaattcagtattttcttggagatttagagattcaaagaaatgtaataatgtaagaaaatgaaatgattaggacaaatattaaaaagaagtgataaagtattggaatatttctttttgctcctgtttctgtcttcatttatttccccttccaacttttattttaggttcaggggatacatgtgcaagtttgttacatgggtaaattgtatgttgctgggatctggtttaaaaattattttttcacccaggtagtgggcataacaccctataggtaatttttcaatcctcaccctactctcactctctcccttcaagtaggtcctggtgtctgtcgttcccttctttgtgtccatgagtgttctcacttataagtaggaacatgcgatatttgtttttctgttcctgtgttaattgctaggataatggcctttagctacatctgtgttgctgcaaaggacatgatgttgttctttttcttagctgcaatgtatttgtgtatatgtaccacattttctttatgtagtccacygttgatgggcatctatgtcgattccctgtctttgctattgtaagtagggccgtgataaacatatgtgtgcatatgtctttatggcagaacaatttatattccttttaatatatacccagtattaggatcactgggttaaatggtagttctaagttctttgggaaatcttgaaactgctttccatagtggctgaactaatttacattcccaccaggaatatataaacattttcttttctccctaggtttgccagagtctgttattttttgactttttaataatagtcattctgactagtgtgagatggtatcttattggagttttgattttatttctttgatgattagttgagaatttttcatatgcctgttggctgcatgtgtgtcttctcttcatgcctttgcccattttttaaatggggttggtttttgcttgttgagttgtttaagtccctcacagattctgggcttagacctttgttgaatgcatagtttgcaaatgtttttgcccattctgtgagttgtctgtttattctgttgatttattctgtttattctgtttcttttgctgtgcaaaactctttaattaagtcccacttgtccattttaatttttgttgcaattgctttttaagtcttcatcatgaaatctttaccaggtcctatattcagaatgatatttctcaggttttcttcaagggattttatagttttaggttttacttttaagtttttaattcatcttgaattgatttttctgtatggtgtaaacaaggagtccagtttcaatcttctgcatatggctagccagtaatcccagcaccatgtatcgaatagggtgccctttctgcattgttttttattgatgatttgttgatgatcagatggtgtgttctttttgtgtggtcgtctaatctttcccattggtctgtgtgtctgtttttgtgccagtaccatactgttttggtgactgtagccttgtagtataaagtttagtactgtgatgcctccagctttgttctttttgcttaggattgctttggctgttctgactcatttttggttccatatgagttttagagtagtttttttctaattctgtgaacaatgtccttggtagtttgatatgaatagcatcgaatctgtaaattgctttgagcagtatggtcactttaatgatattgattctatttatgagcatgtaaacaccatctgtttgtgttatccctgatttttttccacagtattttataattttcactgtagagatttttcagctccctggttagctatattcctaaactcttaagagactaataacgagttctgaaatttaatcagtaataaaaaacttaccagccaaaaaaagccctgaacctgacagattcacagccaaattccaccagatgtataaagaagagctactacaaatcctcctgaaattattccaaaaattgaggataagggactcctccctaacttattttatgaagcattattttgataccaaagcctggccagagacacaatgaaaaaataaaacttcaggacaatttttctgatgaacataaacaaaaagatcctcaacaaaatactggcaaatttaatccagcagcatatcaaaaagctgatcaaccaaaatcaagtaggctttattcctgtgatgcaaggttcaactgcataagtgaataaatatgattcattacataaacagaactaaaaacaaaaaccatctaattatctccatagacacagaagargcttttgataaagtacaacattcctttatattataaactctcaacaaactagttattgaagaaacttaccttgaaataataagagctatctgtgacaaactcacagccagcatcatacaggtaaaagctgtaatcattcctgttgagaattggaataagacaaggatgcccaccctcgctgcttgaattcaatatagttttggaagtcatagccagagaaataaggggagagaaagagataaaaggcatccaaataggaagagaaaagtcaaactatctctcttcacagatgatatgattttatcattagaaaacctcatcgtttctgcccaaagcctcctagatcggataaacaactttagtaaagtttcaggataaaaaaccaatgtacaaaagtcagtagtgtttctatacaccaataacgttcaagctgacagccaaatgaagaatgcaatctcattcacaatagccacacacaagaaagagaaaaccttcagaatacagctaaccagagcttctgaaggtgaagtttgtatgacttccttgatctttctagcaaaggccccaatacttctgtgttaataaatggggagccagatatatcaagagtagaagacatttaattgggggtctcttagagctgaaagagcttgtgagtgcaagttatctgacgatgtaatttcctccgtcatgaggccactggtgtagactaagagagaaaaggcattgcagcaggcgtgggcatttggctactactttatgtaacttacttatgccttcagagcctactcaggacccatcatgtatatatcacttctgttggatgatagagtgttgctatacatgccaactttatggcttggtatgtcagaaaacacccagtttatgaagggcaactcaggtcgcatgggaacttggtgacccatggttaaacattcagactctactaaagcccagtagcaggccaagagctatttttcaaaaggatagtagctttctgcagatcatggcagggccttgttccaaaatatgaaaggcctgcactgcgattcacccacatgggtttgccaaagactccaaatggcatttctatctctgagtgacactttaagtaccacagggtatgctgggttatatggccgaagtgaaatagcagcttgcacagccacctgaacctgttgtagagccttcctttgatggcctcactcaatgctacaagctttttgggtcactaggtaaatgagatagaacaatatctccaaacaaagaaaatattgcctcccaaatccagagaggcctaccaggcattgtgcttcttcattggttctaggagaggccagttgcaatgacttttccttcacctttgaagagatatttcaacatgccccataccactagactcctagaaatttcactgaggtagaaggcctgtgcatttttttgtatttatttctcaacgtgtgatatgtaaatcttttactaatgatagaatagttgctatttcttgctcactagttccaattaacataatgtcatcaatgtaatagacaagcatgaaagcttgtgaaagggataggtgatcaggatccctttgaatttaagacctggggctggccagtttatataatcctgtggtagaacagtgaagttatattgttgccttgccagctgaaaacagaccactgctggtgtctttactaatggatattgagaaaaatgcatttatcagatcaacggcttcataccagctaccagaggatgtgttatttgcccaagcaatgcaacctcatctggcacagcagctgcaattagagtcaccaccttattaagcttatgataatccacagtcattcttcaagatccatctgtcttctttacaggccatatagccaagttgaatggagatgtggtgggaatcattgcccctgtatccttcaagtccttgaaggtgacactaatctctgcagcccttccgggaaagtggtgtcgcttttggtttactattttcctaggcagagggaattctagtggcttccgcttggcttctcccactataatagcactcactgtatagtcagggaaccaataaaggaattcggcctgctgctgagcatatccgttccaattgtacattccagaacttgagaaataactataggatggattaaggacttactgagcccacagtgggacagacctaagctaaaatttcattaatcacatggccttcataaatccctcctttgactggtagaacacmgtgatgtttgggtttcctagaatttgcgtcagttcagagccagggtccagtagttcccaaaaggtcttacttttaccttttccccagtgtacagttattctggcaaagggctatagatccctttgggaaagactgggagaaagatgaacaaaataagtttttggtagtgtaccagaatccttccttgagataaccctgactctccttttttttttttttttttttttttttttttattatactctaagttttagggtacatgtgcacattgtgcaggttagttacatatgtatacatgtgccacgcttgtgcgctgcacccactaatgtatcatctagcattaggtatatctcccaatgctatccctcccccctcccccgaccccaccacagtccccagagtgtgatattccccttcctgtgtccatgtgatctcattgttcaattcccacctatgagtgagaatatgcggtgtttggttttttgttcttgcgatagtttactgagaatgatggtttccaatnnnnnnnnnnnnnnnnnnnncaatttcatcccatgtccctacaaaggatatgaactcatccattttttatggctgcatagtattccatggtgtatatgtgccacattttcttaatccagtctatcattgttggacatttgggttggttccaagtctttgctattgtgaatagtgccgcaataaacatacgtgtgcatgtgtctttatagcagcatgatttatactcatttgggtatatacccagtaatgggatggctgggtcaaatggtatttctagttctagatccctgaggaatcgccacactgacttccacaatggttgaactagtttacagtcccaccaacagtgtaaaagtgttcctatttctccgcatcctctccagcacctgttgtttcctgactttttaatgattgccattctaaccggtgtgagatgatatctcatagtggttttgatttgcatttctctgatggccagtgatgatgagcatttcttcatgtgttttttggctgcataaatgggcaaaaactggaagcattccctttgaaaaccggcacaagacagggatgccctctctcaccgctcctattcaacatagtgttggaagttctggccagggcaatcaggcaggagaaggaaataaagggtattcaattaggaaaagaggaagtcaaattgtccctgtttgcagacgacatgattgtttatctagaaaaccccatcgtctcagcccaaaatctccttaagctgataagcaacttcagcaaagtctcaggatacaaaatcaatgtacaaaaatcacaagcattcttatacaccaacaacagacaaacagagagccaaatcatgggtgaactcccattcacaattgcttcaaagagaataaaatacctaggaatccaacttacaaggratgtgaaggacctcttcaaggagaactacaaaccactgctcaaggaaataaaagaggagacaaataaatggaagaacattccatgctcatgggtaggaagaatcaatatcgtgaaaatggccatactgcccaaggtaatttacagattcaatgccatccccatcaagctaccaatgactttcttcacagaattggaaaaaactactttaaagttcatatggaaccaaaaaagagcccgcatcgccaagtcaatcctaagccaaaagaacaaagctggaggcatcacactacctgacttcaaactatactacaaggctacagtaaccaaaacagcatggtactggtacaaaaacagagatatagatcaatggaacagaacagagccctcagaaataatgccaaatatctacaactatctgatctttgacaaacctgagaaaaacaagcaatggggaaaggattccctatttaataaatggtgctgggaaaactggctagccatatgtagaaagctgaaactggatcccttccttacaccttatacaaaaatcaattcaagatggattaaagatttaaacgttaaacctaaaaccataaaaaccctagaagaaaacctaggcattaccattcaggacataggcgtgggcaaggacttcatgtccaaaacaccaaaagcaatggcaacaaaagacaaaattgacaaatgggatctaattaaactaaagagcttctgcacagcaaaagaaactaccatcagagtgaacaggcaacctacaacatgggagaaaatttttgcaacctactcatctgacaaagggctaatatccagaatctacaatgaactcaaacaaatttacaagaaaaaaacaaacaaccccatcaaaaagtgggcgaaggacatgaacagacactyctcaaaagaagactctcctttattctaggggttctgaatctgtaaattggctgtaatctgggaattcactgaggggctgttactttctgtttttatgcttcaggttaaagttttgttcacttgaccttgaacttttctgcttctgcagatcaagaaagaatttagtaggctcctactattttctattctatgttttttacttctaggagcaccgtagtcatttagccaacaccataagtctgtgtgagtcagattattattattgctgttttgactctgctctccatcatagtaatcatgcccaccttgtctttggcagttgagtgctaccacttggcccctgtcaccctaggatctaattatctcctttacatttagatttcctagttcagtttctgtagttcccactacagacgagagaagagcaattacagagctctttaaggatgctggggctcccctcaaaaatttatttctcatagtattggtgaaagtcatgtctcttgggccctctcagtatgggtgagtaggtcttaaatgactgtactctaacagttccgtcttcctaagcctttgaataccttcctatatattaaaccaaagcatttctagaatatctaatttactcactgtgtaccatcttttggtccgtgttttagccaaccaaccaaccaattataatccttcctaactccctgaactgcaacattaaatgcagaatctctgttttgtgagtccatgtcaatatattcatcctaatccaacttgtttcttccaccgttatcccacagccacagctttagcatccatttaaacacgttttcccattttctctgtgtataaattagaaaactcaagtagttgtttcagagtgtaacatactttatgtgttatactttgtacctcacctttggaggcttgctgatacttgagccttgtcatagatgtagaaacaaagagaggctgtgggatgggtactgaagagaattggtattgtctttcatggcagttgcttcaggggaggccattatactttccttaggaggtggaaaaaccaataccactatgaatgtagatgccacagccaaagsggggagaccaatttcactagaaaagaaaactaatcagaatttaggggttcaatgtaaccagcttcatcagggtcttcccacacatctcaatcccaatttataggatcccattattttccaatcaataccttcacttcagcagcatctggcctatgaggctgggggttcaacttgcattgtaatcagtcagtcacaggatgagattctctgtttgatcttcagcagtctcagccctgtggctataggagctaagggtctccttcaatgtacacatagatacctctggtcatttatgtggtgtttgagctgcacatctgaatccgtgagctcatccttttcttccaacactttggcagcattaggagcaaccagccaaacttactatatttgttagttttacaaaagtcacccagttccttgtgacagagcaggagcatcgccatcttggacaagcctctcattctaaagttcaccttaataaaaaaccgcctaaatccaaagggcatcagcctaatggctaaggtcagcatgaccataaatcataaataacatctccagccagaaacattccaaactcctccccaaccagagacatgctagccccgagataacccccatccagccgggaagataccagtctggagataacccccctctggctggaaagatgcctgccccaaggtgaactcccttccacccagagacattccaaccccaccataaaacttctcccgtaaacaggaacattccaaacttctgataagccccctcacccttaaacaaatatatactcttagtctacaagagaaatctctcctgaccacagtcggccaggagcgcctcttaggttttaactaaagaaaacctgtctttgactgccaagccgtgttttgtgtttctttcttctttaattctkacatcttgcttgtggttggaactgttggttgatttgtggttgattaggtgtatccaatgcagatattttgtgtatctctattgccagattatgccatggactgtcagtgctctattactggaaatagagccattagcatcttaaagctaatcaaattaaagacacaattctagaaaccccagagtcaatttagaaaacttgtccttaaaattcttttactctacagtcactctaggtatcaaaatctgtcctagagttctccagagaatcagaagaattaggatggatgtgttataaggaattgtctcacatgactttggaggctgagaagtcccacagtctgctctgagaagtcccacaaactggagacctaggaaagcttgtggtgtaaagtccaggctgattctgaatgtctgagaactaggagcaccgatagtgtaagcctcagtcccggggcaggagaagactgatatctcagtctgagtgtcagggggagagagagaaagagagaattcaaacttattttacctttttcttctgtttgaggcctcagtgggtgggttggtcgatggtcaccctcattggggaggacaacgtgctttactcaatccacccattctagtgtaatcccttccagaaatgccctcataaacaaacccagaagtaaaatttagccagatatctgggcatcccattgccgagtcacactgatacatgaaattagctataacattgcctgtgagaatgccttacaagaattccaggttcaatatatgtagaagtactttcaataacatctcttagtcagtatagaattgcttgattaatcatctgaaggtgaaggtcttaggcaatccaataggttttgccaccataaatgatccctgatctgtcaagggcacaatagggattcttaccacaaatgctgacacctacttctgggagttaatcagctatgtttcataggatcttgtgatagctgaaatatttagaggctttaagatcctctttggctctgcactgattttacctatgttatctcattttactggtataaaccccagaatcaaaaataaaaaagaagccatctttcttgtagtgtatagtgcagacttgggtgaacaccagtaagcatcattgggtgcaaactggaactcacaggcaagagaatcaacagatacagggatcctgttttttcagtgtcctatggaaaggactgcttggatttgagtgctgctatatgctgcatgggaatgggttccaggagaggaacttcaaaacttgttgttctttttacactgggctagtgtttagagtgcagactttgttgcatggaaggaaatggacaatttggatttaggtgccagccgtttagttgagtgttagaaaaatagctgcccaacactttagaattttggaggttcctggtcacttttgagtttagaaggatgggagcatttagttctagctagctaactataagcagcccagaagaagctctcaacgttatttaccagtttgtccagtgtgaagttaaagagacaaggaaaaataccaaggcgagttaagattcacctataaacttaaaaccaatcacttttgttcaaaataatatttgtttacattagaattataaaatgtcatgtttattccctcatgttatttctacttaaaaatgtgggttactgttgcygggcrcggtggctcacgcctgtaatcccagcactttgggaggccaaggcgggaggatcacgaggtcaggagatggagaccatcctggctaacacggtaaaactccctctctactaaaaaaaaaaaaaaatacaaaaaattagccagatgtggtggcgggcgcctgtagtcccagctactcaggaggctgaggcaccagaatgcgtgaaccccagaggcrgagcttgcagtgagccgagatcgcgccactgcactccagcctgggtggcagagcaagattgtgtctcaaacagacagacaaacaaaaatctgggttactgttacataatattaggacttcaggcattagctgaggctaaaacaaacttctctcatgaaatggaccgaagtttacagtaaaatttcactctcactggaatttcagcctcagtaaagtggtaataaacctagggtttgattcttaagcagcaagtatcaggtattatcaaaattaggaggttaatagttccaaaatgatggttggccatgtgaatcgggtttatccagtagtattttacctcatcagactccagtgagactgttagtatactgccttctttgaccagatttgccgcaggaatactaaagtccaggtggatatggggacccagaacagatacaggctaaaaataattagaattaattggaaggtgaaatactaaaagtaaaaaatacagtttgggatgactctaattgtytttatcttaggtgaaagagtactaaattgggatagtggcagtgacaatggaaaaggagcaacaataagataagcccagcaataataagtaataaattacctgtataaatatatttgagttttgaaaatgaagtgaccagacttattgctcaaaaacatataattcaaaatgaagcactgatgtatgtatgagtgaataaaagattcaggagtctgggtcttcaggagctatttacctgcctctttcttctcaaatgaaatgaaaccaaatacatttagcatacaaactgttaatcatctgcagaaccaaccttaggttagaatttaataaatatttgtggagtaagttaacagaatcacaaggaatacacctaagacagataaattgctcgttctgttcctgcttcagatttttctgtttcttgagtctaagcagacatcatggtataaagatatgcttagatagcagatagaaaattatagagtagtaccttttcacataaagtatatttgatttcaagatgtgtggatgtctaaaaccaagtttttgctgtttttttttttaacaaacctacacaattttttgacagaaaaaaattatttccttcagttactaagtcacaattccagagagagtctcacttttattatgtttttaaaatcctaagaagtgtcacctacattggaaatatttgctaaacctgaactttcaaaatgctagtaggatacactttaattgaatctataaaagtaattccccaaagagtatacctttgactagtttacagaaaccaattcaggatttacagaggaaaataaataaataaactgaaaaaacgactagtcttcctttgttcagcttaatgtttaaaatttgaaagacttaggaattaagttttagtgattcatgtggatggcaattcgctttttttgtttttcacttggaacagttgaagtgtatatctctattccattttatatggttcactccaatggtccagtacattgttaatgtcatgaacagtaatatgccaactagaagttcttggatttccacggtaatcgtgagcagtggtagatcaatgaaattaacagacaactcaaaaatatatttttattaaataaacagtgttaatattcctagacaagatttaaaaatttttttgagattatttttgtgatggttgtttttgaccagaactaacataacaagttggagaagcataatattggtcttctatattctatgattccatagacttgttttacttgttttgaactttcctatacttgagtcttatctgataacaattcaggtagacaattaaatagtcaaaggagaagcaactggagaacacgagtaaaatagccttgataatctatacactagctaatcaacttcctaatctttgaatgttgattggattcatagactgtgaaatggagttctgtaaagttttcgtaactaaacctcaacttaattttgctcttctgtaaaaaaattgcccatgtttgtgaagttcagaaacaaaatactaagtttaaatacaccagggttgacttaggtcccaaagcagaaaatggaacaagcagatattttaggaaacaggccgagtgagcatggtgcttattagaactggttatccgcacacctaaatctctctaccaccctgaggataaataattttgttctatgaatcatttcattcactgacttagatcaatataagtttatgggttccatcaaaagatagatgaaatcatgttttccaagcacttctctgtttgtttttttcctatagcatttcattaatctggaacaatgtgagtttactattagttttgctttgatcattatcctcattttgtgtcttctaaaaataagttatatatacaaatacataaattgatttctatatgtggagatatacatctgtaaatatgtatgtagataaaaatattttatcaattgtagtgaaaccaaggattctaaacattaccatttgggtcaaagcatgttggctaggaattcttyttacatttataacttcttattttaaatttctgactccttacaaacagccattttacttgaaatagatttttttaactgagaaatgacccctagctgttaaaaaatatcatatgtttaacaagataaggcttttcaagaacacattgtcatcaaaactcactaaaacttttccttggataatcttagttatgtatgattttttattgtctatcagagaaataacattgtttttttcagttcagattttaaggtgttttgccatattgagtattgtttggttctatttatctttgatttaaatataatgggactgaatataaatgaccaatcatattaaatgtgatataccatgcaatatggagcttctttcttatctcatactttgttttactctactactactctactacgttttcctttactttttttctcttgttttgcttttgttattttctcaatctgtaaacaagtctgtgtgcccagctgagtttgttgaaagccttcgtccctgaagtcctaaactacatacaagaaagctatagaggaaggagttggggatcagaggccatacatgttaagactgcaagctatcctagataaattgagtaagtgagaagacataattcatatggtgagatgacatgggtggtcarcaattagataaataaaagcctctaaaactcgggttgactaaaatcccaggaaaggaaaaaggcagaacacacaaagtaagtagagccaaggcaagctgtgaaccattacagaattcatctccagcctccctaggcagctcaataagtcttgctgagcaggtgcctaggtctttgtgtatcaaggctctgctagacactgtttccttagcccttgcatctcaaatgttatctcttcaatagagtctcttcagtatccccaaagctacagttaatatgttcctcaatactttatcagttcccattttattttttctttctaatgttatttagtcaacattgagcacctacagtgtgccagccgttctggtgaaagtaccaaatgaggtatgaaagagctgtcacatgtatcttttttttttatttttttttatttgagacagagtctcactcttgttgtccaggctggagtgcaatggcacgatctcggctcattgcaacttctgcctcccgggttcaagcgtttctcctgcctcagcctcccaagtagctgggattacaggtatgcaccaccacgcctggctaactttgtatttttagtagagacggggtttctccatattggtcgggctggtctcaaactcccgaccttaggtgatctgcccgcctcgacttcccaaagtgctgggattacaggcgtgagccaccgcacctgcctatcatattctttaaatccactcaattaggctttaaaccgctattccaaaaggatgctaggaaattccttatcagttcttcttactcttccattccttcctaagatcacacaagggagaatttgcagtgctcagaagatggaagaaagctactgactgttctctctgtcatggttgtcagtatcatcatcttttccaagttcacagcagaccctggaagtccaggaactctctcttttatgccacgtgtggagggtgggttctttgcccagattcaaacttcttagatatactatcctcctatcatactctcttaggtctggctacctctttagggaccaactatggtctgtactactgaagaaacctacaggcatctttttctctagccgggcatccctaccttgctactttcctccctaagatatctgacataatctcgtcagtgattttaggctttttataaaaggcaggcttcttcaggctactttcacatcctaccaggctgtaaaccctaaggtgaagaattgcaaagctagattatctcagtaaaatgagaaaagaaaaaatatatgtgaacctctcaaaaatgtatttgtcagtctaaaatggaagatagatattgtacaagtgactattatacatgagaaaaataattgtaatgcacccagagaatttattcctagaagcaaaataagtaagcatgccaatatttagctacatttgtgcccatcatggcattacttacttactaaagccaaaaacaaaaacaacaacaacagcaaaaaccaggaatcaacattagtgttcaacaatggaagagtggtcagataaagtatgtttcacatgtacaagtctgtactacataggtacatgagtatcatcagaattttgatattaacatgagaagatgttcataatatattttaggtgcaaaagtaaattataaagagcaggaatggcaagatactttccaatattttaccagtggttatgactaagtagcttggttggtgggaattcaggagttttcagttttactgtttttgttcacttgcatgttttcattttttttttaatcaaagaatgtgtattttcttttaaccatgaaaataaaagcaaaaagaactattttgaatttcaaaaaaagaactagcagcttctatctattgcatttaactgtatcagtcactttgaataagcatttttcatgcattatttatattcttcttaccaatcctgagaataggtatagaaagatggattttttttctgtttatttcccctttttttccccataagagagagtattggattggtggatggagaggccatgtttcctcctaggcagggttgctgtatagtaacagattgctcacccatgggttgctccccttctctattcatgtggttaggtgaagatctcctgtcccctgtccacccaggctttcttttatccttgtccttttattaatatcttaacatgcttgtcattgcttttaatttgggtagaataaggcaatgaagtgagcataaaaaggctttacacgtatgaatgatatgaagaaatctaatcttttaaaagatgtatgttgagtgatttccacacaaacatcaaattgctgtatcatagccgggcgtggtggcgggtgcctgtagtcccagctactcgggaggctgaggcaggagaatggcgtaacccaggaggtggagcttgcagtgagctgagattgtgccactgcactccagtctgggygacagagcaagactccgtctcaaaaaaaaaaaaaaaattgctctatcagattttgtggaattctttcacatccattttttcaacaacaatagagttttttttaatgaaagcagtattgtattagttttaaatatttggtagttgtttctacatcattgatggcatacctttcttcaacaggttctcatctgctcaatattcatgtgagagtagttctactgatttgtcagtacacgagacaatagctgcacaagcaatgagacataaagtgctaacatctgtgccttatctgagaatttttaatgctatttaaatatatttttaaaactctttggagtaatgaaatagattctaaaaatttgttttcatatctttatatattttctttgtaatttcatgccagatttgtgcatgtgccttaaacttattatgatttaattatttcccttagtaaacacttttagctaaaagaaattttgaaaagaaaaataatttgttgtgaagtgaaatatgataacctatcaggatcaaggagctaatatgtgatgatatttagtattttacaaatacaaaactgtgtaagcagtacttctggatggcattaaatataaagctaagcaatcaacacttattcataagacaacaattaagtcatgagtattaggacatgtctttgcaaaagtgatccttctgtggatcttggggttgagaattttacttcaggtggttatcagtaatatagaaatagatcatttacttgannnnnnnnnnnnnnnnnnnnnnnnnnnnnnnnnnnnnnnnnnnnnnnnnnnnnnnnnnnnnnnnnncccgggttcaaacaattctcctgcctcagcctcctgagtagctggaattacaggcatgcgccaccatgtctagctaatttttgtatttttaatagagacggaatttcaccatgttggccaggctggtctcgaactcctgacctcatgatctgtctgcctcggcctctcaaagtgctgggattacaggcataagccaccgcacccggcccttttctaagtctttttaatctttaatgtctaaggctaaattatatattaaattagtattactttttattaaatttgtatattattttacaaaatagtattttttgtaatgcacagcctgattttgtctactcattgtatgtttttctgatacaaataccctctcctttttaattttgcccctctcttattccatgaggttctgatgagactgctattcacaaaaggaactgggttatatagcagagttgtgacgtaactgatgtctggctatgatttggaagtacatgtaacctaaaacaagtgagttagagcttttgatgagatatacacagacaatgggaaacagaaaataagttcatgatactgtcccaatcatgtcatctgccaaaagacaggactcgccttagtagaagaggaggaaaccataaagagaagtaaaactgccaaattcagagtgctgataatctgattgtttgatgtgtgatgcaggtaccacccccaactttcccagttgtgtgagtcagttactttctctcttttcttcttctttcttttcttccttgtttcttctttcttccctttcctttcctgccctgcccttccctttttgtttaagctagtttgacttttgttcatatcatttgcaaacaaaatgttatttggcctcagggaatgggcctagcatgtgtgagttttccttaggaacagctggcttgaaagaaagctttaagtaaacagaaaaataggatgatcccctctgtagatgtagtcattccccttccttagtaaagccagggtttattcagtgagcttattttcaaaatgtcagaatagggcaagtatggaagtgtaatacatgtattaataatgtggatttctcacttaccaccagtgacctagctactagtaatgtgactgtctagttttctgaaatcactgataggcaaaggacccctgttatgaaatgatagttctaagagatcagccagctacctggttacaggtcaattacactggcctttttccattttacaaaagtgagcaatctgtagtctctaaagtacttcttttggatttggttgtgttttccagcctgtaaggtttctgtcaaagcctttactcatggggttactgaatgttctaaannnnnnnnnnnnnnnnnnnnnnnnnnnnnnnnnnnnnnnnnnnnnnnnnnnnnnnnnnnnnnnnnnnnnnnnnnnnnnnnnnnnnnnnnnnnnnnnnnnnnnnnnnnnnnnnnnnnnnnnnnnnnnnnnnnnnnnnnnnnnnnnnnnnnnnnnnnnnnnnnnnnnnnnnnnnnnnnnnnnnnnnnnnnnnnnnnnnnnnnnnnnnnnnnnnnnnnnnnnnnnnnnnnnnnnnnnnnnnnnnnnnnnnnnnnnnnnnnnnnnnnnnnnnnnnnnnnnnnnnnnnnnnnnnnnnnnnnnnnnnnnnnnnnnnnnnnnnnnnnnnnnnnnnnnnnnnnnnnnnnnnnnnnnnnnnnnnnnnnnnnnnnnnnnnnnnnnnnnnnnnnnnnnnnnnnnnnnnnnnnnnnnnnnnnnnnnnnnnnnnnnnnnnnnnnnnnnnnnnnnnnnnnnnnnnnnnnnnnnnnnnnnnnnnnnnnnnnnnnnnnnnnnnnnnnnnnnnnnnnnnnnnnnnnnnnnnnnnnnnnnnnnnnnnnnnnnnnnnnnnnnnnnnnnnnnnnnnnnnnnnnnnnnnnnnnnnnnnnnnnnnnnnnnnnnnnnnnnnnnnnnnnnnnnnnnnnnnnnnnnnnnnnnnnnnnnnnnnnnnnnnnnnnnnnnnnnnnnnnnnnnnnnnnnnnnnnnnnnnnnnnnnnnnnnnnnnnnnnnnnnnnnnnnnnnnnnnnnnnnnnnnnnnnnnnnnnnnnnnnnnnnnnnnnnnnnnnnnnnnnnnnnnnnnnnnnnnnnnnnnnnnnnnnnnnnnnnnnnnnnnnnnnnnnnnnnnnnnnnnnnnnnnnnnnnnnnnnnnnnnnnnnnnnnnnnnnnnnnnnnnnnnnnnnnnnnnnnnnnnnnnnnnnnnnnnnnnnnnnnnnnnnnnnnnnnnnnnnnnnnnnnnnnnnnnnnnnnnnnnnnnnnnnnnnnnnnnnnnnnnnnnnnnnnnnnnnnnnnnnnnnnnnnnnnnnnnnnnnnnnnnnnnnnnnnnnnnnnnnnnnnnnnnnnnnnnnnnnnnnnnnnnnnnnnnnnnnnnnnnnnnnnnnnnnnnnnnnnnnnnnnnnnnnnnnnnnnnnnnnnnnnnnnnnnnnnnnnnnnnnnnnnnnnnnnnnnnnnnnnnnnnnnnnnnnnnnnnnnnnnnnnnnnnnnnnnnnnnnnnnnnnnnnnnnnnnnnnnnnnnnnnnnnnnnnnnnnnnnnnnnnnnnnnnnnnnnnnnnnnnnnnnnnnnnnnnnnnnnnnnnnnnnnnntcctttagcatttacaatcctctggctagacataaaagttctccaagtccccaccagtattagctacatacagagtgctgattggtgcatccacaaaccctgacctagacacagagtgctgattgatgcatatacaatcctccagctagacataaaagttctctaagtccccactcaattcaggagcccagctggctttgcctagtggatcctgcgcaggggccatgggcagagctgcccaccagtccgcgccacgtgcccatactcctcagcccttgggaggtcagtgcgaccaggtgccacaagcagggggcggcgcccatcagggaggctcgggctgcacaggagccctccgggcgggatggggggtgcttgagcatggagggctgcaggtcctgagccctgccacacggggaggcggctgaggcccgcgtgggcaggtaatgctgagggaccccgcacatcctctgcagctgctggcttgggtgctaagcctctcactgcttggggccggcagcaccagctggtcactccaagggtggggcctgctgagcctgcgcccacccggaactcatgctggctggtgagcgccrggcgcagcccaggttcccaccattccctctccttccacacctcctggcaagcagagggagccagctccggcctcagccagcccagagaggggctcccacagtgcagggctccacactgaagggctcctcaagcgtggccagagtggacactgaggccaaggaggcgctgagagcaagcgagggctgctagcacattgtcacctctcagtatgtgtaggaaaggattgaaaagaagatttgaaaaccaaatcttgagaagggcagaaaccagggaggctttgcttatgtctgaggaaggtgtatcagatgactcaattctaactaatcttggtttctgaatgtgtgtgtttgtgttaaccatgactggaatttatggaggagagaatctgtttgacttagtttgggtagtgtgctcacgtttgtgatcagagtgggaaggggtctattatccgaatagcagtatataagtatattaaatggtataaagtccagagcagaactgtagtagctacatttttgctttctcagtgtgttgcttttgtgccccctctctcctctactgcccaccttctaatagtaagtctactagctatatgttggtacatatgatcaaagctgttggtaatcatatctgcctgcttttagggttacttttctaatgtaaaaataacagataccctatatctgccatattgaaatccattaccagctgtagacacctcygcagagataattataatgaaacatattttcatatttttgataaatgttaatgatttgtgaagtgcagtaaagtaagacattgacttatgaaaatgacttcgttttgtgaagtaatgcagtgttgtaatattcattaattttatggagatgatgagtatggagcaaggccaaatgttactgatggtataatctataaacaaaggtttaacagttgttcaaatagattaaaaataggagccaaagttagtctttttatggagcacagaaggaggcatgctgaagacaagtaaaaaagccatagcaattagtgttgtatttatgtttcaagtatatgtaatcacatatccaatcatttaagtccttagggaaccaaatgtctgcaaggcagcaatcttatacctttatcattctatctgtcctctagttagggatctgatagcagtggtttagacttttttgttttttctttttgagacgtagtctctctctgtcacccaggctggagtgcagtggcacgatcttggctcactgcaagctctgcctcctgggttcatgccattctcctgcctcagcctcccaagtagctgggacaataggcacccatcatcacgccctgctaattttttgtatttttagtagagacgggtttttaccatgttagccaggatggtctcgatctcctgaccttctgatccacctgcttcggcctcccaaagtgctggggattacaggtgtgagccaccgtgcccggccagcaggggtttagactttgagcaagagctttacctttagtcatagctgagtttgattactggatctaccatattccaaccatgtaaccctggattagtcattgaatctaatcaagcttattaaattctttttaaaaaaatacttgtaatacactttatttttattatatgtttaagttatacaacaaagtttgatatgcatatccatagtgagattattaccacagtcacacaaattaacatgttgatggtctcacatagttatctaaaatctactcttaacacatttttactataccatataatattattcactatagtgaattatttattagaataatgtatttcacataattattaatacaactttgtaccatttgacctccattttcccatttgcttccccccactccatccctggcaaccaccactctacttactgcttccttgtattcaagttttttttttttaatttttttatttggtttagtttgattttttagatttcactgttagaatgacagctatcaaaaagacaagagatagcgagtgttggtgagggtgtggagaaaaggaagtccttgtgcactgttggtgggaatgtagattggtgcagccattgtagaaaacaatatggaggttctgaacgaattcaaaaatagaactaccatataacccagcaatctctcttctgggtctatacccaaaggaaatgaaaccaccattttgaaaagatattaaatatctgcacctccatgttcatcacagcattattcacagtagccaaggtatggaaacaatctgtttccatcaatggatgactggataaaatgtagacatatatatatacacaacggaatattattcaaccttagaaaaaggaaatcctcctatttgtgacaatatgaatgaacctaaagaacagtttgytaagtgaaataagccagacacagaaagaaaaatactgtgtgatctcacttatatgtgaaagcctattagattctcaatgtgtgatttggaaatagcattgcctctttgggttgcctgagaattaaatgtaataatataagtaaattttgaatcacagtcttcagcatgtaatatttaaatgaattgtagctataacattggttattcattaaacacttgttggattgtcaggtcaatgacttctgaggacttcttagttaaagccacactctttgtcaaaagaattgtatcaatgaatgtaaaaattttcagtatctaaattgcaagaataacaactaacatttgttttatattgtatttttagatgcatacacttatgaaaactcagtgtattattgaatcggagcacatatttgccacataaaatattattgttttaaaggagtccaacaatttaataaactaggcagatgaactattgaattactacagtgaaaatttagtttcactgattattctactcactgaagtaacagatgctaaaaatactagcaaatactttaatactgatggaactaattgatatatcaaattattcagtggatcatcagctgatgtgattatacatgcaagacataagctatatttaaaaatgtctactgattctatatgcttcatctcacacattagcatcaaatgcacattttttaatttgaatgtaacagtgggaagctgtttaagtaggtcactcataattgaatttgatatacggtgtttatttttcttgttctactagtcagtgaacatcttggttgactggtcataaaaaataatgaaactgaaaccctgcatgcatttacctagaaatgcagtgttaccataagaaaataccaataacagagagagttcagatgataacctggtttgctgactacatgttattgtcattgttactgtatattgaaaaaggaaaattaatgagtataggagacacttgtgtaatatgaactaggttaactacctttgggagaattatcaacagaaattatagtgataggaaaagttttagccttgttcatggatacttctgagaaagaatcttgaaattttcaaagttcttatcacagaatttgattttcaaatcacacattccacactcttccctccccaccttcagactcatgccagttaagaaaaatgctctttgtctttgtgaaggtaaggatcacttcattttgaaccaatgatggtgtcaaaatgagctggtagtgataataatagatcacatttattaaatatttactatatgccagacaccatgtcagtacaattaaaagagagagaaaaaaagatggaaatccatgccttcatggagcttatattttcctgggagaagatagatatatcatgttatttggtccatctgtttaactttatgaagtaagcaccagtgttatctccatctatttttgaggaaattgaagcatgaagaagtttagtatttgccttatgtcacatggctagttaaggactgaaccagctgcaatgtccagctattccatgataactctgtttttcctagtcttttggttcttattttgacaatcctatgcatttcttaaactgaagctatctacttgctgccagccttcataactacataccttcccttctttcttataatacagatgaactgagtacctttctgaggcaagttcccccatttatacccaagattcccttgtccttgtttagtcaaaggacttatcctaacagttcctccttttctttttctacattggtgtttcctctctctccactggataattctacatcagagggcatacatgctattatttttccattatttaacactcactctctcctcaccaccaccgccttcatctccctgtctctctctctctctctggcactccactttcccctatagctactggctcacttatctgctctttgataaaagcaaaattcttcatgagttatccatattaactgtattcaatcactcttccatttattttttaaaagcatttcattcaggcctttactccccttttatctcatggaatttttttggtctggtttcaaggtccagattctgttttcagtattagaaaatacattttaaagaccattgagtatccttactttcatatatggtaagccttaatgaccatggcatgagcttactaacacacatatatattacatttactctggatgatgcagcagtttaatctgcatctttagcatatttatattcagtatgcatccaatggaagggcataaatggtaagaagaaattgagatgttgacagaaccatcttactgccagctgcggcaaattagatgttttgccacataggtaaaaaggaggaggacagcctgtaccatttaactttaaactagctggtgtatggtgatcaagaaaagccctgaatctctgggatagaactgttggagatcctatgttgcttttgtaagttgtaagtaaggggtgaggttcatgatctttactaatctcttcctgggtatgtggagaagcccaagggtttatcttattgttccatctgtagctgctgaaataaaatggctgaagaaaggagacagaaagccaagagggattattaattactcttttgtctttctcctttgcaaccaaccagtcaccaaacccaggagagactgatattttttgatcttctccccttctctgaattcccattgccagtactttacacgcttaatcatatcccactgagtttattacaacagtgcgtatcttgcttcccagtctgacactcttcacatggctcagagttttctttctaatgcacacacacagacacacagacacacagmcacacacacacacacacacacacacacactctgaaactactctgcagcttaaaagtttgtagtgacctcttatggccattaggatatagtccagatattttaacaggaaatggttaaaaacaaagttcaaaaagttatatttttgccatcattattattttgctgtttgggaatactgtatgcatattcctttaaaaggaatttttttagggcagacccccactttccccatatctcaggcatggactttgtctgtctactagataatcctccactgccccatactcataggagcaatggtatatgcatttcaacctgcctgtaattgtctgttgtcaggaagtatgtcttatttactggtttatcttcagggcacaggagcattcctaatacacaataaatatatctttagataaatattcttcagtttaaataaacattccatcttttctcaaattgccaagtattggcatctcacatttttatagaaacttgggaataacgttggggactgtcttaccagtatttgcatttctcttctgacatcaggcctctttgaacacctcagataacagcgatctcactacctcataagaaagtctctttctttatacgatacgataagctttattatttataatcctctttttgtgtttaaccaaaatttacttataaattcctattctaatttgtaatactttagccccattgaaccccatctactcttcttgtagacatcatacgtaatggaagattttgactctccgtgtatcttgctgctgtaataggttttatattgtggagaaaaagacattattcagacgcttctttttataatatccatacataatggagggggatattcattgcggtatgacccaattagacaaaagcatttaaacagcttattcatcactaaatagtaaaagattttgctaatggaagtagtgcacagtaatgtgtcatatacttcaggaaaatgtaaaagtctaaaaactgagcattctgttttccatgatgaaagatttagtcatcctaaaatacagtgactttttgcaattttgttacaacaccaaactgaatagagattattcttttaacaacatatgaccgtaacactaaaatttggctccagaaaacctgatactctggtttgcaaaatactgccttataatatatgcttttcataacatactggaagtcatatttcttatgtttcataaagaatataaataacttctgttttcttagtcattatcttaaagaatctgactggcaaatgatatatacttgtaatttatgtttaagtatcaagcagtatcacttacaatgtctagaattgaggtaattatgtagttaaggtctcatatatgtgaccacagaaaatccacagaaacctaattttatttcatagatatggaaacatcaactatttgaaaattaaataacatatctttgtttatatattaaagtaagtataagctgtgttcttattcagtgccttattttttgagtgaataacttgctttaaaattgtatagtgaaaatgtaaatcacatttagtcaaatctctgatacatttacattgtttgccttttggattccagatcagccctaggatcagttattccttcattccaagagtgcttattatcagctaccatattgacccatcagtgataagacttgaggatataagaggtccagataaaaatggatagggatatgagagaagagtaaagtaggtatcagagaaagagaaaaaaataaataattttatttattattaaaactctgtattagtaaattctgtatagccatcagtaccaacaaatggcactttagacatggaaaatagggggaatacacaacagtccaccaatgatatatagataagatagatatcactttccctttaaagtcacgtcccctacattgatgccaatataataggactatccacaaaatatttagaatggaaatcttctgacatgcatgaaaaaattaataaaactaaagcactgtagcaaaatgtaatcagacagagagtataatttctctgaacttgaagacaaggtcaggtaaattttaaattcaacacaatgattgaaagtagccgttgatagacgaaccagaccctaaggtaacgggttataaatgtgttgctaaccaagccaagaagggaatttagttttttgtttgtttgtttgtttgttttaagataaacacttgcaaacttgggggcactttccagaaagggaataacagaataacagctatttgagttattgaaaatatcaaaagcgtgaacatcttgactgaaacagaatcacggaaagcataacttaactaattctgttggatctgactgtctaacaggagattgttaatgagctgtccatggattctggaaaatcagagtcagagaggaaatattcaggtcagcctaaagagtaatgatggaacaagggaattaggagggcacatatttccagttattgtggaagtacagctttctctgaatcatgaaattcagtttagtcattgtttggctaaaacatacctctagataaaagcctcaaagtggcagtctatagactaaagatagcccccaggtcttgtttgccctacactgtattttagaaattaagtctattaaaaatgaacatattttaaattagaaatctagatgctcagcttctttctaaaaaattagatccagaagcccagctcaaattccagcaaggcaacagtcaagttgaacatgattttgctacttcaccatggtttttaatatagcttatttttccccaacattgaagctttagtgtcagttcttattttttatcatgcttatactatgcattttccttatgtattagtccattctcccactgctataaagaactgcctgagactgggtaatttacaaaggaaagatgtttaattgactcacagttcagcatgactgggggggcctcagaaagtttacagtcatgcagaaggggaagcaaacacgtcttcttcacatgacagcagaaagcagaagtgctgtgcaaagggggaaaagccccttatagaaccatcagatcttgtgagaactcactcactaacagcagcatgggggtaactgcccccatgattcagttacctcccatcaggtccytcccatgacatgtggggattatgggaactacaattcaagatgagatttrggtggggacacagtcaaacgatactaccttataacagtagaaaactatttttctattttcttgtttctatctggagtagaacataaaatcagttaaaaaatagacatcgtatttcatgtgttgcaaaagaacagagaatatgtatattttcattgaagtgtaaaaattttctacctaattttatgaaaatcctcagccaatttactacttttccattatttttctggtttccatggacatttaattatgtgtcttatgttctagagtcaacaatcaaaaaaatatttttaagtcttatttaaagcccaccaaactaacgccattggcaatttggtgtcctactgtctacttaacggaaataggtagctttactactggagtaagtaagcactagcagtaaatcatcctgttgtttaaaactgtaagtttgcacattatgatttgatcatctgaaaccaaaacaatcctgcataagttgaaagaaaataaatttctgtgaagatgagaatcaggtactagattgcaaccactctacttaaactctacagtagctaacttttctgttccttggcatttctttctctccctttctttcttttttcctccttcccagctttaatgaggtatacataagaaataaaaattatatatatttaagatatacaatgtcatgttttgatttatgtgtacattgtgaaataattactaccatcaaactaattaacatattcatgacctcagatacttaccattttctttgtgtggtgagaacatttaagatctactctcagcaaatttcgagcatactatacagtatcattaactatattgcccatgctgcacatttgatttctagaacttattcaatctactgatactttgtgccctttgacttgcaactccccatttcccccacaccccagtgcgtgacaacaccattattctctgtttctacgagtttgatttttttaggttccatatataagtgagattaaccagtattgtatttgtctttctgtgcctggtttattgcacttagcataatgtactccaggttcatccatattgccatgaatggaaggatctcccttttttggctcaataatattccactgtatgcgtgtgtctaatcacattttttaatatatttatctgatgatctacacttaggttgatcccacatcttgcatgttgtgaatagtgccacagtgaaagagatacaggttgtgcatgccaagtccaaaagtccaaagttaaaaatactccaaaatttgaaactttttgagcaccaacatgatactcaaaggaaatgctcattggagaattttggatttcagattttcagatttggaatgttcaacccgtaagtatgtacggctttagtattccttatctgaaatacttgggatcagaggtttgtcaaatagaaatttgatttgttgttgttattgttgtgggggggttggattttgaaatatttgcattatatttaccagttgagtatctctaatctgagaatctgaaatgctccagtgagtatttcctttgagtatgatgttggcactcaaaaagttttggattttggagaattttgagtttcagattttcagattagggatactcaaaastgtaaagcaactattccaaataaaaaaaaaaatctgaaatctgtaacacctctggtcccaagcatttcaaatctgatatagtcaacctgtaccgatttcatttgctttaaatgtgtacccagaagtgagattgttggatcatgtggtggttatatttttatttttatgtagagtctccatagtgttttccataatggctataccaacttacatgtccaccaaccatgcccaaggggaccccttctctccacactctcaccaacaaatattatctcttgtccttttgataatagccatcctaatgggtctgaggtaatgtctcattatagttttgatgtgcatttctctgatagttagtgatgttgagaatttttccatacacgcgttagcagtttgcatgtcttctatggataaatgtcttttcagatccttttcttgtttttaaattgggttacttatttattgctgttgtattatttgagttccttatatattttggatattagcaccttatcatgtatggtttggaaatattttctctcatttcttaaattgtctgtttatacagttgatttgctttgcaaagctttttagtttgatgcaatcccatttgtatgtttctgcttttattgcctgtgcttttggggtcatataaaaaaattactgtctcaaccagtgtcaagaagctttgtctttatgtttcytttagtagttttacagtttccggtcttatttttaagtctttaatcccttttgagttgattctgcatatagggtaagataaagagccaattttatattcttggatatggaaaacaattttcccaacaccagtaaatgaagatacagtcatttcatcattttatgtgattgatacttttgttggagatcaattgaccataaacgtgtgttttttttttctggtctctctattctrttccagtgggtggtctatatatctgtttttataccagggccatactattttgattagtagacctttatggtatattagaaatcaggtagtgtgatgcgtccagtcaaaattgatttaggaattcttttatcttatggttccatatgaattttaggatttatttttatttttatgaaaaatgccattggaattttggtagagattgcattgaatctaagatttatttgggtagtatggacattttaacaattttagtttcaactcatgaacataaggtattattattttcatttatttgtgtcttcagtagttttatcaatatttcatagtttacaatgtacagatttttaacatccttggttaaatttatttctaagtatttatttatttttgatgctattgttattggggttgtagttctggattctttttcaagcagttccttgttagtgtatagaaacacaactgatttttgcaggttgatttttttatcctgaaactgaatttatttattatttctagcagtattttggtagaatcttcaaggacttctttgtgtaagatcatgtcatctgcaaacagaaaattttaattttttccttctgatttggatgcattttatcacttcctcttgctcagttgctctggcaaggccttcctgtactgtgtaggatagaaatggcaagagtgggcatcctgatcttgttcctcatcttaaaggaaaggcttcagcttctcatcactgcatcactgagtatgatattagctgtgggcttattgtatatggtctttattttttcgaggaacattctttctatacctaatttgttttttttatcatgacaagatggtgaaatttgtcaaaatttttttctgcatttaagatcattgtatactttcaaaatcatcagtttttgtttttcttttcttaagacagagtctcactctgtcacccatgatggagtgtagtgtgtgatcttgactcactgcaatcgctgcctcccaggctcaggtgattctcctgccagtcttctgagtagctggcattacatgcacatgccaacacacctggctaattttttttgtacttttagtagagacggggtttcaccatattggccaggctggtcccaaactcctgacctcaagtgatccacctgcctgtgatcacaggcgtgagccaccgtgcccggccaaaatcaccactcttaatgtgatatatcatattattgctttgcagacattgaaccattgttgcatttcagggataagtccttattaaccttttattgttctttttaayttgttttgctagtattctgatgaagatatttgcatctatgttcatcaagaatattgtcctgtaattatttttcttgtagtgtccttgtctggctttggtatcagggtaatattacatcataaaatgagtttggaagtgttccttcctctttggcttttgggaagagtttgagaaggattgacatacattcttttttaaaaaaattttattattattatactttaagttattcttatttaaatgtttgttagaatttaccagtaaagtgatcagatcctaggattttctttattgggagggttattgggagggtccattcagattttctgtttcttcataattcagtattgatatcatgtatatttctaggaatttttttcattttttctatgttatccaaattgttgtgtagttatttatagttgtctcttatgatcctttgtatttttgtggtattagttgcaatgtctcttctctcatttataattttgagtctctttttagtgggtatagctaaaagtttgaccatttagtttatctttgcagaaaactaattttagtttcattgatctttactattgtctagtgtatttttttgattctttcatctttattatttcattcattctgttaactagcagcttagtttattcttgttctggttccttgatcattaaagttagattgtttatttgagatgtttctttttcttaatgtaggcacttattgatacagacaggaagcagagaaacactagatagaaaagagtggggtccctggcaagggttccaccctcaagcatagacctatggccctaaattagaacttcacatctccattttcccaccagaattttgccttttggcctgccatgcccctgtcctgttcccataaaaaccccaaactccagtggcagaggagcagagtagcacggcagaggagggaagagagaagcatctaaatgtcgagaggagaagaagcagctagatattggagactatggttggagtggaatttgcgtggggacggctgaactccaggggaagactgctttcccattccatttcctttccagctccccatcctgctgagagccacttccatcgctcagtaaaatctctgcattcaccatccttcaagtccatgtgacctcattcctcttgggtaccagacaaggacccaggtatgggtgcatgaggctgtcacactgactctccagtgagctgtttaacacttacgcaatccgtggacagcaatgttaaagagcatgctgtagcacacgccatttggggttccagaggttgcgggcaaccrctgacgctgctggggcctgtacagggttcgttcctgccagtgcccaaaggcactcgccccagcccttgcacatgctcacctgcatgctccccctcccataagggatttgagcactgcagactaagggagccacaccttcaagggtcaagggaactatcccacctcattatcactataaactcttagtttagaactgattttattgaatatcagaagttttggtatgttgttttttttagtctccattgttaaaagatattttgtgatttcctttttgattattctttgaggagtatgttttattttcacatacttgtgaaatttccagtttttctcctgttagtgatttctaattttataccattgtgataggaaaatatattttatatgattttagtcttcttaaatttgttgagactttttttgtagcctaataatatctaacctggagaatgttttgtgtgctttggaaagaatgtatattctgctcttggatagaatgttctgtatatgtctgttaagtttatatggtctataatattgttcaaataccatatttctttattgatgttttatgtttggatgatccattgttgaaagtggggtactaaagttccttactgttattgtattgtctatttcccttcagttgtgtaaatttttgctttatatacttaggtaatctgacttagagtgcataaatatttacaattgttaattctcctgatgaattgaccactttttcattatatagtaacattgtttgtctttctatgacaatttttgactcaaattgtctattgtctgatacagctgtakatatcctactttcttttgtttgccacttgcgtggaatatctttttgcatctctccactttcagccttcatgtgccttgaaagctaaactcagtctctgtaggcagcacagagttggatctgttttttaaatccattcagttactccataccttttgattggagtatttaatctatttacagttaaagcagttattaatgggtaaggacatttgttgtcattttgttaatttttttctgatggttttgtggttcctttgtgtttttcttcctctcttgctttattcccgtatgatgtgataattttttcgtggtagtaggctttgattcttttctctttatgtttggtgtatctattacagagattgactttgtggttactatggagcttacataaaatattttataattgtaatggtcagtttaatgcagataacatttaatttcaaccatatgcaaaaattctacacttcccttcccctgactctttttttttttttttttcttttcgagacggagtctctctttgtcacccatgctggagtgcagtggcataatctcaactcactacaacctctgcctcctgggtcaagagattctcctgcctcagcctcccaagtagccgggattacaggcatgtgccaccacgtctggctaatttttttttatttttagtagagatggaatttcacccatgttagccaggctggtctcaaactcctgagctcaagtgatccacccgccttggcttcccaaagtgctgggactacaggcatgagccaccatgcccggctgcttcccctgacatttgatgatgaagtgtgacaaaaaaggtgtcacactgtacaccttttgatattgtggatttgttaacaaattattgtaggtatagatatttttagtacttttgttttttaacttttatatagatttaaatgttttacacaccaccattacaataaaagaatattctgaattttactatattcctacaccttatggggtgttttatgtttctttgtatgttttcatactattaattaacatccttttgtttccattttaagcacttcctttagcatttctagtaaagcaggtctaatgttgatgaactctgtcatcctttgtgttggaaacagggtctggctgagtgcttgtgtctttaggtttatgcctggagcctgtgtccactgagtggacctggactggagtttgcatccacatgggcaggcttggcacctggatccacggagaccatcctagtgctggagtaggcctgaagactagatccctggaggctagcctggaacctatggctgtgagagtcagcctggaactgggataggcctggagccttgatctgcagggacacacctggggccatatgggctggcctgatgctaatatgggcctggatcctgggttcatgatcctggagcctggggactcagttgtggtccttgagcttagtgccccagggtccagcctggagccttggtgtgcagtgatgtgcctggggccacatcggctgggctgatgttggtgtgggcctggagttatggggcctagcctggagcctgagaccacaggagccagtctggaacctggggtcatgggggattgtctgctgttgggccaggcctggagcttcagtttgcagtgacttgcctagagctggagaaagcctggaacttgagtctggaggacaggcccacgtcatcagtctgtggagactggcttggatcttcgggctacagaggctagcctagagtcagagttcaccagtgttgacctggtgcctgcggctggtctagtactaggattcactggcgtacacatgctgctagcgtccatggcaaaactgagtactcacttcactctccttacgcctgcaatggctatctctctccatgctgtacaggcttgagggagggttgacacaagttttgtgaaactgtttttcctactctcttcagtgcgtcttttcttattctgtgtgtcacccaggtgctctgatatctcacttgaatttcttagctcttgagaatgttttttttcatgcatggatgattgttcaaattgatttctgtgagtggacaagtgctggcagcttccattctgccatcttgttgacatcacttctgcacttctgcttggcatttctttaaatgaaaaaaatgcattttatttgttttgaattttgtgcatgttaacacttcagaataagttcagaataaggatttatctttttttcttgtcctgttgtcattttgttaattcttttctgactgttttgtagttcatttgtgttttttttcctctcytgctatattcctgtatgatgtgataatttttttgtggtagtgtgctttgattcttttctctttatgtttggtgtatctattacagagatttactttgtggttactatggagcttacataaaatattttataattgtaacggtcagtttaatgtagataacacttaacttcaaccacatgcaaatattctacttttttttttttttttgaggcggagtctcactttgttgcccaggctggagttcagtgagccactgtgcctggccaatgatttatctttcaataaatgtgtacatttcaatgtggcagtattttcttttcttttcttttctttttttcatttttgagactgagtctcactctgttgcccagactggagtgcagtggcctgatctcggctcactgcaacctccgcctcccaggctaaagcagttctcctgcctcagccccgagtagctgggattacaggcacccaccaccacacccagctaatttttgtatttttagtggagacgaggtttcgccatgttggtcaggctggtcttgaactcctgacctcaggtgatccacccgcctcagcctcccaaagtgctgagattacaggcgtgagccactgtgcctggctccagtattttcttcttatatctctaaataaatgttattaaatggatagcatcttcaaaaagaggaacttaagtagtgctcactgccttaatatgtacactcaaagtttgtacataataagcaactatgctaaagaatcttctagtagcagttctagaagagaaatcattttggaaaggtaatctttcagatcaatttcaaccagccatgtaggtggtaatctgctcccttacctgagtatattgttcatagccatatttttaattccaaactcttcctgactgccctaacattctgcaagagttttaattgttttcttcatgtagctaaattatattcaggctacatgaacaagttcaagtattagcttaagtaaaatctggactggggaatcaattttttctaaagtcattaatcatttgtccgtttcaaagtatgtgtgtatgtgcatgcacatgtatatttatatatacatctgtgtttatgcagcttcaagtgtgattctcaaattctctgttgtttagtctttagtccattaatcaaaaccttgttttttccatttaagaaatcatatataatatataatctatccttgcctcttgctggatctcttcatttgtaagttcataaagtgtataatccatttggcaagagtagggagatagttataaataagcgtgatgaaaaaagggctaaatttggctgaattataaacatgtgcatgaacttaatagaaatggtcagaagcagaatgggaggccatgttttgtgcatgaaaatttaaatgtagtcctctggaaaatgtttcaaagaaatgtttaaagacaactcaaacagctggatcaccactggtaggaacaggattcaacacttgggcctgctgtaagaccatgtaacataaagaacacacatacacaaacatgagaaaagaagcaatagctatccctctaagaacatgaaattatatgctttatagaaggggaaattgaaayaaacaattgtgtgtgtgtgtatatatatgtatatatataatatatatgaatatatattataaatataatatcatatattatatatttacagtatataaatatatattgtaaatatatattataatatataattatacaattataattataatgtaatatattatataatttattatatattataatatgtaatatatattatataatatatattacatattataatatataatatatattatattatattatatattataattatgtatatttaatatacatattacatatatgtggtatatatatttaacatatatatgacatatatatgtggtatatatatgtggtatagactatcacaaataaccatatgaacagtgtgattgtgcatacaggatcccaaaaatgctagtgtcagctttgcaactttattaattatgtgaccttgagcagggtgcaaactttccttgttccctttttttcatatgtatatgaagataataacatctattgtagtctaaacagaaatggctcataatagatttaacaagagtagtaccaggtgacaatggaatacgccaagcagagagaagaaaataataatatacattggtcatggacaatacgctcaaatatccacttctgcagattttctatgctctctacctcacagtttagaacattagaaagcagcatatctaaaattttcattgcatatactaaactatattaataatggctgccctcagtttttctacttaatcataatatactatatatttacaatatatagtatatatagtacatatactatatatagtatatatatacagtatatatagtaaatatatatattatataatattatatattgtaaatatatattatatattgtattgtgtatatatacatgtatagtatatataaatatatattaatatatagtaaatatatattatattatataacactatatatattttatatatgttacatatatattaaatatattatatattaaatatataatatatttaatatataaataatatacatattaaatgtatattataattatacacaatatatgttttgttttctgtttagactacaataggtgttattatcttcatatacatatgaaacatttctgtttagactacaataggtgttattatcttcatatacatatgaaaaaaagggaacaaggaaagtttgcaccctgctcaaggtcacataattaataaagttgcagagctgacactagcatttatgagatcctgtacacacaatcacactgttcatatgtttatttgcagtctcactcaatggttttaaaaaaaaaaagacagtaggtgagtaggcagcagttgtgattaaggagttcagtaagatgccttaatggacggtggaattttggggtcttttataattcactcatctcggcaccttctgacctatagttagaatttctgatttctcctggtctctcttgatttttaatccctagtactttcaaaggtctgagaagggcagaayaaaaaccaattcatcatgtgggcaagcagagatctatatttccctggagcaaagcaatgaamctttgagtttcaaccagcttaggatattgagtccaaacattcggatttcagacataaaatagtaaaagaatttgtaacctctggaaaatgcattctcagcctgaaatcttatcttatacttcctcagaaagaaagaatgttaccgtaacagaaacaggaacagttcagctctttcacctgccctcggaccaggagaaaacagtgggaatgactgacaaattaaagcgatataatctatatgtggaaggaaaaggagactgtgtgtttagtgaaggycatttgtaatgtgcctctctaagctgtgccagctctttaatggataccttggctgcatgaaaaaagcaggaaacyacattgcactccagatgctaccatttaggtggccccctgctactggttctgctgacaagtaggttgtacagatagaacaggggctatttttcaagaagctctggtttctgatgtcatagcatccttttaaaagctcgctctacccacttaaaaatgctctaattgagatagagctcaggtcctaccaagagaatgcttaaacttgctatgtaagtagctcatctgccttataagaagttgtcctgtgtttgannnnnnnnnnnnnnnnnnnnnnnnnnnnnnnnnnnnnnnnnnnnnnnnnnnnnnnnnnnnnnnnnnnnnnnnnnnnnnnnnnnnnnnnnnnnnnnnnnnnnnnnnnnnnnnnnnnnnnnnnnnnnnnnnnnnnnnnnnnnnnnnnnnnnnnnnnnnnnnnnnnnnnnnnnnnnnnnnnnnnnnnnnnnnnnnnnnnnnnnnnnnnnnnnnnctataatttgttgccatatacaatcaccaatgtaataatgagttcacttcaaacacatcaaaaacttttttcatattcctttcttcatttctttgttgaattttgaacacttaactaagatttatcttcttgttcattaattgtttctttagctatgactaatttgccattaaatgtattcactgaatttttaatgttaattatttatatttcagaaattttatttggttttgcttttagtctttttaggcattccttttttaactataagttctggggtacatgtgcagaacgtgcaggtttgttacgtaggtatacacatgccatggtggattgctgcacccatcaacccatcatctactttaggtatttctcctaatgctatccctcccccagacccccatttcatgaccagccccagtgtgtgataccctgcccctccgtgtccatgtgttctcattgttcaactcccacttatgagtgagaacatgcaatatttggttttctgttcttgtgttagtttgctgagaatgatggtttccagcttcatccatctccctccaaaggacatgaactcatccttttttatgactgcatagtattccatggtgtatatgtgccacattttctttatccagtctatcattgatgggcatttgggttggttccaagtctttgctattgtgaaaagggctgcaataaacatatgtattcatgtgtctttatagtagaatgatttataatcctttgggtatatatccactaatggaattgctgggtcaaagggtatttctagttctagttccttgaggaatcgccacactgtcttccacaatggttgaactaatctccttttccttccacatatagattatattgcttttatttgtcagtcattcccactgtgttctcctggtcccagggctggtgaaagagctgaactgttcttgtttctgttacggtaatattctttctttctgaggaagtgtaagataaggcgtatataacttatataagacttatataacatataagataagacttatataacttatataagataagacttatataacttatataagatatgacttatataacttatataagatatgacttatataacttatataagatatgacttatataacttatataagatatgacttatataacttatataagataagacatataacttatataacacttttcctaacaagcgttcctgagagtattcctatttccccacatcctctccagcatatgttgtttcctgactttttaatgatcaacattctaactggcatgagatggtatctcattgtggttttgatttgcatttctctgatgaccagcgatgatgagctttttttcatatgtttgttggccgcataaatgtcttcttttgagaagcgtctgttcatatcctttgcccactttttgatggggttgtttttnnnnnnnnnnnnnnnnnnnnnnnnnnnnnnnnnnnnnnnnnnnnnnnnnnnnnnnnnnnnnnnnnnnnnnnnnnnnnnnnnnnnnnnnnnnnnnnnnnnnnnnnnnnnnnnnnnnnnnnnnnnnnnnnnnnnnnnnnnnnnnnnnnnnnnnnnnnnnnnnnnnnnnnnnnnnnnnnnnnnnnnnnnnnnnnnnnnnnnnnnnnnnnnnnnnnnnnnnnnnnnnnnnnnnnnnnnnnnnnnnnnnnnnnnnnnnnnnnnnnnnnnnnnnnnnnnnnnnnnnnnnnnnnnnnnnnnnnnnnnnnnnnnnnnnnnnnnnnnnnnnnnnnnnnnnnnnnnnnnnnnnnnnnnnnnnnnnnnnnnnnnnnnnnnnnnnnnnnnnnnnnnnnnnnnnnnnnnnnnnnnnnnnnnnnnnnnnnnnnnnnnnnnnnnnnnnnnnnnnnnnnnnnnnnnnnnnnnnnnnnnnnnnnnnnnnnnnnnnnnnnnnnnnnnnnnnnnnnnnnnnnnnnnnnnnnnnnnnnnnnnnnnnnnnnnnnnnnnnnnnnnnnnnnnnnnnnnnnnnnnnnnnnnnnnnnnnnnnnnnnnnnnnnnnnnnnnnnnnnnnnnnnnnnnnnnnnnnnnnnnnnnnnnnnnnnnnnnnnnnnnnnnnnnnnnnnnnnnnnnnnnnnnnnnnnnnnnnnnnnnnnnnnnnnnnnnnnnnnnnnnnnnnnnnnnnnnnnnnnnnnnnnnnnnnnnnnnnnnnnnnnnnnnnnnnnnnnnnnnnnnnnnnnnnnnnnnnnnnnnnnnnnnnnnnnnnnnnnnnnnnnnnnnnnnnnnnnnnnnnnnnnnnnnnnnnnnnnnnnnnnnnnnnnnnnnnnnnnnnnnnnnnnnnnnnnnnnnnnnnnnnnnnnnnnnnnnnnnnnnnnnnnnnnnnnnnnnnnnnnnnnnnnnnnnnnnnnnnnnnnnnnnnnnnnnnnnnnnnnnnnnnnnnnnnnnnnnnnnnnnnnnnnnnnnnnnnnnnnnnnnnnnnnnnnnnnnnnnnnnnnnnnnnnnnnnnnnnnnnnnnnnnnnnnnnnnnnnnnnnnnnnnnnnnnnnnnnnnnnnnnnnnnnnnnnnnnnactcctgccagatatatggctgaaataatggttagttgagataactgactctcttttgaagagccatgtcaaccacccactttgatacattttctatgctctatacctctcagtttagctctatacctcattagaaagtagcatatctaaaattatattaattgctatacacaaagtttcacagaattctgattgaataaatgttgcctcagtgtttatagaacaatgttataattcttatactagttatgaaattaccataaagtattgtagaatacttatagaatgaaattaccataaagtattgtagaatacttatagaatgaaattaccataaagtattgtagaatacttatagaatgaaattaccataaagtattgtagctgcaaataaaatccaaaattgcttggaggcctgcaagcttctgcattatgctctcctgctgacctgatgccagcttccctccaccacatgatgccccagtcacattgggcttttttcactttctgcctcagggccttgtgtgttaagccttctggttataattgcctttcttctttgctacagaacatttctctttttatttttattttttcagtctacaaatatttattgcacacctgagctatgcctgtctctgaacagcagyggataagacagacttacacaacagtgaacaagataacataaactccgtaagaataggagtttatattctaggggcagagtgacaaacaaacgaacaactcccaaaatgcacaggctgtatggggaacagtttggctcgagagaatatgtgtaaggactggggaagataagattttgtagaagtaagacaaattggtaaagatctytggcttgcaaaagggcagtgttttgggcgttagcagagcagagaagtgacaagtgagtttttaaaaaaataacttattgtagtaaatttaaggggtacaagtgcaggtttcttacatgcatatgttgcataatgatagtctgggcttttagtgcatccaycaccagaatagtgaacattgtaaccagtaggtagtttttcagccataacccccctcccaccctcccacctttcatagtctcyggtgtctactattccactctgtatatgcatgtgtacatattgttgagctcccacttataagtgagaacatataatatttgattttctgtttctaagttatttcactgaggataatggtctccagttccatccatgttgctgcaaaagacattctttcattcttttttatgactaagtattattcatagatagatagattgatatcayacatgatatagatagcactttttaatccagtcctctattgatggacacttaggttgattccatccatatttttgctattgtgaataatgctgtgataaatgtacagatgtaggtatctttttaatataatgatttcttttcctttgggtatatacccagtagttggattgctggattgaatggtagttctatttttagttcattgagaaatacctagtttgttttacattaagtttgtactaatttacactcccaccaacagtgtgtaggtgttcccctttctccacattcttgcaaacatctgctatttttagactttcccattctgactgctatacgatagtatctcattatggtttttctttgcatttctctgatgactagtgatgttgaatattttttcatatgtttgttgactgcttgtatgtcttttagaaatgtatgccctttgccaactttgtaatagggctatttctttttcccttgttgttgttgagttgcttgagttctttgtagattctagatattagtcgtttgtcaggtgcatagtttgcaaatatttttcccattctgtaggatgtctgtttactctgttatttgtttcttttgctgtacagaagctttttagtttaattaaattcaatttgtctatttttgttttggttgcatttgcttttgaggacttggtcataaattctttgcctagcccaatgtccagaagaggattttcctaggatttttatacttttaggtcttatgtttaggtcttcaacccatcttgagttaatttttatgtatgnnnnnnnnnnnnnnnnnnnnnnnnnnnnnnnnnnnnnnnnnnnnnnnnnnnnnnnnnnnnnnnnnnnnnnnnnnnnnnnnnnnnnnnnnnnnnnnnnnnnnnnnnnnnnnnnnnnnnnnnnnnnnnnnnnnnnnnnnnnnnnnnnnnnnnnnnnnnnnnnnnnnnnnnnnnnnnnnnnnnnnnnnnnnnnnnnnnnnnnnnnnnnnnnnnnnnnnnnnnnnnnnnnnnnnnnnnnnnnnnnnnnnnnnnnnnnnnnnnnnnnnnnnnnnnnnnnnnnnnnnnnnnnnnnnnnnnnnnnnnnnnnnnnnnnnnnnnnnnnnnnnnnnnnnnnnnnnnnnnnnnnnnnnnnnnnnnnnnnnnnnnnnnnnnnnnnnnnnnnnnnnnnnnnnnnnnnnnnnnnnnnnnnnnnnnnnnnnnnnnnnnnnnnnnnnnnnnnnnnnnnnnnnnnnnnnnnnnnnnnnnnnnnnnnnnnnnnnnnnnnnnnnnnnnnnnnnnnnnnnnnnnnnnnnnnnnnnnnnnnnnnnnnnnnnnnnnnnnnnnnnnnnnnnnnnnnnnnnnnnnnnnnnnnnnnnnnnnnnnnnnnnnnnnnnnnnnnnnnnnnnnnnnnnnnnnnnnnnnnnnnnnnnnnnnnnnnnnnnnnnnnnnnnnnnnnnnnnnnnnnnnnnnnnnnnnnnnnnnnnnnnnnnnnnnnnnnnnnnnnnnnnnnnnnctagattattattcgtgtatagaaatactaccaatttctgtaactttattttttatcttgaaattttattgaattcatttgtcaaatctgagaattttttggtggagtcattaggattttctagatatattatcatgtgatcaataaacagggatacgttgacttcctattttctaatttgaatgcctattatttttttctcttgcccgattactctgttgagggtttctagtgccatgttgaataacaatggtgaaagtgggcatcattttcttgttctagaacttagattagagggaattagaaatcatcagagggaatgatttcaacttttccccattaagcatgatgttggctgtgagtttgtcatatatggcctttattatgttgagatatattgcttttatgcctagtttgttgaggaggatttttatcatgaagcgatgctgaatttcatcaaagactttttattcatctactgagatgatcatgtggtttttgtccttaattctgtttatgtgatgtacagcatttattgatatgagtatattgaaccatcctttactccctggggtaaagctcaccttaatattgtgtatcattttttgatgtgctgttggatttgatttgctagtattgtgttgaggatttttgcatctgtgttcatcactgcatgttttcttttgttgttgttgttgtgcccttgtatgattttgctgtcagggtgatactggcctcatagaatgagttagggagaattcactcctgcacaattaaaaaaaatagcttcagtaggattggtattagttctttgtatgtttgatagtatttggctgtgaatctagctggtcctggctttcttgttggtgagaaattttttattaattatttaatcttgtcacccattactggcctattctggatttctttcatatatatatatatatatatacacacacacacacacacacacacacacacacgtattttattgtactttaagttctagggtacatgtgcacaaattgtaggtttgttacatatgcatacatgccccgtgatgatgtgctgcacacattaactggtcatttgcattaggtatatctcctaatnnnnnnnnnnnnnnnnnnnncagcatgatttataatcctttgggtatatacctagtaatgggatggctgggtcaaatggtatttctagttctagatccctgaaaaatcgccacactgacttccacaatggttgaactagtttacagtcccaccaatagtgtaaaagtgttcctatttctccacatcctctccagcacctgttgtttcctgactttgtaatgattgccattctaactggtgtgaaatggtgtctgattgtggttttgatttgcctttctctgatggccagtgatcatgagcattttttcatgtgtctgttggctgcataaatgtcttcttttgagaagtgtctgttcatatcctctgcctacttgttgatggggttgtttgtttatttcttgtaaatttgttgagttcattgtagattctggatattagccctttgtcagatgggtagattgcaaaaattttctcccattctgtaggttgcctgttcactctgatggtagtttcttttgctctgcagaagctctttagtttaattagatcccatttgtcaattttggtttttgtygccattgcttttggtgttttwgacatgaagtccttgcccatgcccatgtcctgaatggtattgcctaggttttcttctagggtttttatggttttaggtctaacatttaagtctttaatccatcttgaattaatttttgtataaggtgtaaggaagggatccagtttcagctttctacatatggctagccagttttcccagcaccatttattaaayagggaatcctttccccatttcttgtttttgtcaggtttgtcaaagatcagatggttgtagatgtgtggtattatttctgagggctctgttctgttccattgggtgctggttttttgaaaagatcaacaaaattgatagaccactagcaagactaataaagaagaaaagaaagaaaaatcaaatagaygcaataaaaaatgataaaggggatatcaccaccgatcccacagaaatacaaactaccatcagagaatactataaacacctctacacaaataaactagaaaatctagaagaaatggataaattcctcgacacatacatcctccccagactaaaccaggaagaagttgaatctctgaatagaccgataacaggctctgaaattgaggcaataattaatagcttaccaaccaaaaaaagtccaggactagacggattcacagctgaattctaccagaggtacaaggaggagctggtaccattccttctgaaactatcccaatcaatagaaaaagagggaatcctccctgactcattttatgagggcagcatcatcctgataccaaagcctggcagagacaacacaaaaagagaattttagaccaatatcgctgatgaacagcgatgcaaaaatcctcaataaaatactgacaaaccaaatccagcagcacatcaaaaagcttatygaccacgatcaagtgggcttcatccatgggatgcaaggctggttcaacatatgcaaatcaataawtgtaatccagcatataaacagaaccaacgacaamaaccacatgattatctcaatagatgsagaaaaggcttttgacaaaattcaacagccctttatgctaaaaactctcaataaattaggtattgatrggatgtatctcaaaataataagagctatttatgataaacccaaagccaattacatactgaattggcaaaaactggaagcactctgcttgaaaattggcacaagacagggatgccctctctcaccactcgtattcaacatagtgttggaagttcyggccagggtaatcaggcaggagaaagaaataaagagtattcaattaggaaaagaggaagtcaaattgtccctgtttgcagatgacatgattgtatatctagaaaaccccatcctctcagcccaaaatctccttaagctgataagcaacttcagcaaagtctcaggrtacaaaatcaatgtgcaaaaatcacaagcattcttatacaccaataacagacaaacaaagtgtgaaatcatgagtgaactcccattcacaattgcttcaaagagaataaaatacctaggaatccaacttacaagggatatgaaggacctcttcaaggagaactacaaaccactgcacaaggaaataaaagaggacacaaaaaaatggaagaatattccatgctcatggataggaagaatcaatatcatgaaaatagccatactgcccaaggtaacttatagattcaatgccatccccatcaagctacgaattacttttttcacagagttggaaaaaactactttaaagttcatatggaagcaaaaaagagcccgtattgccaagtcaatcctaagccaaaagaacaaagctggaggcatcacgctacctggcttcaaactatactactacaaggctacagtaacaacaacagcatggtattggctcctgatttctttttctttctgctagagaaaatttctaatctttgcctggtctcaccgtaattgtcttttcctcaatgaagtattttctgcccacctaatataaaatcactttcctagtattctcatttttatatcactgtatattttatacagtttatctcatactacaagtatataggcttgtggttgctaaatagcttgctctcacactaaactgatttccacaagggcaaaaaatgcatctgttttatttatctccactatttcaatatgtacttgagttgacagtagcataatgtaaaaatattgtttcatttgctctaaactgaacatgataactaatatgtacatgttttgctagaagtgaaaggagaattaaatgttaatgtgagaagtggatataaaagtagacatataaacattcaacaaataacatgtatacactctaccaccaagaatcaacaagttcatatgtatgcttttgcaaaattttaaatgatgtatgacatatacctagtttgtcactttgaagtaattgaaacagtagatgagagagtgtaaatatctccccacgaacaatttgagctgatgacaggaggatgagttggaattgactatgtgaagtgagaagcaacaaaactaaaaaaaaaatctttgggaagaaggaatgtctattccagaaaactgaaagaaggtcactgggatgtagaaagtgaataggagatttgtgtgaaatgttgctgattaagttgtcaaggaccatgaaagctttatagnnnnnnnnnnnnnnnnnnnnnnnnnnnnnnnnnnnnnnnnnnnnnnnnnnnnnnnnnnnnnnnnnnnnnnnnnnnnnnnnnnnnnnnnnnnnnnnnnnnnnnnnnnnnnnnnnnnnnnnnnnnnnnnnnnnnnnnnnnnnnnnnnnnnnnnnnnnnnnnnnnnnnnnnnnnnnnnnnnnnnnnnnnnnnnnnnnnnnnnnnnnnnnnnnnnnnnnnnnnnnnnnnnnnnnnnnnnnnnnnnnnnnnnnnnnnnnnnnnnnnnnnnnnnnnnnnnnnnnnnnnnnnnnnnnnnnnnnnnnnnnnnnnnnnnnnnnnnnnnnnnnnnnnnnnnnnnnnnnnnnnnnnnnnnnnnnnnnnnnnnnnnnnnnnnnnnnnnnnnnnnnnnnnnnnnnnnnnnnnnnnnnnnnnnnnnnnnnnnnnnnnnnnnnnnnnnnnnnnnnnnnnnnnnnnnnnnnnnnnnnnnnnnnnnnnnnnnnnnnnnnnnnnnnnnnnnnnnnnnnnnnnnnnnnnnnnnnnnnnnnnnnnnnnnnnnnnnnnnnnnnnnnnnnnnnnnnnnnnnnnnnnnnnnnnnnnnnnnnnnnnnnnnnnnnnnnnnnnnnnnnnnnnnnnnnnnnnnnnnnnnnnnnnnnnnnnnnnnnnnnnnnnnnnnnnnnnnnnnnnnnnnnnnnnnnnnnnnnnnnnnnnnnnnnnnnnnnnnnnnnnnnnnnnnnnnnnnnnnnnnnnnnnnnnnnnnnnnnnnnnnnnnnnnnnnnnnnnnnnnnnnnnnnnnnnnnnnnnnnnnnnnnnnnnnnnnnnnnnnnnnnnnnnnnnnnnnnnnaacataagaataggaatgtacacccagtgaagtccttactctgtgtcctttggcatactccttacattaaaataaagccaatggtattcctttaatggtaggagcatccggtttggtagttgaatcagataatagaattctctgtgcagaggagaaacttgtgaccaatagaactctagatctgaattattattcccagtgtgttagagtgctatacttggcagattctcatactttgtccctatgaaagcattaggcctgacacaacctttctaatcaaccacatatcttgaatatcattcatctcatcagtgaaaaagtatttctaacatccattagatgaattaacacaccctctggtttatacttctataattatgtgacaggtacatcttgtagccattcctagagtatggatttctgattagtgtacttcagatgcaaactaacaatccttacactgtaaattgaagttaatttatgtacatgtacataacactatttatactacaatatttttaatgtaaattatcacatagtgagtataacaaagagttttcattgtggatgtgatatagtcatgtttcttctcttaggctaccttgttagcagttgggaaaatagatggaggatggggaatggcagaggtattgtggaaagaccatttaaagaaagcatatgaaatgaagttaagttaggatggagacattttggatagagaaaagttagcagatttgagatattttaaaatattttaaaatttaatttaaatgtcaaaattaaagaattaaatattatatattgcgagggagctgaaggcatcaagaattatttctacatttaacttgctcagctaaatgatggagatgctgttcactgggatgagcatcagtcccaggcagtgtaacacacttacttgaaactttagatatagaaacaaaatcataaaggatgaaacattgataaggatcaaacttgggagtagaagagcatgattgtacacttattctattgattttgcagacactttgagctattttaggagaaatgttgggaaggaagtttgatgtactgtatttctctggaagtaacaagagagttcatatatgcagatataacgtgggagtcatctaattgcccatgacaattaagtttattagtgtggttgaactacctagtgagagagagaacataaaaagcaaaaatagatgagaacctatgagtgaaccctgaagaactcctacttctaagaatttgttagaagatgagtttgtaaagaagaaatagccatatagacatgaagagtaataagggaatatcatggaagctaatrgaagaagagtttccaggaaagaaataattggtattattgcagtgaaaagtcaagaaaagtgatctaaaatgttcattttgcgggatagagagtccattgacctttggactacctattgatatagaattagggaatgaaaactgcatggagtgaaagaagagtgactggaagttcaggaaatggccaaggttttttgaatagttgtctgaacctggattccttttcctgtgggcagccccctctgctcttgcccaccacaattatataatattctcatgctgtgtacagttcacacagtataaattgctgttttagcctaaagtatttttttgttttgagactattttcttcagttaaataaaataatgttttatgtagggtactttcatrgtgggtatatgctttatcaatatttttggtcattgccagtatttgagcagtaataatttgtaggcttttaagataatttgtgacaattgttgtaagacatacttaagggaataccttcataaatctaccttaagtctggtcctggatgaagcatgtgcttatgaagcatggctactattgaattggccagtattggttccaagatttttaaatttattctttctggttctttaattgtaaatcagaaagttataggtgttgatgcaayatcatgaactttgaagtaaatataaatggctccactttagatactgttaattctaagcacaattagattttaactatcttggttctggttattttgtatatattcagtattataaattacgtttgttcttaaagatgtctgtgaggcatatcggctattatttcatagtaacgttaaagacaaattttatggtgattacaacatgatgttcaatcaagattaaaatgtgttacatcattggcaaaaagccagaaggagctttattccartgtgatgcttaagtataatatcaatattatatatgctgtcattaggaatttgacattaaaggagattctcttgattatatatggttgcacttgaaggtcacctttaaaggagaagtgtttgaaaactatattttatccttgataggtgaagaaaagtccacttataagtgggagctaaggccagccacagtggctcatgcttgtaatcccagcactttgggacactgaggcgggtggatcacgaggtcaagagttcaagaccagcctgaccaaaatggtgaaaccccgtctctattaaaaatacaaaaattagccaggcgtggtggcacacacctgtaatcccagctactcaggaggctgagacaggagaatcgcttgaacgtgagaggcagaggttgcagtgagccgagattgcaccattgccctccagcctgggcgacagagcgagactctgactcagaaaataataaaataaaataaaataaaataaaataaaataggagcttaatgatgagaatatatggacacatagaggggaataacacacactagggtcttttggagggtggagggcgggagaaaggagaggattaggaaaaataactaatggatactaggcttgatacctgggtgatgaaataatctgtacaacaaaccccyatgacacgagtttacttgtataacaaatgttatataggtaaacttactccagaaggcttttcctggtctgtttgtttgggaaagatgtctcatatttttggtgacatagcagcctgatcatattttttattactttttgcacattgaaaccttatcattatctgcctcttctgctgagcattcctgaaaagataaatcattcttatccattatttttatggtaattcctgtgtttagtaggctgtagtcacataataggagctcagtttaatcaagtttaagtaaacaaaataagtttaagtaacaaagtagtgctatttagggttttctaagggatcttgtcatgcactaaaaaccttggaaagggcaacttttatttgtggaaacaagttgcttaaaaagactgcatgttcccatcctcacacattgtagatttgccccagccttagactcctctggggcagtgtatcacacttatatgaaactttagatatagaaacaaaatcatagaggaggaagaaactttagaaaatctagtccactggtctctctcaatgaataaacctctgtttccactgtactttcaatgtatactggacatcttttgtttccgccccattcaatatccattctgcctacctctggtgacagcgtactccatgctccacttttggtcaatgccctgattctagaggagggcaaaagatttaggtcccttacctgttctacacttagatctttgtgccacttttataatttcttttcattagaaaacacatatatgagtttggctctctgcctcttcctcaaatagagtataaagccaggaaaggagtattgggttctgtgtatttactatttgccattcacactctaatttctacccacattgttcttcaacatgcatcaagtcatgaatggccagtgaccaaaagattattaaaatattaaagggcaatataaagtgatctctaggtctttcagatctgatggttttttatttgatgaatatgataaaatatattatctgtataagaaaacctaccattccattatcaacagtggctctaaactatataaactgtatctagtgtttgaaaattctggcctatttgcatagaaattttacttttctaattaacaaatattcagatgattatgttaatttagtttaggggtgcccttttagacttaagaaattttagactccgttagattaatgaaatagaggttgaaaccttgtaacctctctgaaacaagaatgtaattggaaattgtaggatttcaaaacaaaaatctgtattctgattttttgttgcatgtttttagatgggtaacctctttcaggcttgctttcttccttaagatccttccctcaggaacttaaaagaaaaactaaaatgaaatatcagttcactaaaataagcaccctgccccaaagtttagcaaagtgcatcctgtctcactgtttctgctgaggcatctacaagaaggaaaaaaaaatcagtgtaccaaagtttgcccctctggccagtttttctcacttacaaataatgaatccaagggggaaaaaaggataggtaaaatatcttgttaaaagttatttttaccaatatcttgttaaaagtttttttaaagtctccaaaatgttatgaaagtgaaaaaaagaaaattatactgaaagcactggcctagtaaaacagctttcaatgattagagttactacttcaatgctgttatgtgttcttctcatcagatgaaatttctctgcgaatgcaccataagttatctaggtgatagcaataacaagagccttattcataaaaakattaattaacaggtatattttgagcagaatttaggagcacagagatagtccaagttggaaataaataatctggagtttgcagaagcaaggtggaaaagattactttgcagtgctaaatattccaatctaaatgggtarttttatcaaaattaacttctggactggacccttactggcttgagttctggttggcaactgcaaacaattttaatgcraaatggaaacaattggtaaatgtgtctttaaaaattaaaatatctggctgggcacagtggctcacacctgtaatcctagcactttgggaggctgaggcaggcagattgcctgagctcaggaattcaaaaccagcctggacaacacagtgaaaccccgtctctactaaaaacacaacaaaattagccgggcgtgccagcgtgcgcctgtagtccagctgaggcgggagaattgcttgaacctgggaggtggagggtgcagtgagccgagattacgccactgcactacagcctaggtgacagagagagactccgtctcccaaaaaaaaaaaaaaaaaaaattaaaatatctttgatatctaaaagttaaacaggccaatgtttcctgtatacttttacctaaatrtatcagtgatagattgaaggcagaaatgactttgacaagcccatttcaaagttttaatgaaagtttcaaattatgcaatgaggggtcattgattcacctttaatggccacgtagaatcatgaaatatttttattcagagtctatataattaataaagatggatgtgttaccgtaacaccgcgggtttggtctaggttctgctgctcaccacagagaaagccaatgactgagacaacgattatagcagaggttggctgctatagccaaggagatgggagggagatcaatctcaaattcgtctctccgaccgactgaaattaagggtttatagcagggaagaaatgtagcaatgcataggaaaataggagctcaggaggcctaaggaggtaatcatgatgaatgaggggactggtgtcccattgtctggatgcggggatctggtactttgatgctttttgagacgcctggggatccttctcggaggaaggaactcagatgaaacaaatgtaactttcaagctttaaaacaagaagggtcaattttctatgtttatacaaaaaaaaaactatgggaccattgggtcaatttcagatgttgaaaccagagaaacatctgcacaaatattaaaactgccaaagttagaatcatataatgaaggctagagttcattgctcttatgagtgttgttaagacaaactgggattaccacacaccctgtactccttgaatcttatgttaaaagttcccacaaggaaatgatttagtttttgagatgcctcctggatccattaagcctttggaaatgagtacagtgatgtaacaatattgagaacacagaggcatcctttggttttcccctaattgtgttctgcaaaacactaatctggagataatgcttcagggggaaaaaaagcatggcatgtttagctacatttggaatacaccacatgccatccctctcaaagaatcactgtttagcacaatagaggttggaaaaatacttcaataaagaaaatttgactttgttagctgcatacttctcaaaacttagataacatcgaaaccccgttttcaagtaacttctattaatataacatcaaagagaactagtgaaataggcatattttgggaaatactgacataagatcccttttcaattggaatcactgtcaaactattaaagctaagagactatgtatttcagccactgggatggaatatactttttttaagttaatgaaatacattcctacattccagtttatacatcagtttctgagagttccattagcatgagacagattctcagaggtttgtcctttttagatacctgtgcaaagtaattgtgatcttgccctgcaaagctgaagatttgaatgcagaaatgtgattacactaagggactagcacattttgggaccttagctggtgaactgtacatatttgaaaggtactgtaatgtcaaaataacatagacatccactttgaggaaatgtgttgggcctacttgaagtttaataatgaacaaaataagaattgttgcacagttgggacactgactcacagtgtgacacacagaaaagccttcaacctgtatgccactgttttgttatctcttactcatagctatcagaaaggaaaaagagtgagtatagttggaaggaccttatgattaaagaaaatattatgggtacttaatgagtgaaccaccttaatgtgatctgctccataaaagaaactgcctaaatgaacactgtgattattctcagactgggcattactgaatactttcaacactccatatgggatagaaatgatctgttcatttagactgtgactgggaagaatctgagcgagagtgcctacctcaatatccctttactcttcaggcaacatatggcatttgaggacaccagctcacaggttctttgtccactctcttatttttcctccaggcataacaattcactgctataatctgcctttctgtttgtttaggtagcatccatttctgtaactttttaggcttaatgaagtgacataaaacacagccttaagcaaatggttgtactatccatcaattcagtgacttaggagatgatgccattacatataaaatagaaccattgttcagcatttttaccagcggcattgcttctttcagagttcccatatttcctgttatgaaatggctgaaaacttgaatatattgtgaaaggggacactttgcaccgtgtacacttaatccctacttgagcatcatcatctgctgacaaatacataaatgaattgaagacactgcaggttatgtgcatttccatttcaagaagattgcttttttttattgtttcttattttgcattgatatcatgaagctgtaaaaagaagagtggaaataaaagcaagtggaaatcaaggtatttcagttgagtaatgtccaggagtcctagctccaaaagtgtatcattcatttatacagcagaacacctgtattactaatgcttttaatgtttttaaatgctaccaaatgtttcttttgactaacttattcccagggggtccctataactctttcaggtcactcaggtactgctttctaaattaccatggtagtagattcaattactattgtactctttcagtggcctaaaagaataaatggtcttcctaaaatgcttctttttatttttccgccaaggaaaagcccagagtgttagagctggatagtannnnnnnnnnnnnnnnnnnncttggagattatctgactcaatgttccataaatatttctgatgataaaactctcctgagaatttgttttaaaaaatacagattctcaggctactccccttggagactctgttacagtacatttgaaattgagcccaggaatctacattttgtcataaagattccagatgacttttaggatcagataggtttggaaaaactaaattagttcaacttttttattttatagggggtaagcagctgtccaggtagattaagtgattcatctgagttgtatcataaaccatttaaaatattgggattagttcaggaaaaatgttgatgggcaacatttttgcatcccatggtagggaccaggataatttattttcttagattttaagttgccttctctattgtatagaatggtgtcattcatggcggagaagtgataggggaggatacacctttctgtatatacagcagtggttctgaactgggaatgattttgcaccctaggtaacatttagcaaggtctggagacatttatggtgtcaaaactgggggatactactgctgttatttagtgggtagaggtagggatgctactaaacatcttacaatgcacaggattacttttcccctctccaacaaagaattattcataccaaaatatcagttgtatccagattgggaaaccctgatataccccttaatgccttcttgagcttcatcttcctctgaactatttaagagtaatatctgggcaatgtgagaaataggactctgttttgttttcttcttgaaattacataaaaagcctatatcgaagctaagtgggtcatttgttggtccatgttgggctatacttacttagactggatacagttattattttgtttttggatcatacagcaaatccttttgaagatgcctcccccttctactcaggcatctaaacctgcctttctgtggcacaccttaattatgtatgctttgacctttcagtattcggtgcctagatcacccaaactctgattcccaaggtcagcaacaagctacagtgtcaatatctgctgattttgaacagaaatcagcacagaggttttgggtgaaatcaacccagaggttaagtgaatggaatactcaatttagttagagtaacttacttactaaattgatctgatttttattttatttatatttctcgattctatcttctttctatttctggtatgagtacttaatttagatcattattttctttttcattaagcattgccatcaatagttaactaacatcttaaatttttggcatttttgtcatctctccrtccattttacacctaacaattacgtttgtaaaatgtgttttctgattacaccaatcaatagtttctcctcacctacaggaatgtttctcaaacttgagttacgtttggaatcttcttaaagttatttcatcacttgtaccatcttaaattattttattacaaaataacttacatatgggtaaacttgaaactgaattgatcttcattatattgggagcttaatacaacgataaaaccaaaacatgttttcaaataaaaaatgaaacaaactatacaacaaataaagatcaaatttgtcatgttaacagtatgacagttaacattgtcctgaaactctaacactgtttgtagtgatcatagttcttttattttcacatgtctgtggttagtaagctttggtatgactcaattcttctaattctttattttgtcccttgcaaacgaacactttaacataaaagctgcatccattctttttgcattaacccagggcaaataattgctatatacctttgcagctaaaatgcagaacaaagataaacagagacactagaaattgataagctgcatcatccaggtctcatattatttttatattatcatgaaaataaaaaattaaaaatgaattttgatttaatttattaataaattaaaaattctcattgttaactcaacagcaaagtttgtgagtattaaaacagcaaaggttttaaataatgggaaacactgacctgtagaattgagtcaaatgccatagcaaagcatttaaagtccccagtgtgccattcttttctcatgtctccaggctcatctgttgggcatttgttgcttcaatgcttattacgtagtgttaccgagctcaccagattgccttgtctctgtattaattccagcctgtgtgcttacgttttgcttctccatctctgtattcctccccaccaacaatttttgtttctgtctatttcaaaataatatttcaagatctagcttaggtatcatctcttctaaaaccattcctaggatctcaggataaaacgccccctcctctgtgaactaaatacaccctgtgctagtttctagcctacttccttatgtagagcaataattatttatttctccactataccataagcttctttagagtagacattgtgctgatgacatctatcccaggctgtaacgtacagtagttaataggtaaataaatagcaaagtactgtgaaccatttccaattaaagagccatctctggtaaccagcttggttttgttttgttttgttttgttttggtttggtttggtttgtttgatcattttccaatactcagagttgaatacactttaagaaaacatggtatggttgaagaattagttggatttagaatcagaggacttacattcacatcctttcctgtcatttgttcttaggtgtaaaacaaggttaaacagtcatccttccacaccattttttcagatgtgcaaaatcttggcacaatgtcttaacacacaggtatatactcaataaatgttagtttccttactacactgttgttttacttcttttgatagccttcagcgatttgaaattattatcgttaccagtgaagcttcagatttatatacttccttattgtagttagactgagatcaagtattagttattttttgcagaaagaactttaagatgactacatataatagatgacacaatcagtctttcaacttcaatgaatacttcactccctttaaccatttatatttattcagaacatatttcttttactgccatgggcatgagggaacttttactttgtttttactacctagagaaatctgtcttcctctatctttttgtagtctatttttgtcagaaagatctactttcagaaacatttcctttacctactatattattgaatttcttttttatgctttcatatggatattagaacctgtagctttagttctttagataataggagtaggacttactgataacacaaaatttattgtagaggtatgtaatatgggtttaaacaatatggaaaattccttgaattttcttagcttttacatgtattttataaagataaagataagatagatctgaaggcagttgagacggatgtagctgatgccgacaaggaaaagaaaaagagcaaagagactgcagtttgtttattataggatgaaatgccaactgcaaactatggaaggatttcctaaaggagaattcttagtaatagacttactggttcaagaaaattcaggctagatggaaaagaaaagctttatagatatgggaatagccaaaggatgaactaagcttctaagaaatgtgatcaatgtcactagagacaaaggatctgaatttaaatgtaacatcatgagtataagaaaaatgaaatcaatttgtcataaagcagcaagcatgagccgacccactagaaatccctgttatcacaaatcattctttggttatgtgtcttcctaaagaatgaaagcaatgtgtggcacaggtccttttgtactggattaaggctgcacctgtcataccctgaccgatgtcaccttctgcctactctctgaattcaattcaaatgaaaaccttggtgtctttgggtgggaagattcatgactaacaggaaacattttttaatatcttgaacctcggaagaaattaatttggctctggttgccctgtttgtcacaatcatgatgagtaccacttaccatatggtaggaaataaaagagaaccttggggtcttgttttcaaagttggaataaagtcttctgagctggaaaatctcagtgaatagttatgtttacaagtattgacctcagggccttttatatctgtgttgcctatgtttgggccacagttaagatatgtcattgctgaagacagagtgttgtttgacaacttgcacacaggaagataaatttaaagaattattttatgtttctacttccagatttcttgtaactatctaagaaataaaataattttggctattatgaaatgcacatctaatttcattgtattttggcttgttcttagcattcattttagcttcttatgaggataccaatattcacttatatttcagattggttttaaaaagatctttttatgcttttgtgtcagctactttatatgcagttacctcccttgctcttggagaacttgcagtttatcagaagagaataaaaagataattccttaggagaatgacaaggcaaaccacaggcttgaagaaagtatttacaaaatccatatcgaattgaggactgttatccagaatatacaaagaactcttaaaattcaacaataagaaaatgaacaacctgaatttttaaaataagcgaaaggcctgaaatagatacttcccaaaggggagatgaagatggcaaacaagcatataaaaagatgctggacattatatgtcatcagggaactgcaaatgaaacacctatttaccgattagaatggcccaaatccagaacactaacaacatcaaatgctggccaggatgtggaacaaaagaaactctcattcagtgctggtgggaactcaaaatggtacagccactttggaaggcagttaggcagtttcttataaaactaaacaaattatgtgattcagcaatcacgctccttgatttacctaaattagttaaaaatatattcagacaaaaccctacccacagatgtttatagcaacagcagttgtattcgtactaattgaatcttagaagcaatcaagatgtccttcagtaaaataatagataaattgtggtgcatccagacagtggaatattaattagcactaaaaagaaatgcactctcgagccacaaaaagatatgaatgaactttaaaagtatattttgaagtgaaagaagccagtctgaacaggtatactgtatgattacaactatatgacattctgaaaaaggcaaaactgtggagacagtaaaaagatcagtggttgccaggagtaagtcaaaacagaaagatgaataggtgaaaccgaaccattgccctgtagactgttctttttgataaacatagaaattgacccttctagtgttaagaagcttgaaacttttatttgttttatctgagttccttcctcaggaaatgacctttaggcctctcacaaaaagtaaaaaaaaaaatgaaaccagatcaccacaccagatgctggacccatcattcaccatgattgcttcctttctcttcccaaatgcctgttttcttacacatttttacatttcttgcctgctatataaagccctggtttaagtcagggagatggatttgaaactgagctcccatctcctctgctgcagtacctgattaaacccttcttccttggcaatacttggtgtctcagtgattggctttctgtgtggtgagcagcaggacagagaccaaacctttggtgtttcggtaacataagcagagcacagagggctttttagggcactgaaactattctgtatgatactaaaatgatggatacatgtcattatacatttgttaaaacctatagaatgtacaatatcaggagtgaaccttcatgtaaactatggactttgggtaatcatgaaatgtcaatgtaggtttattgattccaacaaatgtacaaccctggtggaagatgttgatagctagggaggctgtgggtgtatagggtcagggtacatgggaactctcaatgtcttctgctcaatttcgctgtgaaccaaaactgcttccccaaaatatttctatttaaaaagataattcctcaatgttaagtgttatgaaaaaaagtttgtaaattgtgtgataacccagagacaaaggggtgtattcaacttagtgagatatggaaaagacttcacagaagtggtaactcttagagcggaatttcaaaggcaagcagaattttgcctgtaggagggggaaggtaagtattacagttaaagaaggagaaggaaaggggttaagcaggagggagaaaacgaggaggaggagagtgaggaggcatggcgtgttctgtgactttctgtctattgtagccatgttaataagtttgtagtctgtagagtcaatgcattggatatttgtgatgagtagaaaagctaacatttattacatgcttaccttgttgttgttttcttttggattatcacatgtaataatgttgaggcaaaaagaagttaaataattgccccaagttcatatagctaatcggtggcaaagctgggattcaaattcagatattgttatatcaaaactcacattcctgaacaccactccaaggggtgatgtagccagacattcaaagcggaaggaattgaataaagattggacatcaatgcatatcttttctctctttccagcctctttgcaacaaaatagaccagtagctgaaggcaactgcaatccttcatgatgtttcccttggccagaaatgcactaagcagtctcaagattcaaagcattctgcaaagcatggcaagacatagccatgtaaaacactcaccagattttcatgataaatatggtaatgctgtgctagccagtggaactgctttctgtgttgctacatgggtgtttacagccactcagattggaatagaatggaacctatcccctgttggcagagttaccccaaaagagtggaaacatcagtaaccatcacagttgctgtaatgacagaattgtttaaaaaaccaacttgtcatgtaagcactctactgcttattaaaatatagcacaattgaaaaaataaaatgtrttttaaawctttaaaaagtcattgcaaatggtcattatattgcctgggagccatacaatagcagtgggtatagattacaggggattatgaataggaaatatttgaatgtaggattagtaaaacgtgtattcctctggtttaatgacttacaccaggtatctttcagtgaataaatacacatatgtaatttacaaattaatttatttggctggaaaatcctgttgaatcttccttgaaactctatagatgtttcttgacttgggattacatcccagtaaacccattgcaaattgaaaatgttgtaaattgaaaatacaattaataccctacatacgcattgtaaagtcaaaaagttgaaccattgtgtgttcagatgctcctcattttatgatggggttacatctagataaacccctcaaagtcaaaaaatcataggttgagctatcctaagtaggggactatctgtgttcagaaactgaccatttttcacgaccttcatcattcccaccctggtctgaaccattatattcatggagactattataaaaaactttctaaccagccttcttgtctccacagtttctgtcctccaaacctgcctcccaccaccgcacacaatcttttttcagctcatcagccagagttcattttaaaacatagtctagttctgtgactcttcattcaaaacctaattctcatttcattccagagttaatgctaaagtccttagaaaggtacacaggtcccctaaatgctgcactggccagtttacctcctgcatcaacaggtttctactggctcctccctctgggtggcatgcacttctgggttctgtatgactccctcacacctttttgggttttgttcatgtcatcttttcagaagagggctttatcctttctaaaactgcagactttattttggcctggctttctctctcttgcttctttacttttttctatatcacttatcataatctcacttaatatatatatttatttatttgagatgcagtctcactctgtcgcccaggctggagtgcagtggcacaatctcagctcactgcaacctctgcctcctgggttcaggtgattctcctgcctcaggctcccgagtagctggaattacaggcacccaccaccacgcccagataatttttgtatttttagtagagatgggttttcaccatgttggccaggctggtctcgagctcctggcctcaagtgatccacccgcctctgcctcccaaagtgctgggattacaggcgtgagccaccacatgcagcccactcttaagatatatttaacttatttatttgtttattgcctgcatacaaaactccataaaaacataggctttgcaaatttttttataagtttatcacaggacttggtggctttgaactagtttgaattaatgcattaatgagtggctttaggtaattcagagtccccatcagtctgaaattaagaatttgcttatcattgtgggttgcaatgattattggaaggcatattagttctatattgctgttttgcaaattattccaaaactcggtggcttaaaacaacacttattatctcatagtttctgcgggtcagatctgagcatgacttagttgggtgctcctggctcaagatctgacatttctacaaccaaactgccagacagggctgcgatcctctcaaggcacaacttggggaagaagcacatctaaactcactcataagaatgttggctggcctaatgatcttgctgaatgttgactggaacatcattcctttctcatgtgagtctctccatagagcagctgatgatatagtagctggcatcacttaagagtgcgagagggtgccccagacaggagctttttgtaacccaatcttacacatgacatatcacctctaccacattctattcacaagaaacgagccatcaaatcaagctgacacacaaggggaggagatcatacaagggcatgattatctgatggcaggaaccacttggcactattctaggggatatctaccacagttggcagtacagaccttctcctgctactggataaccaacttcaatcagtctgtttctcaagctctgttatatattagtatcgttattctctagatagagatgactaaatgtgcccaaccccatttttactatttgaaagtttctctatggtccctccttgatgtgaaattggtaggtcttagggagtgcccatttacagtatttctaaatcattctacaaactcgttaaatggtttacagtttcaccagcaacgtaaacaacttcctcttgttccacctccagacttactcttagagttgtcaaacattttaatatttttgttcctttgatgagtgtgaaatagtagctcatggctgggagcactggctcacacctgtaatcccagcactttgggaggctgagttgggcggatcacgaggtcaggagtttgagactggcctggccaatatggtgaaaccccatctctactaacaatacaaaaaattagctgggcgtggtggtgggtgactgtagtcccagctactcgggaggctgaggcaggagaatggcgtgaaccagggaggtggaggttggagtgagttgagatcgcgccactgcactccagcatgggcaacagagcgagactcagtctcaaaaaaaaaaaaaaaaaaaaaatcccaaaatgacccgggcatggtggcgtgtgcctgtagtctagtcccagctacttgggaggctgagggaggagagtcgtttgaacccaggaggcggaggttgcagtgagccaagattgcactactgcacttcagcctgggcgacaaagcgagactcagtctcagaaaaaaaaaaaaaaaaaaaaaagagtagctcatgttttaatttgtatttctcctgattactaatgaggctggatattcctgtattagctctttgctttcttctattttgtgatttttgtttgttgcatgttgctgcttttctatttggttatttgtcttattcatagatttttttggtatattttgcatactaattgtaacaggattaagagtgaggcagaaccagtatgagtagtannnnnnnnnnnnnnnnnnnnccagtatgagtagtatgcaatacaggattaattatgggcattaaaatgaatgcaaatatgggagctgggggagaactctttaaaatgttattgcctccatgtctggtgttgaatggttctcagtaaaggaagaaagctgcatgtgaagtagagaagagctaggaccaactggaattgggaacactgaaatcaggaatacaaattggaaggtgtgcctttttctcactttgtctatctaagatgacatggatgacctgcaggagaaattgatgcccttcactatagagctgcacattcaactggcccagaattcaaaaagctgaaggagaacaattgatgggattttgaatagctgtcagtgtggcaggccagatcagcaacaaattgcataagctgccacagtgttggtgctctatgcccactttctaaatataaaatgattggtgtttcatgttcatctttcctatctcatacattgtttgttattcttgtggccaactctaatctgaaaatataaggggaagggtgtaagtagttcaaacttagcaaagttgacactcaaagagccacagtaatctaccctgtgtcaacttcacatcagcgtacatcttctctaaacatacctatatttcaaacagagtagcaacacatgcttctactagcatgatggcaacctttcctcataagactaaaaacatactgtttcctcttactctcagggtggcactctgaatttccagtttaatggcaccattgctatgatccgtagttgacacctaagacttctagaacagcaaagcctaaagtaatggaaacaagaaacaaacatttctctagtggatcactagggataatagtgaaaggaaccactcccatattcacctcttgattcccagatctataaatcctggctctgggaaaatagcaccatgtatttttgcttatttagagcatatttagcattctgggaggcattacctcagccttgcaaggtggtattatccagctgttactgtaactaacattcaaaaagttattactccattctatcagtaatgggaaacatggcaataccagtgactcccataaacatgagcccattgctgcactcatttgctgtaaaatgagtttcttcaccaaaatcagtgatgcatgctatacagtgatgctgaataaggcatttttgcaagtccatggatgacagtatttaggaagagttttagggagagtagataaatctacacacttagtaaatgtacattcacgcaaaaacaaagtgctgccttttcaacaatggaaatggtccaatggaatcaacctgacactgatggctgcgtgatcctctcccttcccccaagaaatggtgccaaatggagatgcagtgttggtctatttggtaggttgggaacttagcagtgactatagccagactagccttgataagtggaactcccatgttgttgagcccgtgcccaacctccatttctgctgacatggtcattttgtctctgaggcattgtgaaaacacaggattgctaggaaaggctgatggacgtaagaatgggtcatcttgtccacctgatttttgagatactcctctgctgattatccttttggtgagcattgatatggaacatgaatatcttccactctgtgcccatttggagaagtctgcacacaaaatccattcccagacttcttttcacacattttgtaatagtgtctcttctaatttcccaactatcctgtcaagccctttgctggaacccatgactcagtgtagaattgtatctttggccatctctccctccaggcaaaatgaacaactatgtacattatttaatgcactgcccaccaggaaaatttcccttttcctttagggccaacatggagttaaattacatggctgaagctgtctacattcaggtatggtcggtcagcatatcttgcagaaccagacttgaattttttcttctttggacagctcatgataggaagtcctacttgtaaactttaggttcaaagtgacatgaaactttcttaaacacacagcttacaaagaatggagccaggactcaagcccatatctccctggctttagaatctgttcttttacttgcatgttacactgtttaccagtctttcttcatatatgtaagtggcaagttctgtagaaggattcaactcgagctagaaaagacaggaagtcattgtagattgttgtaaaaattatgggaagtaagatcaagagagtgcatcagactgcaaatggggatataaaatacatatggaatataatgaggggtttttttgttgttttttgttgtggtttttttgtttgtttgttttttgagatggaatctcagctcactgcaacatttgcctcccaggttcaagtgattctccagcctcagcctcccaagtagctgggattacaggcacgtgccaccacgcccaactaatttttgtatttttagtagagacagggttttgccatgttgaccaggctggtctcgaactcctgaactcaggtgatccacccacctcggcctcccaaagtgttgggattacaggtgtgagccaccacacccagcctggtttttgtttttaaacagagtctcgctgtgaggcccaggctagagtgcagtggtgtgatcttgtctcatttggttcaagtgtttctcatgccttagcctccctagttgctgggactgcaagcatgcaccaccatgcctgactaattttttgtatttttagtagagacagtgtttcaccctgttgcccagggtggtcccaaactcctgagctcaggcagtctgcccgcctcggcctcccaaactgctaggattacaggcatgagccaccacgcctggccatagtgagcatttttaaatgatagttttcttaac

SEQ ID NO: 94142 - DNA, 22566 bp, Homo sapiens
aggcagaggttgcagtgagctgagatctcgctactgcagtccagcctgggcaacagagggagactccatctcaaaaataaaataaaataaaataacgggttaaatcagcctgttattttaaaacagccccatcaccatgactagaacagctaactctggccaaagaaccccaacatgtagtatgtcctagcaagaatagatgagtagatcagcataaatccattcacactgaatggattttcctacaaaatagggttctcattagaaagcagagaagtatataggtcaggagattgcccaagcaaggtgtgggaggatggagtcctttgtggaatcagacaacaggtgtggaggagtaaggatgaaagtgactagaagaatagcaaagctctcaaggattttatacattacatgcattttctagatgaaaggctattcaaaattttacaaaggtcaaatcagagcaccttcataagccaggttcctctgttgcctatgacttcggacttccctacagtgatctgctgcttaatgatgggcaaagaacaggactagctttgagcaaattatgagggatgccagcttagagtctgctccccttcctttttctgttttcactttcctctagagctgccccctgtatttactaacctttgaaagacagaacccacctgcattcttctaagggcttttctccccaaccaattatgcaaattggagcgaatcagacaaccttagtcacacacgtgtatataaatagctaatagaggtggtgcatatgacatctctcctgagagaaaagccttaaggctaagagattaatttccaattatgaaattgcaaccatccaggaattgggcagggagaactctcccatgacatcccccgccccttccctgccaagaacaccttaaaggcataaagcacttgctgcctgcttggcctgttcataaagattcacacttaccaaagaattccttggtgcaacctcaagctacaaaattgttgcaaagaatatttacatttacattttaagtgcaaatacctagagtggaaaaatgtatttttgatctggatagaggacaatatttttaggtcctcccccactgctagtaaatttacagaattacaatacccataaggagccaataagtttttaaatagtgatgttaaactaagtatgttcaggcatctaaggggtgttatgtgctttacaaagaactgagaatgtggttttaacaaaatgttttcaccccatataccacaaacacatgtgcagtttcgtatttggctcctgagaatatgtcttacaaaataggcctcaaaccaacaccaaaagatgactatctctcctgctatatgactgcatcctgcactgagttagttattcaacaaatgacattcagttatggcctagaaaatatttgtagtagagacggggttttaccatgttggccaggctggtctcgaactcctgactttgtgattcgcaaaatataaaaatttagcctggtgtggtggcgcgtgtccgtaatcccagctactcgggaggttgaggcaggagaattgcttgaatctgggaggcagaggttgcagtgagccaagatcacaccacggcactccagcctgggcgacagagcaagactctatcccaaaaaaaaaaaaaaagaaaagaaaaagaaaaagaaagaaagaaagaaaagaaaaagaaaataattgtttagccttgttttggttttacttcatagtttcctgacttcattcatgagggaaaaggaatgacacccagcagagcaggccccgtggagctcctgcacttgcaagcactcacaccctgcaggaagaactggtatacacccgtacacacaggaaaggccactgagagtcaaacaccaccagcaccaatttgtgaactttggtgaggtgtgaggtattatcgcagggtagggtttatttattgttgctgctgtttactgaggtataatttccacacagtaaaattaaacatttttaggcacatagttctctgaatattgacaaacttagtgatgtgactacaaaagcaatcaaaattctatcacataaaaaaattctttgtgcccctttctagccaatcccctcccctcacccctagtccgtggcaaatgctgatttggtttctatttccattgttgccctttctagaatatcatataaacagaatcacacagtgtatggccatttgtgtctggcttcgttcacctagaaaaatgcttttgagattcatccatgttgttgcatgcatgagttctgtattccttcttactgccaaacagtactgcatttacggacacactacaatttgtttattcactagttgagggacatttggatggtttctagctttacatgattatgaataaagctgctgtaaaaagttgttgaccggtttttcagtggacgtctgtcttcatttctcttagataaatactcaggagtgagattcctgggttgtatgtcacgtgtatatttaactttataagaaacttcaaaactgacttccatagtggaagtccattcccaccagcagtgtatgatagtccagcaatatattatagctctgaatccttgtcagtatcagatgttgtcagttaccttgatttgagccattttattagtaatccatcaacttttgatctaggctgggccataaaattaaactttctgctagctatatatactgggttgaataagtgtccttccgaaatacacattcacccggaacctcagaatgtgaccttatttggaagtaggatctttgcatatgtaattaaatttagatgaagccatactgggctgaagagggccttaatcccaatgactggtgttcttataagaaggccacgtgacacagggacacacagagtagagcatcctgtgacaggagaggcagagattggagctaggctgcagcaagccaaggaataccagaatccccagcagctgttagggccaagcaaggattcttctcagagtctcggagagagcatggccctgaatacatcttgatttcagacttctgacctccagaactatgtgagaatacatttctgtttgtcgtaagtcacccagtttgtgataatttgttaaggcagtcctagaactaaaacactatgaatacaatttacagaatacaacaatacaaataggtttatatttgacttatataaagctttctgaggataaaagcataataattgcttctacaaaattcattctaattagttcaagcatatcactagaagcctaatttattaatatgcataaaaattcttgggctaagtttttgactattctataattcaacatttcactcattggactgaacttctgctaatgagtcaagattagtgaagaccactgtttatcatgaattaagagcagtgcagaagcagaatcccagtggttcctatctatggccattgaatatgtgagacccacattttgcagaatgttctacaaaggattaaaagatgaactttcttttagtttagtcatttgtggtataatgtactggaatgcacctttaaaattttttaattgtaaaattatgtgtttatttttcctatcatgaagtctagttctgaaaaacaagacttctgtggtagagccagttctggttgtttcttaaagaacagatcccttttcagttttagcacaaagctcttccagcccctgacgaagaaaattgtccctctctcaacctgtattagacttccttggggaggcagagggatctcccttcccacctgaccccaaaacctttgaaagaaagaagttggttattctattacactattattcaattagaattccactaatttaataacagagaataaaagaatagttacagtcaatagcaggttgtggtttctgctgctaaaactttctgaaaacctattgcaaatagacagatactgaggcaacaataagacaggagggcaggtgcagatgtgggagcaggaatctcatgttttacattcattcctctatactatgtaaaccagactttctccccatgaacaacataaggtaatagcaagcctatcaggtgaacattagatatcattatatggacttctgggaggaatctggcagtcttatgagcacttttctgtgttgtgcactgtggttaccagctgtaccatgcctatttcacaggaatagctggtgaatataatcataacttccataaaatttgcagagcaaagcaggttgtcatccaaacagagtccaacaatgttcagtgatccgaacaaaagtcaggcccattttcaccactcctgctctctgataagcgtacattgtcctttgagtgttttgggagagcacagagttgacctattctgggggacaaggacttacaagattggaccactctgttccaagtttgggcaatttcaaaggacagggctttggggaattggaacaacttgttcaacttcattgtgtttgggtctcactaaacatagaaaccagcctccctcttaatccccatcccacgtgttgaaaaccataaactcaagttaccacgaataaaaggccatggaagagtgcccagatgcccttcgggatgggatgacccagttaggaggtaacaatgtttggggttgagattgtccctctattagaagcagacagagaaaaagctatgaccaaaatgtttgcatggcttaattaaatatcaacagatatctctattcactttaaagctccagcacaccagacaagggatccgagctccgggcaggagccaaaaccaccattgcagatatgctcccagttttaccagctaattagatgttaaacttacattgtaacaatcaacctgatattattgcctactgcagatagaactagaattctaattaggtcagaattctagctgggattgtgtagatggacaaattctttcagggtagtttgatatcactgctataatttatggtaaagacagttgggatcatactggcaaactaagtacctgcctacactccctcaggcctaaaaatgccattgattatcccaaaaaaactgagaaaataatccactacagtacggaaaaagacaaaataggggcactaacacacaagaagcactgaaggctttctgaaagagtaatcaggcctgatgtttgtagttttaatgtttactttgcaaacaaaggtagaaacagagtctggagctcggatgccaccaccagagagggtggctgttcagcctctctcctgtgcaaattaacctaattctgaacctgtcttggtttaattcgcacaatttcaggtgccatgctaggtacaccacaaatatacctcagggacctcaattgcaaaaacctggactgcaaacgttggggctgcagagttgactaggttaataaattctttctgaggtaaagcagataacacccactaataaaaagaatgaaacttcatcgtcccattggcatcctcgggtgtgcaggtgttcctcagagcaaagcccatggtgtgccccatcgccaattcgtgacaaggcagggggcggggggcgggggaaggaaaaaagcctgggataagaaatcagagaatacaagtcgcttttaaacaaaaaacagtgactgttagagtacacccaccattggggtaacacgcaataatctctcagcatcactgactccagcacagctggtcccctggaaaaggcacgttgccggaaggttttgtgtgtgaccaagcaattggccatcccacgccttcgccctaccagatgggtccctgcccccgggagtcccctccccctccaccctccaaacccaggcagcgcccgcccctgcccccgctgattgacaggccgtgcagctactcctgggagcctggctttcgggggcaacccaggcagaagtgactatctctgcagcagccaatagaagccaggaggcggggcggggaagcggcgcggtcaggtgctccgctccagagttgagcgcaggtgagctcctgcgcgttccgggggcgttcctccagtcaccctcccgccgttacccgcggcgcgcccgagggagtctcctccagaccctccctcccgttgctccaaactaatacggactgaacggatcgctgcgagggtgagtccaggggcgtgggtggcttccctcccgggaacccacactgctcctctgggtccctaaagcaacgtcccctccttgccactgcacatctaagaagcccaggcctcggtgggcgggatgactgggaattgggaacrtaacctacgccgcgaccattctgggtggctaggatggaatcctggtggagaagatggacacccccgcccttgacgtctacccgagctacacaaacctactccttctgcactttccctcttccgtttaatcggtgccccgtccttcctgctctccaagtctgtttgtggaggaagggttggaggggagaaagaactggaaagtactcaatgaaatgtggagccagatccagggattccactgttttgtgcagcattttgtgcacgaaaaaaaaaaaaattctgattgttttcattccccaccccccacctctgtttattgctctgtgtcatggatgtgatgttgagtcttcttgccaaacattcctaagctttagacaacacttaatctttgcttacttttgttggtcccaagaaagcagttttctcctgcttacacatgtgccgaattaatttgctaagatagatgaaaatgaggtgttccatgtagtttatttcctctgcttttagccttaaattacatttggttgatactagccttccttgttttaaaaaggtgggagagaaaattagggggagaaaggacagagagagcaactaccatccatagccagataggtgagtaaatatatttgcagtaacctatttgctattccttgctgcaactgtgtttaatgttccttccagaatcagagagagtattgccatccaagaaatcgtttttaaatatgacatttgagctatcatcttgagaccaatacctaaaacaatttcagtttaagaaatgtctaggtatggtgaaaacacagtttaaaaccagcaaaacagaatttattgccctcagcgaatacccacaatgtacatataccttgtatttctgaaagcaaagcaagcatgccaagtagtttttatttacctgtacctataatacagcaaggtgaaacaggatatatttttgaagtttaaaaatgtcttcaggccggctgcggtggctcatgcctgtaatcccagcactttggggagccgagaagggtgaatcacctgaggtcagcagttttgagaccaggctggccaacatggcgaaaccctgtctctactgaaaatacaaaaattagctgggtgtggtggcgggcgcctgtagtcccagctacttgggagactgaggcaggagaattgcttgaacacggaaggcggaagttgcagtaagctgagatcgtgccaccgcacaccagcttgggcaacagagtgagactccctctcaaaaaaaaaaaaaaaagaagtcttcagcttaggaagatatcaaaaggcagtttcaagagatttatttgtacaagtgtggtttgatctaagttttggtgggtttataaataccttcatgcaggaatgggtagaaaaatgagagaacaaaagatccctgctggatgtgcacgcctgatgaaaactgacaaaatttacatatctattgtttatccatacagcgtcttattagctttcttcaatagaatgaaagtattttagaaatatacacagattaggggaaaagaccagcaaccttgattcacagagctttaaaccagggaagtgcttttactacacctatcaatgataagattaaattttgacaaattttaacattaggaaagtcaacaacaaatttcrgaattatatttctgttaatatttagtttagaatctaattatttagttcaacgaatgctgtgatttgattattaataaatgaatgcrgattacttttcaataaatatatctggatgtcacaaatgttatttcacttcaagaaaccaaattcatctattttcctctctctttagtaatacatcttttgtctgtgattaaccaaacataggggttgaaaatagaagtgtgcatatacatatatatataatatatatgtatatgcaccattattcgatttgctaatgatacttcattgttgctaggttgccatagttgctctagccataatgttaaggatgttcacaggtatttgactataaaaaagtttctgaccagaagtcaaaagtctggatcaacctgaaaatgtttctaaaagttttatgtaaatgatgtcatattttaaaatgctgttgaagagctcacttaaataattcctttgagggatatttagataaattctcagaagtgaaaaagttgtttaaatgcagctaaacttattagctttattattcatttagccccaggtctcttatctaatacggagttctgtgacataattcttccaggctgtgatttatgaatataactaggattgctaagcactgttactctgagtttggggtaaagtatacaaaacaaaattattgcctttaatttctatatgtttattctacagattatcttacactgaactgatcaagtactttgaaaatgacttcgaaatttmtcttggtgtccttcatacttgctgcactgagtctttcaaccaccttttctctccaaccagaccagcaaaaggttctactagtttcttttgatggattccsttgggattacttatataaagttccaacgccccattttcattatattatgaaatatggtgttcacgtgaagcaagttactaatgtttttrttacaaaaacctaccctaaccattatactttggtaactggcctctttgcagagaatcatgggattgttgcaaatgatatgtttgatcctattcggaacaaatctttctccttggatcacatgaatatttatgattccaagttttgggaagaagcgacaccaatatggatcacaaaccagagggcaggacatactagtggtgcagccatgtggcccggaacagatgtaaaaatacataagcgctttcctactcattacatgccttacaatgagtcagtttcatttgaagatagagttgccaaaattrttgaatggtttacgtcaaaagagcccataaatcttggtcttctctattgggaagaccctgatgacatgggccaccatttgggacctgacagtccgctcatggggcctgtcatttcagatattgacaagaagttaggatatctcatacaaatgctgaaaaaggcaaagttrtggaacackctgaacctaatcatcacaagtgatcayggaatgacgcagtgctctgaggaaaggttaatagaacttgaccagtacctggataaagaccactataccctgattgatcaatctccagtagcagccatcttgccaaaagaaggtaaggctgactgaatgaatggtgagctgagactagatgtgcatttgcccagtgtgatcaaatgaacagggatttctgttgctgcgcctttaaagtagactttgcctgtgtcatggtaatattctgggatttaatcctcagactctgaaaagacaaaatctcttttttcaaagcctaatttttttttcctttttcctagaatactgaaattgatgtgctctatgtatgtatggcagtaggttttaaccattttggatccatagaatattatgaaagctatagcctcccttctcagaaaaattgagatggaaagatacatacaaaacttgaatgcatgtacagttatttcatagaagccccaaagccttttataggttcctaatttggacctgcttaacaaggaagctgtggaagataagaaggagaaagagctttggtcaatctgaggtttattttccttataartgtggaaagtaataacaataccttaaactttttacaaacctctcctggaatccttataccaaacytgtcacctcagtattgtctccattttaaagasaagtaaatgacaggtaagtgacctcaaaaggtttaacatcctgaggtcacaaaataagtgacaacatgactcagacatgctctttgacatattttatcactttgcagggttggtcttaggtatcaaatgagagaacagattttgaaaagctataatatttcacaaatgagaattccatccctcagaggggaattaggagaatcatatgaaacagcgaatgttaaaatatgtgtgtgttttacacacacagttttcagcaaacagcactttttttctggtttaagaaaattagctaggagtggttgctcacgcctataatctcagcactttgggaggccgaggcagcagggtcacttgaggccaggagtttgaggccagcctgggcaacatagcaagaccctgttgctaaaaaaaaaaaaaaaaaaaaaatagcctggtgtggtgacacatgcctgtgtcccaggctgaggtggaagggttgcttgagcccaggagttctaggttacagtgagctatgatcatatcactgcactcctccttgggcgacagggagacacagtcgaaagaaaaaaaagaaagaaaaagagagactgagggggaaagagagagagagagggagggaagagaagggggtgaaagagagagagaggagggagggaaggaggaagggaagagggaagggaagaggaaatggaaggggagaaaattacattaacccttcgatttcctttataaaattggaatgatgtcctcttgttgcggtgcagaagataaggatgcaacctcagcaatggatttgaaaaacaggaggatgaaagacagtgcctgggtaaccgcatttgtagttatagggagtactttggcaacacctccagtgttttcagatgtttccattttacaaactgctttccacctccagcctcttttcccagccctcacccacccctcaccatgttttcttgtctggagattcttcgtgtctgcactcacaactaccagaacctagccatttttatttgggtattgcagtaccctagacattttacatagtgtcactaattaatatgtgtgtgtattgaagtctttagaggtttctggttctataaaatgcccttccttaattctataaggtgaacttacaacagaagattatttcctagtttcccctcccaaaattgttttccccaaggggaaaaagaattttttcttatgttcagctctctggtttttcacctccgtagcaagtctgttgcccatggctgatggtagctatgagtattttgttctgagtgcctctcctcccttctctttaggtaaatttgatgaagtctatgaagcactaactcacgctcatcctaatcttactgtttacaaaaaagaagacgttccagaaaggtggcattacaaatacaacagtcgaattcaaccaatcatagcagtggctgatgaagggtggcacattttacagaataagtcagatgactttctgtgtgagtatgttacagtatttctttccattctgcattactttttgctaaaatacaacagtttaaatacataatacagcagtttattgattgatatttttactgtctgttacttgaatattaaggaactacaatgttttcgtacttatctaaaaatgctttttttagatattggtccttgatatgtaaaagatatatacaaaatgtccctttaggtagaattgggtttctatcatgtttattgattaaaagaaaagcagatgcctgaacaatggcatttgtagtgtgctcgtgactcatagtggcagatgtatacagatacatggtttctggttcttaaaacggtttttggccaggtgcggtggctctcgcctgtaatcccagcactttgggaggctgaggcgggtggatcacgaggtcaggagatcgagaccatcctggctaacagggtgaaaccccgtctctactaaaaaaatacaaaaaattagcctggcatggtggtgggcgcctgtagtcccagctactcgggaggctgaggcaggagaatggcgtgaacctgggaggcggagcttgcagtgagccgagatcgtgccactgcactccagcctgggcgacagagcaagactctgtctcaaaaaaaaaaaaagcaaaaaaaaaaaaaaataaacagtttttacatacagataatgatccataaaccaatgttcatatttttatgtcttgtgcaggtagctcttatgttagagggcttgctcaacaaaggactgctatctttggcaagatttgtattttaaagttaatataaattcaaagggccctctagaaatggtttgctgaactacagttacacaatagattggtcacctctatttttgatagaaaaccttaataatactcaatttatattatgtttaatgattcaataattaattaaagattgaccactgtatacctaagccagaatagttaagccctaatgccccaaagcagtggctctcaaagtgtgttccctggcccaccagcatccacatcagctgagagcttgttagaaatgcaaattattggctgcataaatgtcttcttttgagaagtgtctgttcatgtccttcgcccactttttgatggggttgtttgtttttttcttgtaaatttgtttgcgttcattgtagattctggatattagccctttgtcagatgagtaggttgcgaaaattttctcccattttataggttgcctgttcactctgatggtagtttcttttgctgtgcagaagctctttagtttaattagatcccatttgtcaattttggcttttgttgccattgcttttggtgttttagacatgaagtccttgtccatgcctatgtcctgaatggtaatgcctaggttttcttctagggtttttatggttttaggtctagcgtttaagtctttaatccatcttgaattgatttttgtataaggtgtaaggaagggatccagtttcagctttctacatatggctagccagttttcccatcaccatttattaaatagggaatcctttccccatttcttgtttttctcaggtttgtcaaaaaaacacatgaaaaaatgctcatcatcactggccatcagagaagtgcaaatcaaaaccacaatgagataccatctcacaccagktagaattgcaatcattaaaaagtcaggaaacaacaggtgctggagaggatgtggagaaataggaacacttttacactgttggtgggactgtaaactagttcaaccattgtggaagtcagtgtggcgattcctcagggatctagaactggaaataccatttgactcagccatcccattactgggtatacatgccctacaaaggacatggatgaaattggaaatcatcattctcagtaaactatcgcaagaacaaaaaaccaaacactgcatattctcactcataggtgggaattgaacaatgagatcacatggacacaggaaggggaatatcacactctggggactgttgtggggtggggggaggggggagggatagcattgggagatatacctaatgctagatgacgagttagtgggtgcagcgcaccagcatggcacatgtatatatatgtaactaacctgcayaatgtgcacatgtaccctaaaacttaaagtataataaaaaaaaaaaagaaatgcaaattattgggcccaaaacagacctactgaatttgaaactstgaggccctggtgaaacacacaaaagtttgagaaccattgcccttaggcatactttataaataccatctacttgatcaagcatttatgatcggggctaccactacaaaacaaagtccctattcataggaaagcttttacataagtcacaatgacttaattttaagtctgaatttctagtaagaagtgtgatataagataattatctttgccttcatgagtgagagtctaggtcccaacttctcatagaaatgaacayagcaatcatccagtcaattacaaagtatataatgatatattcccagtgcgactatcaattaatgaaatagcatagtaccctgtcagataattactagtgattcataatttcagtgctatttttacttaaataaacctaaaagaatcatggcatctagaatgacttctttagatacgcttttcctggtagatttcaaattactttgaaatgactaggggtcagtttatgacttttcgaaaaactgatttaggattttttcgaggyggatggggcagggagygttcctattgcatagttccctgaagcaagtataagtattagagatggatttactagtcattctccttgccacctttaagataaagcctgtcagttttgcttgggtgccatcttatcagcagtagctcctttgccttgtaccttgataccatgctaagcacacatgactttgaaatccagctattatcaatttcgtatccattttatgtcacttgacacatgtgtcagaagacccccaagtttttaccttatttgtagccacactaaaagcacataatgctaagttggatcctgattagagctaccaaaatcaggagtttcctactctcctccactctgacctttgttttttagtagtagattatagctgtaagtacaggtttgatttttatggtttcttttgcttttctttatgtatcgtattttcccttttattggtaactatgagtttattggcttcagattaagactaagagcacctttatctctttatctttagaataataattggaacatagtaggtaccccataagtatttgctgaatattactttgccaccagtaaaaaacaaaaacaaaacaaacaaacaaacaaaaactctaatttttccctaacttggctctgctttgttctttacccttcttcccctgctgcttaagccactgttggcctgtaagaaagattcacaaccatttgactcttcaattcctgaagagaattgtgatgtggacaacagcagagattgtttgtcaaagattgttttatgtttacagtcaaactagataagatgtgcatttaagttcagaatttgaccatacaacaattatgtccattttaatgcatagttggctaactttttcacatattttctctttacagtaggcaaccacggttacgataatgcgttagcagatatgcatccaatatttttagcccatggtcctgccttcagaaagaatttctcaaaagaagccatgaactccacagatttgtacccactactatgccacctcctcaatatcacygccatgccacacaatggatcattctggaatgtccaggatctgctcaattcagcaatgccaagggtggtcccttatacacagagtactatactcctccctggtagtgttaaaccagcagaatatgaccaagaggggtcatacccttatttcataggggtctctcttggcagcattatagtgattgtattttttgtaattttcattaagcatttaattcacagtcaaatacctgccttacaagatatgcatgctgaaatagctcaaccattattacaagcctaatgttactttgaagtggatttgcatrttgaagtggagattccataattatgtcagtgtttaaaggtttcaaattctgggaaaccagttccaaacatytgcagaaaccattaagcagttacatatttaggtatacacacacacacacacacacmtacacacacacggaccaaaatacttacacctgcaaaggaataaagatgtgagagtatgtctccattgttcactgtagcatagggatagataagatcctgctttatttggacttggcrcagataatgtatatatttagcaactttgcactatgtaaagtaccttatrtattgcactttaaatttctctcctgatgggtactttaatttgaaatgcactttatgsacagttatgtcttataacttgattgaaaatgacaactttttgcacccatgtcacagaatacttgttacgcattgttcaaactgaaggaaatttctaataatcccgaataatgaacrtagaaatctatctccataaattgagagaagaagaaggtgataagtgttgaaaattaaatgtgataacctttgaaccttgaattttggagatgtattcccaacagcagaatgcaactgtgggcatttcttgtcttatttctttccagagaacgtggttttcatttatttttccctcaaaagagagtcaaatactgacagattcgttctaaatatattgtttctgtcataaaattattgtgatttcctgatgagtcatattactgtgattttcataataatgaagacaccatgaatatacttttyttctatatagttcagcaatggcctgaatagaagcaaccaggcaccatctcagcaatgttttctcttgtttgtaattatttgctcctttgaaaattaaatcactattaattacattaaaaatcaaattggataaaacaatgttttctttctggtagcgcataataacagagcacaagcatcttttagatttgagcatttgaagattcaaagttgcgaaagagcacaaaccatattaggtaaaatattggccactcgatccttgaaaagaactgtgtggagcctggaaaaaaaaattaggaccacatgtgagatgtttacaagacacccagaacagtggtaaagtgtgcatactagaaaaagcagcaaaataactctttgtggtaacaggtatcaaaacacgggagccgagatgatatagctctgtttcaagaaatatgtgaatacccacctaccaggtgctcmgtggaatcaaagatgaatccaagttcacaaatagacttctacttccaaggtagtacttttgacctgcctggtcatctcagtcttttccattccaacaacctaaggctgtgctttagatttctaagtaatcaagaagtttgggagaggcatagtattacatgtggcttcttagaggaaagaggaagccctgaaaagaaagactttccttgaagaaaatagcattttacagacacatggatagtactgtgatttcatgtatatatatgtaccaattggctaatgagtaggtaaaattgtattactattccagaaagaaaggacaaatgggatgtgaagaactaaagtgacatagttaaaaatttaaccaaatttaagtgcttcctaaaatttggtgaatgtcttattttttaaaatgataataccaataaggaatgttggcacataattcccatttcattataaaacctcttaatagaatagaatcaaataattggaaatggcctatagattaaaaagctgagaaagtatatggtaggtagcaaactccccagaagtatgaactctggattagacatctcagaatacatgagcactcatgttggcttgctttgtagctatgaacttaccctgtattattgaaatgtcagcataatgactggaaggtgaaattggtccattttagagcattactattatgctatctgtccatttaaattaataattgcattaaattcattttagaaggtgctattacattagtagtaagaaagtaaattcatatataaatatttgattatcagatggtttacttacagatacttattttcctgtaaaataggagagtttacctgaagaaaaataaaacttttaacttttctgggaaaatcacatcacttatcatcattgacatctttttgttgttgttttgtcttacctgcatgtcttcatggtcaagctttgtatgcagtgaactcaaattagtacatggaaataaaagactagctaatcttactaattgtaagaattttagaaaggtcagaggaatggagcttctctctgtgcccccatcttttctcaacatcctcctacatgagccattttgtaaagtttattaattgttaggattttttaaaattcagtttgtattttacaatttcttctccatcacctgcagtttaagtttaaattgcttttcaaaatgccctgtgatcttgtaagtatcctattattagtcttagtttcttacaagaacctcttatttctagaaaatctaatgaaagaccccagctcttctagttctcacattttttttttctgtttttcgttagctgaaaaacatacttgataatcatagagttgggaaagctctaagggatcattcaacccttgatttaacaaaagctcttgcaaagctgtgaaatttgcatgacatattagtgccagagctggaggcaggacccaggttccatgactgagtttatactcaaagtcaagctgcagtctaagttggtttacttccggttcatcctaaggtagccctttgagatcctacccctagcaggaggtggttaaccgatgttcccacccttggcaggctctctggtccaacttttaacagtcagctacacaaggcttatggctttctttcagactggccaatgcccaagggcaatgccccaggacaaaatagtcctgaatgctagactctttcaggatttcagtcttctctgaatgtcaccctggtaattcctcataaccttgtgggcaatttgattctttttaaaaagacgttttaaaatgcattttgacttccaatcaggacaggatagcatggtcctgcttttccttgttcctccacactaagcataattatagagcctggaaatggtgcaagagactctgaagggtggtaataaggctgagagctgattagggaacctgggctggaaaaacagcacagcggcagggcttcacgtgtttctcacctaacagaaggaggccacacagagcctgcatttcttaacccccacctaccaagacagcagcccagggaggtttattcctcccctggatcaaagaagaatctctggtaacatcagggcagcccatgtcatcagcaaggggaattgccataaccctccaactaggaatattgattgggagtcccattaaagagcagccaagaggagcattctccttcccaccactgaaacactcttccactgagtcatagaggtggacaaacaaaatctgcaaaagagaccaagctacagcagacagtctggggaacctctttgttcccatgccctgagactctcctcctctacccagagactttgcaatgtgcaaggcgcaccaataaaggaatcccactacaccatttccctaccaagagatacctggcagctggcctggggaaaacccttctgctttcctcaggcaggaccagcagagacaagtgggaattccagcagcaccacacaatccaagcagaccataatccaatagcactccaaaggctgtgaaaattaagctgccattggaatcacagcccacaaaagtaggacaagatctacatgctaaacctaaactgtgtgactttctgctaaaataaaaaatgtaaagggaactcatcatcttattacataatatataagatatccaggatacaactgaaaattacctgttatacctaaaacccagaaaatcacaactacaatgagaaaaaaaaaattgacaccagcaccaaagtgattcatatgttgggatcatacaagaagaattgtaaaacagttgtcataaaaatacttcaatgatcaacacaaatcctctttaaaatgaaaggtaaaaaatctcagcaaagaaataaaagctattttttaaatggaaattataaaactgaaaatatagtggcatttaaaaaaactacataggctcaatagtacaatggaattggtacaggatagaatcagtgaacttaagtacagaacactagaattcacaaaactttaacaagtctcagtgatctgtgggacaataagaaaaaaatccaacttccatatcaccagggttgtaaaaggggaggctgaaagactacttgacaaaataatgactaaaaacttctccaacttgactagacacaaatctacagatccaagaagctgagtgaatgcccaaacagaataaacccaaataaatccacacctaggtacattgtaggtaaacttgttaaaaagggccccccactcaacaacttaaaagaaaaatcttgaaagtagccaaagagaagcaatgcattacttatagaacaccaagtctgatgacagcagattcttacctgaaatcatggaggccagaggcaatggcacagtatttctcaagtgcttaaaaaagaagtgactttcataaattctgtataccatgaaactatcctaaagaatgaaggggaaataaaatcattctctgaactagagaaattaaaagaagtggctgctagcagaagacccacttttaaagataggtaaagaatgttcttcagacataaaggaaatggtaataaaaaaagaatcttagagtgtcagtaaggaagatggaaaaatgagaacagcagacacttgagtacatacaatagactatcctttttctcatgagtgtaataaaccatatttgatgtttgaagcaattataatgccacctgatattcatgccaatatttagaagcatggaagttaatgggacctaaatggaagtgaggtttccacacttcattcaaagtggtaaaatgcagataccagtagacagttataaatcacaaatgcatattataacactcagaccagccaccagaaaaactatacaaagagacacactcaaaaacactacaaataaatcaataaggaattaaaaattttaacataacccacaggaaggcaaaagaagagaagcagaaatgagaaccaggggaaatcctagaaaacagataataaaatggcagaattaacataccaataattaccttaaatgtaagttatctaaatacatgaatctcaaaagacagagattgacagaatggaccaaaaaaactgactctactatatgtggttacaataaaagaacttcaaattcaagacacagtaggtcaaaagtaaaagggtgggaaaagttgtactatgcaaacattaatttttcttttcttcccctatacaataccaaygtaaacaaatattaatttttgaaaagcaagaatggctatgttaatatctgacaaaatagactttagagtagaaaggattactataaagaggattttacatgatgataaaaggaataatgataaatttatataatatataatatttcatcaggaatacataacaatcctaaatattataaatcctaaacagcagaatcttaaaatatatgaagaaaaaagactgataggactgaaaggaaaaacagataaataacaatttaattgggattcaacaccctcctctcaataacttctagaatatctagacagagaatcagaaagaatatagaagatctctacaacacaaccaacaacatatagagagtactcgatcaaacaacagcataactgacaaaaatacacactaggataaacatttttctcaagcactcataaaatattcaccaccataggtccattcactatatcctgggtcataaacaaccctcaacaaatttaacagaattgaaatcataccaattgtgttttctgaccacaggggagtcaaactagaaatcaacaactgaaagataacaggaaaatctctaaacccatgggaactaaacaacatatttaaaaataattcctgggtcaaaaggaaagtctcaaaggaaaaatttaaaactacatagaatttaatgaaaacacaatatataatatcaaaatataagatttgaatcgaaagcagtactgagagggaagtttatagcactaacggcttacataaaatgaggaaaggtcttaaatcaacaaccttagttcatacctcaagggactagaaaagaagagcaagttaaaggaagcaaaaggaagaaaataataaacataacaatagaaaccaatgaaattgaaattagaaaaacagtagagaaaattaataaaacaaaaatctactactttaaaaaattagtaatattgataaacctatatagcaagactgacaaaaaaacagccacaatcacaatatcagaaatgaaatagaggctatccatgctgatattaaaaggtaatggagaactattaggaacaagtttacctcataaattcaacaacttaaacttgaaaaccacaagctactaaacctcaaccaagatgaaacaatctgaatagccttacacacaataaataaattgaattcattattaaaaagctccaacaagctaaagaaaaatatatgatcatatcaatctatggagaaaaagcacttgaaaagatccaatactaaggtatttttttttcgttttttaaagaaagaaaaaaaaaacctcttagcaagttaggaaaggaaactatctcaacttgataaataacatcttttttaaaaaactgcaactaacatcttagttaatggtgaaagactgaatgctttctctttaagattgggaatgggtgaaggatgtctgctatcatcactcgtatttaac

SEQ ID NO: 94143 - DNA, 210383 bp, Homo sapiens
  misc_feature (1)...(210383): n = A,T,C or G
ataagtcagaataaaaggtatatgctgtatgatgtcatctatattaacttacagaataggcagataaaactcaaaacaatgtctctgtgtttgccttttggttggaggtagtatgactcgtaggaagtatgaaggtattctctggagtggcagaaatgatctatatcttgacagtggtggtagttaaaaagtgtataattttgtcaaaacacatcaaaccatacacttaaattctgcacattttattgtatgtatatatcttaaaaaataaaagtagcaaaaaaaagtacctcataaaatgaggaactgcctttggttatactatctaaaggttggattttaactatacatgcagtattcttgtaaatcagaccaatttagggttcagtagaacttggttattggaactctcggaaagcttctattcattcttttgtctttgttgcattgttgttgagacaaggtctcactctgttgcccaggctggagtgcagtggcctgatttcggcccaccacaaccttgaccacccatggctcaggtgatcctcccacctcagcctccctagtagctggaaatacaggtgcagaccaccatgcctggctaatttttgtatttcttgtagagatggggttttaccttgttgcccaggctggtcttgaactcctttgctcaagctatacacctgcctcagcttcccaaagtgctgtaattacaggtgtgagccaccatgtctggcttattcattcaccgtttaacaaaaatttatttgttttatcaaatgtttatttagcccaacgctaccatctactatctgggtgactttgaacaaatgactctttgattttcagttcactcatttgtgaaatggggatagtaatagtacctacttcatgaggttgttgtagggactaaataagttgatacaagcaaagttcttagaatggtgctggtgcatagtaagggctagctaaatgttagtgattaatattattatcctcagttatgtgccagccttggtggatataaacagtaataagacatagaaaatttatagtctagaagagaggatcaacaataaacatgtgaatagatatgactaaatctgcttagtgcaataataaaatttgaaaagtgctttgagaacataaatgactgtgttggcatggaagaatccattaaaaatgaaaataatcagccacctaaatcaaatcaagttctgatagtcatttattgtttttcaatactgtggttactaagattcctccttttcttggcaactgaaacttgcaactctcaaggctcaggcctgtgacctcttctattctgtggcttattcctaggtgatctcatccattccacttgtgatagtcatttcacatctctaagcccaacatcatactgaactgcaagtgcctgtgacatctcacactgattgtgtctacatccaaattctccctccacagccccctaatccttctctcacagtgttccccatactggaaatagcagctccattctccagctgcccagtccacaagccttgcagttttcctcccctcctctctacttctattataatgtctcatacccagtaatcaccaaatcttgaattcagtcacttgtaaaagttctatgacctcctttcacctagaccattgcaatatagccaaactgatctccttgtttccactctcccttctccaaaagctattctcagcacagcagtcaggtgatctttccaaggcattacggatccataatcttcacctgccttaaaccttcaggtgggattccttcacaccatctgtttcatggctgacaaggtcctagatatctggctccagactgcctctctgtcatcctcctctaccactctctggctccctttattccagcctcactagcccccttgctgtctctccaacatgccaagcaaggtcttaggcaagctctctcttgtctcatggtctttgcacgtgatgttccctttgcatgggatgaccttcctccagatagcctcatggctcactctcttacttcactcatttatctgctcaattgttgccatcctagctacaacagctcctacacttcaatctctaactgcttcccctgcttttcttcctagcatctgacattctttttttcttgacacggggtcttgctctgtcagccaagcttgagtgcagtggcacaatcatgcctgacttcaacctcgacctcccaggctcaagcaaatcctcccacctcagcttcccaagtagctgggactacaggcatgcaccaccttgcccagctaatttttgtatttttttgtagaaacagggtctcaccatgttgcctaggctggtcttgaactcctgggctcagcaatcctcccacctcagcttcccgaagtgttaggattacaggtgtgagccaccatgcctggccctattgtattagtttatcatccttgcttaaatataaacctgatgaggcagagtctgtgtgtgtcttattcatatctccatgacctagaataatacctggcacacagtagatgctcaattcatatttgttgaattaatgaatgagttactatcaccttagtttatgcagagcttcacagtttacaaagcagtcacatacacaatatcttaataagccctctaacgatttgtggtataggctttgttatatccattttatagatatgttgacagtcccttgctcaaggtcacacagcaattagaagtaaaagtcaaactctggtgttttgccttcaagcccagtttattaatcataaatataaaatactattagcaatttattggtgttgttcaagacatttgcatctcgtttaaccttcacaacaatgctttgaggtgggtactattttgcagatgtggaaactaaatccctgcgaagtaacataccctaggtcacagtgctgaaaaatggtaaagtcagaatctgggtcctgacagcctgattccaggagcttattctcaacagatggacccactaggcctagcctgtaaaataaagagagttaaggaaactgcaaacataaatggacaagaatcaaatttgttccatggggactttctgccattaataaaatttttgctcttgcttcatgtagtaaaactttcttctttttctttgagatcataatgtggaaagcaattgtatctcaaatgcagttcattatattgttttctggtttttatccatctttgaaatgtttgaaacgtttgtttctaaattgagaagtcacttaggaattttaggaattgtgggcagagcttacggatttccagcagtctgtctttcttcctcctttggtagctttgtgctgccttttgtggcatgagcataggctagcgttccctctgagcacggattccacctgctctctcaccgccctatgacatgccttgtttcatcaattctcaccttcattgtatcacataacctacattgcagaacactcaatttattttcctttctttttttccttttttcaaaaggaagaggctatttgattggatgtgatggcaccagaggcagaaatgtggcaaaattttaaatggtgagaaatccatctcagctacctggattttgagaaacaaattgtgatttctcgactcactttgaattgaactgtgcaagttagatgaactaaaaaagcttcattgacttgtctacttgtccgcttgtctccaagtcagtcaagtgtttgtgaatgctgcctgttttctaccctgtataattattcaaatgattaacttaagggtgaatataaaggtatataaacataagtagatgcccttgaaataacaaagccctcagaccttacataagcaggcatttagaaggtgaaaaacaaatcaggtgtgttgattgttcctaaagattgtaacagaaagattctaagcacttacctgggaatatactgtgaagagagcatgtggtctattgatccaggcatccctaatacctggcacatagtaggtactcaacagagtaagtgcttaacataggaagtgcttgataaatttgtgttgaatctatagtactctgtcttttattgcctagtcatgaacttgtctcaacacacgtgcatacacacacacatattaggttgtgagctcttagaggagaaggtctgtcttattcaccactgtattctctaatacagaaccaccaaataagtggcaatcattaatgatcatcaaattgaagtaaattctatgacttgttttctttatctcgtttccctcaccctatcttgtccatttggctctcaagccagaatgcctgaaatggctgcattaatctaatcaaatatgtaaaagccaagaccttgaaatctttcaaatcaagctctgaattacatttttaaatttaccctggccatttcataagtagatttagcaactagctaactgctatcccaggaggggaaaaaaaaacccataagcttaatgaatttggtcagacatacagtgtaacagatgtccaacatgctgccatgaacttaaatcatagatatgatgcctctgtttggcatggcaaaatatattagaactgtttcatcagtcactgggcaacttgctagatggagggggaataatcctgaaaaatgcaggagctgcttctaatagcatctaaaaggatccctggagaaacacagataatctgcttgcagtgattcatcaagttggtcctttgtttcattaatttgagtgtcaagtgcaaccatacaataaagaattgccaagacctggtaagattctcctctggctgctgcttttcctgccctaacaactggtactattcatgcctaaagcacaaactgaataaatagtttcaaggctggcaatgttggacagtgcttcctattttgcttttccttgaaaggctaaatcgtgtgctttcttgccctctcccaaacacgttgcactgatattcattattgcaccaataattttaactttcttaatactaagtatggaaggatgcctcataagataaaaatagttcctgttgtatcatcagtccagcaatagattagggaagattaaaaatggattgtaatgccttcttyggccttgagaaagctcttattgtgcccatggttcagtaggcctgctgatcatttccatcttaatgtaatctttaacattacactgctacaggtgagatgttaagtaatacattaagacaactattttcactgagcaatttcacaagaaatatgtttttagctaaattagacatttaacaaatgccatttgtaattcaatgcagaggagacagcatccttaaaacaagctattgatgtgactttcccaacataaaacaatacttatgtttttttaattttaattgaagtcctgaatgtgaaactatcgccgtcagtgcagtagaccaacggaaagcaccaaataccttaggattatgaaataagccatatgcagttttatctctagcagacagaaattcttcatccaaattaggaagaatctacaggtcaagttaatcatgtagctgtgacgtgctgaatgtttttaaaactttaagatcatttagatgaacactaggaaactcagaggtcaggcagaaatgtaaattgtaatattcaatgaaaataataaatgaaataattgagatgaaatattatctaaagaatgcatgagaataactgaatctgataaagtaaaattaaaattaagagagaagagaaaataagaaagtgagcaattgaaaaacggaataataaataattttttaagaaaaataatttcatcatgtatttctctatgctacgtacataaacgcaaacgctataaatagagttattgacatttgggaggttgatttgtttttatcaacatcgcaaaacagaaaatttaggttgcagattttcacatggctatcacgttcagaatccaatcaggttctccttctttactacttgatgacttctttaaagataaataagcccgcggaccaagaagtgggtacactggctcggttaactctctctccccagaaatttcactactgaaaagattattatttgggggcggggaaggggatgtagaggtctttaggacccagcaggcggcggcaggcggcagttgtgtagatcgctgagagactacgagggtccggttcagttttaattctgtctctaatctcygcaacagccgcgcttcccgggtcccgcggctcccgcgcgcgatctgccgcggccggctgctgggcaaaaatcagagccgcctccgccccattacccatcatggaaaccctccaggaaaaagtggccccggacgcgcgagcctgaggattctgcacaaaagaggtgyccaaaatgaagaccctgatggtgagtcagttgtggcaactccacckggcaaagagggggatccccgggctcagggtccacgggacgcaccgtggagactccgagacgcctaaccctgggccgcgaggtcgcctgttacaaagggacaactttctacccgctccgcgttccctcccgattctccagctctgcctggctcggaatcccagagccaggatgggaactcggggttgcctcgcctcctagatctccggcgagaggtccgagggggtggcggagagctgcaggagcgatggaggagtggrcagattgctcaagggatgggggtgcccaaaagcaacagcctgccaaaaactaagagggacggggaggggggacctttgcagactttcttcgttttcttagatttcaaacttgcaaggatcgcaaggatccagggccccaggaaaggaggggtgtgaaggactcaaaattccagcagcttggctggggtggctgcgccagacgggcccttccccaaagtgcaaacccacccctgtcctcggccccggcgcgctccctccctcagcccggggccgtacaccacctgccctctaccgagagatctgggcggcggcggccgaaagcagcgacgcgcccggagcatcccttgcgatacgctaggggacggtgctttctctgtcccagttgcgtgcggcggggctggggcccaggccgccccaaatctcccccactagagtgaccaccgcacagttgtccccgctgggcgcgctcctccggtgtctgcgctcagccgctctcctcttctctctcccgcccgccygcagcgccatggtctggcagtgtgtttagcgctcaccaccatgtgcaccagcttgttgctagtgtacagcagcctcggcggccagaaggagcggcccccgcagcagcagcagcarcagcagcaacagcagcagcaggcgtcggccaccggcagctcgcagccggcggcggagagcagcacccagcagcgccccggggtccccgcgggaccgcggccactggacggatacctcggagtggcggaccacaaggtgacagcatgcccgccagcccgctcgccactcagcctggggatcccgcacacctgagccttccccctttcccggggctgggaggcgctgtgagtaggtgccgttcgaaggctggaggggagtggacccgctggggtagggtgggctagttccaacttggtatgaattcttatttggagaaagacacaaagttttgtagaaaataggggtgaggtgcgtggaccccaaagcctaatttcccagcagaaatcggccctggaactagaactccctgatccccagaattgcagctgcggatggaggtccggttcctgaagcctcgggtttggccgccgagtcgctgcctggtgggaggaaactggggttggcgcgggtaccagcctgagcgttcctctgacccggaaccggagggtgagcgcagccagcccgcggccactgctcgggatccagcgttcccctctgatctctccagcgcattgctttgggctgaattctctcagccctggggagtggtgcccaggcaggcatggaagacttgagggacacactcagcttccattggtttgaaactcatcattgtgagcctgtcttcctctgccttccgggaagctgctgcatggggtggctaataactaataagatgaattttttaaaattgggcctcctttccctggaataataaatatctggtttcagtgtgtgaagcctctgggagaatcctaatcaagtttgctgattctgaagatattttaatacagtttaaatgtatccgccattatttgaagctgctcgtatgtttttattaaaacacaattccactctctatctgctttataaagctagaggatttcttgaaatctcccaattattctttttattttactaaattttrtggttgtgaaccgaagtaatatatagtagatgctccttttgtgtgcaaaggtcactctaaccatgcgtgaaaaagccaaactttttaaaaartggcattcaaaatattgccacacacctgtttaatgcataatgctaaggatttgaaaggtataaaagaatttaaggcaggacccagtcttacggatctttaaatacctgaggacagaacaatataccatgaaatgtgtgtaratggataaaccaatagataaaaatgtgtaataaatgctagatatgaacagtactgtaggggtgcaaaaatgagaacgatgacttccctggaaagatcaaggaaagcttctttgaaaaagtggaattttgcaatgagaagaattcagggaagcaaaaaaggaggaatcaatttcattaggaagtgattatttatttatttatttattgttgtggcaggagcaggggttggggggtaggggtgttagtagacttaaaatccaaaagcagaaggctatcaattttacaattacagcttttgtttccgctcttagttgttgattgattacatgctttgtatctgcatgtgcaagcaaccgataagggctggagttctaggaaagtttagacattagcttctgactgtagatggctgtggtgtttatgtgtaactggtgtatgatggatatactgagatcatggatttccatggctattgtttggtggaaattactgtctaacacttgtgaagctttgattaatggcagcatcaaaaggtaaatttgctgaaagttttgatcagcttttgggaagagatttctaatacttttcttcctgtgttcttctgctggacagacaccagctaagaatattgagagcttaatgcaaagtataataacctaatgcttatgttcaaaacaatgtttattgaccacaaatatgtttgatttcaatttttgtttatcagagctttattttattgaaacaaagaacagtccttttcaatttggagggcgggatgttgataccctacatgggaaattgaaatgatatgtagtaaaagggttttacaaattgtgaagtgctatatgaatgataaatattgtgtgaaagtcattggaattcctagtagaagaaggtctttggagataattatgaatatcaatgaaattatctcatggaacaccaacatctcacaaaattctatacccaaaggttttgagggagttcacgtcaccacaagcaaaggaagaaaggcatatcttaaagtctatgtcttctgtttagacattatcccaawtgtcccactgaactaaatgtaaacttctcagaatgccttaactgattctctttaccgctactatttatctggctgcaaattgggcagagttcccttacagatggtcatatgaaggtgcatgtgtaaaatgttgtttatgttctctccaaaagttcctgtttaattaggtttatttgatatcttcctatattcttgcataggcagaggtggaagacattgttagaatattgctaggaatttttttccaattatgacaggggagggtaagaaatgaaagcctttctattcttattatattgccagatgatactcgattgctaatttttttttaccctcacatcaggcctcaggaaaatgatggaatatgctggatgtgatgaccaccaagccatatgctgctgcgtattgaatcagaattccaacagccttttttatctgccattgttttacatagtctggagagagttacagatattatttaggaaaatgttcacacctccatagctggaggccccaaagactgataaatatgtagtgtataagctcagttacatgatgttgttaacattaacagttccaagattaaattcaacaggtggtcctaatccccagcacctgaatttcacaaattacagcctgtctgcaatgatggtcttgtctcatatggctgcagactgaattactgttgagattaaatcactgtgtgcttttgttgaaatatatgctgcaagtcaagtcagtgatgagcggcatgtgttgaggcttaaaatatcacttttcatggtcatattctctacttcctctttcacaaactatgtgagctgcaattgtaatttcagtatcactaaatgaaggctacatggagtttcttgtcataatgaaggcattttctgtttgagtctttctcttctttcccaatccctttccccagaccaattcccacaaatgttccaccaactcatttccatcgtgttacatgtctgtgtcttcaggtactatatctgkattctaacattactctctcagtcccgatttgtggaagccaatgataacaagattgcttaggtacaactgaagaagccaattttcatggctttgggaaccttctgcatttagaactgtagcctaatgtataaccaagctaacacacacacacacacacacacacacacacacacacacacacacacacmmcacacattaaatcaagaaatactcagaggaaagctccaagtcttatagcagaatggaagggaacatggaacacagttcagtttccagtctggatctcgtctgggtagatgaggtcatttgccatctggtagaccctgtgaaatgaaaccgtgagctaattcccatttctaraggacaggctcttatcacagaaggcccactatcacccagactgccctttactgaaatggcttatgaaagggcggtgatcaatggggtctacagctaagcagctatctctttgcttcagaagtagcccccagggatggattttacacataccaataacatacttgtccttggttctttccatttttaggcactcagttattcagacaaatcaaaattgcttagtggtaatagtactattactattaactggtaactatctggttggagtggtaagacaagtgaatgcaagaactgaaaaatagtcatccaaaaccggaatttggataaatgccatctaacttattttaaaattatgggatgagtattccccttttagaaaagtatataaattatcaaacacaagtttacataatttatttgaccacattttatgacatttgagttgtgaatgaatgactgaaatgaatgctaatcatttgaatctcaaggaaattcaaagtgagctaattttcaatgctcaggtattataagatgtaatctgccaatgatgatgaaaccctgttaccacaaagcatcaaacccccaaaatcagaaaaagaacactattttgtgggtgaggagttgcaataatgtagtcacttttaacaggataaatgttttttataacatttattaaaatacttaaccttccttaaatctgtgacagccaggataatttttccaacttcccacatgggtaatttcaagatatcactatcctcctgtaaatggcagatgagtttgaccaggctcactcttaaattccaggcatgctggctttcctgctgatctgtgaacattcattctgcctcaggacctttgcacatgctcttctctcttcctggaaagctcttccccaaggtcttttgcatggttgattccttctggtcattcagtcatcaggtcacatgtcatcttcttatggaccacattctttaactagcccctcctcaacagtcattctctgtcatattagcctgttttattttccttataacacttaacaatatctgaaataatcttaaagtttatttgtctattttctgcccttcccccaactagaatctaagtactgtgacagcaatgtctttgtacatcttgttgaccagtttaaccccaggacctacaacaatatctaaaatttaatgggtacacaataagtatgtatggaaagaaagaagggagtgaaggtggaggagagaaggacagacctacttacctatgtcaacttttttctctacaagaatcatcattgcaatctcaagaccctagtatgtctcatttttccaaaatttgttctgcccacaaaagtaattctaataacagggaggaagaggaggaaatgatttaagaggaaagacaaaagaatctttgggaatgagatttaggggtccatgtttaataagcttcctttttaaatattgcacacattaaactttgagaaacactgtttgaaatgtttttaakcatcacaatgtgtagttctgtagctaattcatttctaggtttttgaactaatcatagcccttggtaaatacttgttgaaggcctagtagtttcaaaattgagcattctggaggaagaacacaatccctaccctcaaagaacctttgatctaatcgttgcagagaaaagacaaagaagcaagaaaagttcaataataaggcaagcactgaataataatttgaaatcaggaagcaataaatcaaggcactgactctaaaaaggagataatttctgtgatctttctccatctataaaacaagttaaattctattattaccttagaagtttgttaagctttcaaactaatattccactctttattagcctcatatctcttcatgcatgtgtgcagggtatccaatgaataattactgaacaaattggatatcaaagcaacttcaaagtggcttgattttaaattcaaaatattgtctctttatgattttcctcggcatgacatagggtcttctgcacttgttaagttaaaccttcttgaatgtctctgtaacatatggtgaccaccttaaccaagctaaatctcataattcattgtactagtcagggttctgtaaagagataaagctaataggatattatattatatatatgggagtttataaagtattaacttacacgatcacagcttcccacaataggctgtctgcaagcttgaggagcaaggagagtcagtctaagtctcaaaactgtagaatttagagtccgatattcaagggcaggaagcgtccagcatgggagaaagatgtaggctgggagactaggcccatctcaccatttcacatttttctgcctgttttatattcgctggaagctgattagattgtgctcatgagattaagggtggctctgccttccccagcgcactgactcaaatgttaatcccttttggcaacacccacgaagacacacccaggattaatactttgtatccttcaatccaatcaagttgacactcagtattaaccatcgcaagtccaccccttgtcaacttgaacccaaacacatctcctgagatcatacataatcttcaaataaagacaataatgaggtcataataatgcctaacataataaaactatccttcatacaactggaaacacaccaacccccaacccaaatactattacaaaaagttawcaatacttaaatgctgatatgcagtcaatacatcttatgtcacatgataaaggaaaaggaaacaaaattaagatattttcttagtacaartgtatacatgcacaaacgtttttaacagaagaaggaagaaatactcatgacaattacagtcctcgtttctgcagctgctcaagtagctagtaatgattactaccttcttctactactcattgtcttccctttgccttcagcaagcacctcagcaggtcatggttttttttcctggtggagtgacccaagccttcattcctgaggggtctgggtcacttgtagtcctacctggattgggcggttgtaatttcccattgactttaatcacagggcatggtaataacctaatggacaccctaaaggatctcccgtatcccatgcatactctttcttacctccgttgtggagtagtggactgatttcatcttgatagtctgggtcagtcaccccagccaayactgtaactcccttcttagcctgttgacttaaaggtaggaggaacccaaggtgtccaggtggcaatcttaactctcagtttaatggaatcattgttgtgtctccagatggcagcgttcctctctctggagctaagacctctaggacagcagaacattatgttgcaggaacaggaagcaaaacttttgctagtggatcactaggggtgatggtgagtggttccgcttccacttccacctcttgattcctggacccgtgcatcctggctatgggagaaacagtaccatatattggacactgatgcagagcatacatccctgccaccatggccttctggagaactttgccccagccctgcaaagtactgtcacctagttggcattgtaattgtgacttcgaaaggccagtccaccgttctataaatccagctgcttaaggatgatggggaacatggtaagaccagtgaattccatgagcatgagcccactgccacactactttagctgtaaagcaagtgccttggtcagaggcaattgtgtgtggaatatcataatggtggataaggcattcagtgagtccacggaaggtagtcttggcagaagcattgtgtgcaggataggcaaacacgtatctggagtaagtgtctattccagttaggacaaacctctgccttttccatgatggaagaggtccaatataatcaacctgccaccaggtagctggctgatcaccccaaggaatggtgccatatcgagggctcagtgttggtctctgctgctgtcaagttgggcactcagcagtggccatagccatgtcagccttggtgagtggaattccatgttgctgagcccatgtgtaacctccatccctgccaccatggccattttgttcatgggcccattgagcaatgacaggggtggctggggaaagaggctgagttgtgtccacagaatagatcattattaaaatcctcctctgctgaagtcactccatgtgaacactcacacgggatacaaatatcttcacattttttgacccctcagataggtccatccacatacctcttccttaaatttctttgtcaccaattttccagtcgtgcttcttccaagtccctgaccatccagccaaaccattggctacagcccatgaatcagtatataatctcacatcggaccgtttctccttccatgcaaagtgcacaaccacgtgcactgctcaaagttctgcccactgcgaagatttcccttcactgctgtccttcagggatgtcctagaaagggccatagtgctgcagctgtccacttttgggtggtgcctgcataaccatgcagaaccatctgtgaaccaggccttagtcttctcgtctctgtcaactgatcatagggaactccccatgaggccatctgctgggctgagggagagaaggcagggtggcaagaatggagaccatgggcatttgagccacttcctcatgtaactaacttgtgccttcaggacctgctcaagcccgatcacgtatacaccacttccatttgatgatgggatgttgctgtgcaaaacccgctttttggctggatgggccagaaaacactcagttcatgataggcaattcagtttgcatggtgacttgatgacccatagccaaatgatcagtttccaccaaagcccagtaacagcaaaaggagggtaattatctgcagatggcagggccttgctccaaaatcctagaggcctctgcggtgattcaccttttgggcttgccaaaggctccaaatagcatccctatctgccactgacacctcaagcaccattggatctgctgggtcatatggcccaagtggcagagcagcttgcacagcagcctgagcctgttgcagagccttctcctgttctggaccccactcaaaactggcagcctttcgggtcacttgataaatgggccagagtgacacactcaaatgaggaatgtgttgcctccaaaatctaaataggcccagtaggtgttgcttctctttcttcattgtaggagggcccaaatgcagcaactcatccttcaccttagaaggaatatctcaacaggcccctyaccactggacccctagaaattttactgaggtagaagttccctgaattttagttggatttatttccgatcctctggcatgcaaatgtctcaccaataagtccagtgtgtttgctacttcttgctcactggatccaatcagcatgatgtcattaatgtaatggaccagtgtgatatcttgtgggagtgaaaagcaatcaaggtctctctgaataagattatgacacaaagctagagagttgatatgcccctgaggcaggacagtaaaggtatattcctggccttgccagctgaaggcaaattgcttctagtgggccttatggacaggaatggagaaaaaggcatttgccgaatcaatggctacataccaggtatgaggagatgtgttaatttgctcaagcaatgaaaccacatctggtacagcagctgcaattggagtccccattttgttaagtttatgataatccactgtcattctccaagatccrtctgtcttctgtccaggcgaaatgggagagttgaacagggatgtggtaggactcaccacctctgcatctttcaagtccttgatggtggcactaatctctgcaatccctacagggatgcgatattgtttttgatttactatatttctaggtagagccatctctaatggcttccatttggcctttcccaccataatagccctcaccctaccagtcagggagccaatgtaggggttctgccagttactaagtatgtctatgccagttatgcattctggcactggggaaatgtctacaggatgagtctggggacccaccagacccactgtaagtcagacctgagctaaaactccattaattacctgacctccataagcccctactttaatgggaggacctcaacgacattttaggtaccctggaatcaatgtcagctcagagccagtgtccagtatccccaaaatgtctgatcatttccctttccccagtgcacaggtaccctggtaaaaggctggcgatctcctggggaaaggatgggaaaaagagtcactgcataaattgtcagtaatgtagtggggtccttcctcaaggggatccaggctccccttcattcaaggcgttctgggtctgtaaactggctcaagtctggaaatttattgaggggacaggattctctgtttttacaattcaaattagtcttttgtccatttgacttcgaagttttctgcttgtataaattaagtagaaatgcagtaggcttcttatcaatttcacttctaggaacaccatgattaattagccaatgccagagctctacatgagtcaggctattctgattgctgctttgcctctgctgtccattaaggtagctatgcccaccttgcctttgacagttgagtgccatcacttggcccctkccacctcaggatccagttattcccactgtatttacattttgtagttgagtgacttggttcccactgttagatctgacatacagagaagaccarttataggactcttcaaaaacataagtgctgccctcataaatctatttcacaaggcattgatcaagggtatgtcttctggaacctcccagctgggatgagtatgtctaaagtgactaatccactccaccatcccaatctccctaagcctttgggtcccttcctctacattaaaccaggggagaccaggcatttccagctcactcacagtgagtcatcttttaattcatatttcatctaaccaagcaaataaactattagaacctttttttaactccctgagctgcagtattaaaagcagagtgggcccaaatcaataaattcagcctgatccaactctatgttccttccaccattgtcccatacccttaatatgcattcttatgcctgttctccagaatgctgtttatataaattagagaattcaaacagttattttcaagtgtagcacacctcctattgggtcacactctcaacctcatctctaggggtccactgggactttagtctagttacaggtctakaagcaaacaggggtgttggggtggctcctgaggagaatcaacattatttggcctggtgagtgcctcagggaggccatcactgttgcctcaggcagcacagggtttatgtcctcagacagatgtggaaaggctatggcagtgtgggtcagggaggagatgttgccactactggggatggggaagctgttccttctggcaaaaaaggtccatcagagtttacaaactcagtatccccagcttcattagggtcctccacacatcccattccaagttgcagggtcccattcttttccaatcaatgcctttaacagtagacactgggtgaggctgtgcatgcaccttttgttgcaagtcagccacttgcacgataagaacttgtgtctgttttccacaatttcagctctttctctacgggagataagactctcactcagggcagtcttatcagatttaaggctcagtatctgcttctgaagccaggagacagaatccctgagttcatcattttctttcatcactttgtccactgaacttaggaccaaccagcttcattatgttctttggttctccacatatggtcaaaggtattaggtatagtcactaaactccttgcctcttaggagcggtgaatcaggagtgtcaaatgcatttattttgcataactctctaaacagtttatgccaaggactatcagtgttttccatagtattagaactagagttcttggcattttggggtctaatcatattaagcagccaacttccccaaaaccaacaaaagaactccatccttaatattcagttcctctagaaccactcctgctacaaaaatctgtattagtcagcattctctagagagatagaactaataggacatatacacataatacttaatagtttattaagtattaacttacacaatcacaggttccacaataggctgtccacaagcttgaggaacaaaaagagccagtccgagtctcaaaattgaagaacttggagtccagtgttcgagggcaggaagcatccagcatggaagaaagatgtaggctaagaggctaggccggtcttgccagctttgctggaagctgattagattgtgcccatcagattaagggtggatctgccttccccagctcactgactcaaatgttaatcccttttggcacacacacacccaggattaatactttgtatcccccaatccaatcaagttgacacttagcattaactatcacactcatgctatggtgaatgtggatataattgtgttgaccacaagacagaatatttgcagtcaggtctgtcttagaaacatgatacctattataaaagagaatttccgtaacctstagggtgaagtgtcagtacaatttctgctttgcaaatactaggattatggaagattaaatgtgtgaaaggactttgaaaaattaaaacatatcattaatcaacaagtcattccttaaaacctcttattcacctactatatactctttggacagctgtgtagggtcttaagtatagaatgacaaggagtgattatctcttaaataatattgtcatccgtatcccagaacttgatccaacggaagaactctcatgggagtcagtgaatttatgatcaaatgattggtaaaacttttggggggaggtatgtgcatttatgagatgtgttcaaattcttctccataagctccragtcttaaacacttagtctgggcctgggacaaataaatatatttattgcctgttctattcaatatgtctttctaaataaaaaatcacaggaatgcatagtctcagcatagacagcccatctgcagtgaaaccttccctgacttatagcccaggtttgatctgagctgtatgttttgtcttcatagctgagatcccatgacaatacttattccactttattgttatttcttgtctaaaattgtctgccttccctactagacaaccagctcttggaaaccaggcatttttttttctctctttttctgtcattgtagtcccagcctttaacataatgcctggcatataatgagtcttcaataagtacttgttgaatgaatgagaatatctacataaagattttgtrtttcttctaaaataagcctacctcaagagtttctaaccatttggagttactgaaaaggaatagctgcaagtcataaatatcaattcctcctgccacaatttgtaggcctgtaactaattcatttctatcttcttgtactaatcagatctcttaaagcatactcaggatttcagagctagaaggaaaacttaagaattatcaaaaggaattccagagtggttgtgtgatttgcccaaggccatgggttagtggcagagctggggcaaaatgtcagtctctgatgtgaacatcattaccataagagaaattcagtgccaacatcttctaagcagtgactcaacattatttggacagaatttattaaaatgaagagcctaggcctacccagttattgaaaaggaataaatatttaaacatcttattattctgagatgaatatgagaatatgcctctggatagttaaaaagagtcttccaccaaccaccaactttgcaaatgggtgtttcagagaccacacataatgcatggtactaattaattgaaacaattttcaaaccagagtagatttttgcctttaaaacataaaccaagccaaaaggagtgtcatgcttaattatctgcataaaattttctgaccagagcactcatttagctgaattaccttctccacagtggagaagaaaacatcatcaggagacttagttaaccaagtgtttgaagaactaccattctgcaaatatcattgactccccccaaattctgagatgtaatacttactctaggatggaattactttaggcaaataagaaagcattttacctatcatagggaaaattaaccctgatcattgctacagctcttgaaaaggaaacttttttagtatattcactcttaatggctaaggaggtgtctgtagagttcctgggaaactgcacagagtctgagtattctctggcagactgaaatgcagtgccaaataattttttaataagaaagcatattctggaaattaattgcacatatgagacatctccattgactgaactgcaaacatgattgcatttccaacttacagatcttttcatgttccttgcgtgtttcctatggcttcccattgcctacaggatcaagttcagaccctcaggaaggcttgcaaggcccaacaggatcttgctggcctaattctccaaccctacccccaccactgccctcagcctaggcactacgcacccagggataccgctgccctcagcctaggcaccacgcacccaggcaccgcacataccttgctgttttgttcttgtctgctttaccttcagcacctcctttctaaagttttcccagatacaacatctatgcagagtatacccaacgttctcttatgtcagccacacatcattcagtcaatcacatattgactgagtagctaccgtgtggtaggcacaagggaggaaacaagataaaggaccttgtccctacccacaggaaaatcagtggaggaaataaatgttataattactataccttggtaagtgctaaaatattctctgtatcttacacatgcttctratcacacaatattgcaatcatttttccacaygcaagtctccctgactaggttttacctttttgaggctaagaacataacttatcttggtatccacagaattgaaaactgtatctcagacatatgaaagctaaataaatatttgttgaatgttgggtaggcaaagttctattttaattgtatgtagtatgaagaaatttgaccaagtctggctaatagactattaattataggaatggacagaaatgataagtaagggcagaagggcttcaggtatctgacatacacatctttaatttctgtttcccctttgaatacagagcaacatctcctgacctttccagaacagctgaccagatgtggagatgcaatgatgcccatatttgaaaacagtatagtaccatgacaggcaggcaggcccaggctatttatttgttgtgagctctttggcatgtcataacttctaggcttgatccagtttatagaagagaaagttaaactatattcattcattccctcatttattaaataatattgtgtttctaccatatgcctagcattgtgttcaggacccaggaagcaaggaacaatgaatgagatgtgatcctcaactccatgaaacttatatctgttgggagagggagaaacacacataaaatttcagtgcagatttggagaagtattatgggctgtggagattggattttatcctgaaagcattgaggaagtctttaaaaggtaaattagaggaataactccatcagatatgtgtgccagtggatcaccctggcttcagtgtggcatgggttaaagtagccataggttgtaggaagagggaccaattagcagactgttgcttggtttgagtaagtggcacagccagaggatgatgaagagacctcaggtttctgcctgccttaagtttctatgattggccaccctcctgtgtctgtgcagacagtctgaatgcagattctccaacagaaggtttgtggttcaagattgcctcacaattgctggtaaagagagctgaggatgatcccagatggcacttcaactttctctaattttgaaccttgctgtgcacctgaataccacatactgacttgagcaaaacagtagtgttattgttagggctgaagcaagctgtttgtcgagactccataatgcatattggtgacaacaggaattaaactctccacctgcaggacagccagccagtggggtgtagaataagtgtgctggcagagactttagtatgtaaaagtgccgcaggaaaagggggcaagctttattctagaagagtcccattcaaaccatagcagataaagatattataattagaaccagaaccaagaataaatactagagtaagaaatgacaccagtttgcttcttcccagtatcagagagtgtctctttctggctatatggacatgaaattttgactgggttccagaaaggcaagaaagggtggtttgtcatgggcttttcaatgcctacgaaggactcaaagttatttgagatattacatttgaatatgatttgatgtgctgtttgataaaagaacatcaatgggcaaaagaatcacttagtcaaaaataagttcttctgactaggacttatgacaactagggaagagtagtaaccaggcttttttctggaataagaactatggtgtccctctatgatgagcaagatcaggtcctccaaggagttatacatcgcaatactgactggtctgacaagtaaaagaccattcttagtacccccacagagcatgctgatggtatctcaatctttagaaggtttaaaggatgggatggcgccagaccttactttatatctctttcagggttttgtgccaacctatgaacaccaaaactcagcactattttatgcaaactatgcctgtagaccatatttaagagtatggaatgacttctctctggaaagagtttcctcgcctcatccccagtataacatgtcgaaaagaaataaggaagaagaaatccaggatgctagttttgaaaatgaaattttgttcccttcccaattttaaatgcaggtatactcattgtcttctcgaaatgacaaaaggaaaaaaaaaagaggaaagttacaattattcataaatctaccaataaaatgtaattactgttggtacatgaatgtattttcatacaatcaacacgtgtatacacgacatttaaatgtacttccttctagttttttattcatctatgttggatatgtggggtttatgtgtacattgatttagcagtgcacgtgatcagtggtttaaaggaggggatggctttgctgttagatcccagttataaagacttatcttgtttaatagtttgaaaccaaaatctatttcaattagagttggaataattaggaaatagtcttgatacttacgctaaattatccatttactaatccagaagatatattcatccctctagtagcttaaaaacccctttctttccctgctgtttacaacccttagcacttttcaattgtggcatgcttccatctctttcatcccccacctatatgctcagacacagaatgtgttcaggcaatttttaagttttgtaaatcattcccaatagtcccttaatccttcttgccacttttctctaaatccctttcagtcgatcagtagctacttggagggtatggcctgcgataacctgacacaggcttccaggacactgttagaggtgatcgccatcttcatgggcagtggggcagtcctttgtacatatgcagcctcacgtttgcctttattttcccggcttctgctccgtgatgcaatttcctgtccataaatggtgcagatctaattccctgaccaccatatagtaaaggtttactttgacatattgtccttcctaaaaagaaattttactgcacagttataattatcacatttttcttaattagcaacctcttctgatttctttttcatcttctagttttataaaacattttctttatcttattttaacccaacttactgaattctatgactattttcttagttccttttttttgtacttgataagatctctgagctactctttactgcttagatttttcaagtatatggtattatatcttgattttggtgtaatctcagaactccagctattcttccagtctatgggtagaataattatgtcattagagacattggagcctgcctctcccatgacggccagctggcaggggatatatattatatgtcttggttgatggctttcaagtaaaagggtgaatctgcgaagaccagtactccttgccaacaagctctttataaaatcaactatttcattttgccgcctgagctctcctttggccgttagattgaacaatcactggatgtttcctaaatttgtcatcaccccaaacggagactctgtaatattaagtaataactccttattctcctcttctaccagtccctggtaacttcaattctactttctgtctctatgaatttggctgttctagctatttcctataagtggaatcattcaatatttgtcatcttgtgtctgactaattttatttagcataatgttttttaaggttcatctgtgttgtagcatgtatcagaactttgttcctctttaacactgaataatattccattgtatggctataccgtactttgtttttccattcattagatgatggacactagggttattttcaccttttgcctattaaaaataatgctgcgatgaacactggtgttcccattcattttgtaaagtaaccccctcttttttcttccttctcagccacatggcagcacttgagtctccaactctcatatccatggaggccgtgctacttccagccgttcccacctccacacacaaaagtaaaatagaaatttctttataagggagaaaagaagctattaattgccctaattgtatttctttgtttaaaaattatatatgtttttgaaaaatatagaaaaaataagagaggggaagtgttcccatactcctaccactttggtgtaagtaatgatataattttggtttatttctgtcagtttttttgcattgcattctttttcagacctaaatgtgagcatgttatggttcagaagtctaagtctgtttttgtttttgttttgctgaaattaaaatagccattaagatttcctttggtcagtgtttgccttttatatcttttttcatcctataattttcagtctttctgtgtacttatatttcatatatgtccaagtctgctcctaatatttgcagagcctgaggcaagagtacaaatagaggcccacatgcattctaattgctttattcagtaattatatcttcatttaggaaagattttcaaattacaaaggcctcatctgaccgattccagttacaaattagatcagaataattctcttgctcatttttattattttggctagtaattaaatcctcattaaatataaaatgtgttgtttgaaaattttttatgatgaatgcttgacagagatttacccactttcattatttctagtttttaaaaatgtcagtagactgcttatttgtgtattttatttttttggcttttttcctcctaagattttttttcataggttctcttttatcataatctcaaattcttctcattctatttcccctcccaccatacacactgtgaagcagtgactagctccttcttagctgcggtaaaacctgcaaatctttacggcatttgaacacagtgaccatttgtttcaaggatttagggcaaggaaatgtggagaagtactttttctggaatgtgaatggtattagacacaaccgtggatgtttaggattatagatcatgctgtgacagaatgacaaaggtgtcaatgtggtctttaatataatttgtgtgttggtggtatgatgtgccatttaaagcagcgcttctcaaacattaatggtacatatgcatcacccggagaagcttcttaaaatgcagattctgaatctttagatctcggatggggcctracagtcagcatttctaacaggtgcctgagtgatgctgttgctgttggtccgagatccatctcttgagttgtaagactctgaagcataggaccaagatcaggggtctctctcatctgatattaagagtagtactctgtatgtcctatatgaatacactatagctggaattgatttttaatttgaaattataatcatcgccttttaagagtcatgtttagtttatttacatttattgtaattttctaagttattgatatattgggattttttccctattatttaaacactggctttgcattttatgcattctgtgctttgggcttttttttwaaactctccttttcccctggaccattttttccccttcttcttattccatttttagcctgtattagtttaaaaattaaatgcttgatttctattctttcaatgtcattcttaaaattttaacatgtatattaccaaagtcctaaatgaattaatttatttttaaatggcaaataaaaatcgtatatatttattgtgtacagcatgatgttttggtatatgcatacattatggaatggctaaatcaaggttaattaacatatgtattgcctcacatacttatctttttttgtggtgagagcacttaaaatctactctgttagcaatttttaaaatacaaaatattgtgattaactataatcactgtgatgtacaataggtctcttgaatttattcctcctgtctaattgaaattttgtatcccttgaccaacatcttcccagtcacacccccatccctctggtaaccatcattctactctagttgtatgagttcaatttttttagattccatttataagtgatttaattaatatctttatcctctttccagataattcaaggaccttagcattttaactctagtcaactgtaatattacattccatcgtattgcagtattttagtcttcttctattaagccttccaaattggatattagcattattgtggttgtttcacattagcattattgtggttgtttcagatagtcaatattgatgcagatttacctgaatattacccatgattaccatcattccttctttctacttagatttccatcatccttcttcttgaaatataatttttaaaaggtccattgaagaagttctgttgatggtaaatacagttttactttctttgaaaatatctttattttgcccacatcagttattttattgttcagtattaagaaaacctaattcctgtgttttcttcccatcattgttgatattgagttgtgtgccatcaggcaaatgtcattactttttagatattctaaactgttgtttctttaagtaagtacattgtctccccttaatctgttctcttcgtaatgttttatttatttgtctcactataatgaattctggacagtttcttctggtctttctttcagtttgctaattctctattcagctgtatctaatctgctatttaattcatccatcaagtattttttccttagtattttgttttaataattttatttactatttctagatttttttctaatcatcctggtctttgtcatagtatcttcttctttatatacattttatttatgtatctgataacattaataacttaaacctttgtaagttataagtatgtttttagtttttgtgctgattttgttcaaataaacatattttgtatgtgtgttgtttgtgttcttgcagatgtgtatgtttatcatcactctacactcatctggactatatctttgggaattcttcatgtcctatattgaaaatccacttcttcaaagaaagattacatttgcttttgccaagcccctagaagccctacaaactagaactaaagctttactaaaataagcctagaccttctgcacacatgccaatagtatgaatgcaaatcacaaatctacatcatttttatgaattctaaacttttatgaagcagagaattttttttattcttcttcacccagaaccaaggacaaaacagacaagttttcttttacgttccctatgcttgctggattttctctttctagtttactcattccttagggtcatggtttttcaggtcttccctcattgcttagggtcaagactgtgccccttgtccctccacatggttgttgaaatgcaaagctttaggttaaaggatcagcagttacccttagagcagccactgtctgcaatgcccattcattatgctagatttttacttcagtttttttttttttgagctctgtggagttcttttacttaactgttaacttgcttaataaaaacagatttaagaaacattttgaatgtttaaataccagcttttcttggtattctataatgtgagtgcttgtatcaattacaaattttaaaatattatttgtaaattaagtggttactatggttaatttagaaatgcagaaaaatagaagaataaaaaattttagaattttgtaaactagagatagcataaccattataaacatgttagaatttaagatttttttcatatacatttttacataaatgagattacactacatttatcgatttgagcataagatattctcaagtgagaaagtgaatgattatattgagaggttggcagcaaataacatcaagtctttccaaatgaaaacctcaattctcatatcattaaatataaatttttcaatgtagtaattattcatcatgtatatttttaacaataaaacttctatttgtggaagtacaagtttgtgtaggggacacatgttttcacttctcttgggtatatacctaggagtagaattgctgtatcatatggtaacctgagtcttagccttttaaggaacagcaaaatggttttccaaaaggctgtaccattttacagtcccaccagtaagaagaggagagtaggacacagagaccacgtgaagacactttgccaacacatgttatcatctctctttttaaatcttagccatcctatcaggtataaagtagtatctccttgtagtttgaatttgcatttatttaatgaagcatgatgttaaacatgtttttatgtgcttattgtctatttgtatatctttcctggattatgtctattcagattcttggcccatttttattggattgtttttatttttgagttgtgtttttaatatattctggatacaagttcatataaaatacatgatttgcaaattattttctcccattctgtgggctgtcttttcactttattgatggtgttctttgaagcacagaagtttttaattttgatgatgctaatttatctatttttgtctcacttatacttttggtgtcttatctaagaaactgtcatctaatccaagatcatgaagaattattcctatgttttcttctaagagttttgtagttttcgcttttacatttaggtctatgactcagtttgaattaattgtatacatgatgtgacagagaggtccagcttcatctctggcatgtagatatccagttgtccaagcataatttgttgaaaaaactctgctttcccctattcaattgtcttggcatttttataaaaaataaaccgcatatctatgtattttaaattcagttatatatactgtcactagccataccaggcatcatatgtacttacaagcttaagactagcatggaaatgattatcacgggccatggcaaagaataatgatctgttatttccaaagattctgtgaagatgactgtgcagccgagaatttatttggtttatagagactaaaattccgtctgctttgttcactattgagttagtagctaaacagttgtaaaatttctcaagtctctcagagctcacacttgcaggaagcttgatttcacaacttgtacatgacagtctcacataaaagtactctcgtgagagtgttactatggacagaaaaaaagactatacctcttttatgactgctgttgttatttagggcttcttttttcttgatgttgtttcaaaaggttgcattttgcaataagcagcaacaccttaagatagatcttaaacagaaccatgtttaaggcttttttttctcccctttagtcacagtgattttccatttgccctggaaggcattcagcattacttgtaaacagcaaagataaatgtggcttctgatattcatctttatgaatagtccatatgtttataaataggaatagaacaaaaagcactgtcccaaactttcctttaaattctaaacatctaaatgtattttaaatattccaccccaattaatctcacttttaaataaaacattgcatgtctaaggtggaaaaacaaaagactcttcgacaatgccacacaactgcatatgtttgaaaatagggtggtcacttttaattgatatagaggaaatttgggaaagaagaaaagtaatcaactttcctatatctggagtcctttaaccaataaacagacaaaccaacataaagcacacatggtaagctcagcacacataactgaatttctctttttacgtttttgcacctcagcctgtccaattgtgcaaagaaggggaggaggattaaatatgcaactgagtagccagggcmtctagctgctggtagttcctcaaagctgtacatccctccctcaccataacttgyttgttctctccagcaaataccatttactagggtgcccagattcacctctgtaggcccaagactgtgaggttcctagacaacaggattttgctctgaatatcatccatatatgcactctttaatttaaccccgtcttggcaggcataaggagtagcacaatgaaaaaatgtagatcctgcccccaacaactgtgtaagcttaggagaccagcactcagaagaaattttagcatagagtaagtgcacagtaaaagtttgttaataaggaaggaaagaaagaggaagggtgtgcaggagggaggaaggacaaatttggatttcatatgtcataccagagaaagatggaagcagcatattgagatatagaagtggtgtaaaagacaagaagaaatcagtttaagaaggcataggaaccagaagtggaaaattagggtataaaacttaagtgtctttggagacaaactggatttgaatcttagatttgccatttgctggcagtgattttgggcaatttacttaattatatttgatcttcaatccgctgtataatgtgtaaggagtaactatccacgtcattggaattattaggaggatttaataagataataagttttaccaatttagcacaattcccagcacataggaaggactcaggaaatattagccatcaatagaagacactatctattcatttatttacttttatttacttatttatttatttttgagacagaggctcactccgtcacccaggctagattgcagtggcgcgatctcggctcactgcaacctctgcctcccgggttcaagcgattctcctgcctcagcctcctgagtagctgggactacaggtgcgtgccaccaaatccggctaatttttgcattttttgtagagacagggtttcaccatattggtcaggctggtcttgaactcctgacctcgtgatccacccaccttggcctcccaaagtgctggtattacaggaatgagccaccgcgcccagcctagaagagacgctcttgatattcaggttttctttaaccctgagatgtggccatggcacacaaatgtaaacattttcaaatcagtcccaggtggtaggcttctagatttttgttttttacctttgaaatcggttcaagacaatgccattatggaaagcctctgcagaagaaactatttttattgtaccaattgcctttctaaaatctgtcaaatcttttaagtttctcccttgacctttttggaagcttaaacaggaactgaatcatcataaaatttttgaaatttgccttgaatctactttggagctgcatgaattgagatctcttggtaactgaccttgtgttgacccagakaggcctgttgcagtgtacggcatgtacaccgcacacctgccaccacccctgtggcagcaatgtttgcgagcctgaagagttttgtgtggggagttatgacagaagtcagccaagtgtaggtaatgatgtcaggtagcatgggaggttggagcgcaggaagaggcaggggggggatctttaagcaaggaacccttgtatccagctgtgccaaatgggccttccctgaggacttgataggcaccctattgccacttgtaactcagcaattgaggtcacagtcaaagaaaaaaacctttatttttcacaatgtcatctttcagcagtacagcttcataagtgaagatggtgatgttccaacagttcatctaaactctttaaaatcctaccaaatacgttgcaggtggtgggtatgtagtaaaagtggataggaggagggtaagtattgaaatctgtttgagatatgaaattacatgagtaaggtttggggttttcaccacaatttcactcgcgtccatgtgaagagaccaccaaacaggtttgtgtgagcaataaagctgtttatttcacctgggtgcaggtgggctgagtccgaaaacagtcagtgaagggagataaggatggggccattttataggatttgggtagataaaggaaaattatagtcaaaggggggttattctctggcgggcagagtgggggtcacaaggtgctcagtaggggaacttttgagccaggatgagccaggagaaggaatttcacaagacagtgtcatcagttaaggcaggaacaggccattttcacttcttttgtggtggaatgtcatcagttaaggcaggaaccggccatctggatgtgtacgtgcaggtcacaagggatatgatggcttagcttgggctcagaggcctgacattcctgtcttcttatattaataagaaaaataaaatgaaatagtggtaaagtgttggggtggtgaaaattttgggggggtgatatggagagagaatgggcgatgtttctcagggctgcttcaagtgggattaggggcggcgtgggaacctagagtgggagagattaagctgaaggaagattttgtggtaaggggtgatattgtggggttgttagaagaaatatttgttgtgtagaattattggtgatggcctggatatggttttgtatgaattgaaaaactaaatggaataacagaaggagaaaaacaggtataaaaggtctaagaattgggaggacccaggacatcagattagagagtgcctaaggagattcagcatagtcctgccagcaaagattatttatttacttcaagagttaagagtggcagtttggggatagcaccaggagatatcagctgtgatggcttggagaaacastgtaaactggcagtgtaaacaagagcagggcatgtatgagtagttgagaacggtgaataggagtatgactagacagaagatagtagggatgacaagttttttgggggcacagtctaagttggtctggcgtctggaatgagactggggcctaataaaaaggaccgtctgtacaggagctcaaatgggctgtacgctgtagcattctgaggacaggtctgacttctgagaagggaaagtggtaaaagtatcatccagtcctttttaagttggtggctgagcttggtgwggtgtgtttttaaaagacctttagtccrttctacttttcctgaaggcagaggactgtaagggatataaagctttcactgaatactaagagcctgaaaaactgcttggctgatttgactaataaaggctgatctgttatcagactgtatagacatgggaaggctaaactgaggaattgtgtctgacagaagggaagaaatgactatggtggccttctcagaccctgtaggaaaggcctctacctatccagtgaaattgtctacctagactaagcggtattttagttatctgacatggggaatgttgagtaaagctaatttgccagtcctgggttggggtaaatcctcgagcttgatgtgtagggaagggaggaggcctgaataatccctgaggagtagtagaatagcagatggaacactgagaagttatttccttgaggatagatttccacgatggaaagaatatgagaggttctaagaggcgggctagtggcttgtactatagcatagcctgcctttggtggtgtgtggcgattaggcctggtggaactgccatcaataaatcaagcgtgatcagggtgaggaacaggaaagaaggaaacatggggaaatgaggtggatcagagagatacagtcatgggggtcakgtgtggtatcaggaataatgtgggaggccagattgaagtccgggccaggaacaatggtaattgtcggacttaaagagtgagtacagctgaaggagccgggagcagaaagtatatgcatcaggtatgaggaagaaaatagattttggaagttatgagaaatgtagagagtgtgttgagcatagtttgtgatttttagggcctctaaaagtattaaagcagtggcagccactgcatgcagayatgagggctaggctaaaacagtaaggtcaagttgtttggacagaaaggctacagggtgcrgtcctggctcttgtataagaattctgaccgcactaaccatgcctaggaaggaaaggagttgttgttttgtaagggattgaggtttagggattaatcagacacgatcagtagggagagcacatgtgtttttatgagaattatgccgagataggtaacagatgaggaagaaatttgggcttgactgaagtaatgggggctgcctgtgaagctttgcggcagtacagcctaggtaatttgctgagcttgatgggtgtcagggtcagtccaggtgaaagcaaagaaaggctgggatgaagggtgcaaaggaatagtaaagaaagcaggtttgagatctggaacagaataatggattgtggagggaggtattgaggataggagagtatatgggtttrgcaccatggggtggataggcaaaacaatttggttgataagtcatagatcctgaactaacttgtaaggcttgtctggttttagacagataaaatgggggaattgtaaggagagtttataggctttaaaaggccatgctgtagcaggtgagtgataacaggctttaaccctttcaaagcatgctgtgggatgggatattggcattaatcggggtaaaggtggttaggttttaatgagatggtaaggagtgtgtgatcagtcgccaaggagggagtagaggtatcttatacttgtgggttaaggtggggggatacaagaggaggactcaaaggaggctttggattgggaagaagggcggcagtaagatgtagctgtaatccaggaatagtcagggaagcagataatttagttaaagtgtctctgcctaataagggaactgggcaggtggggataactaaaaaggagtgcttaaaagagtattgtctaagttggcaccagagttgggaagttttaagaggtttagaagcctggccgtcaatacccacaacagttatagaggcgagggaaacaggcctttgaaaagaaggtaatgtggagtgggtagcctccatattgattaagaagaggacggacttactttccactgtgagagttactcaaagctcggcgtccatgatggtctacggggcttccgaggcaatcggacagagtcagtcttcagccgctaagctaagaagatctgggaaggagtcagtcagagagccttgggccagagttccaggggctctgggagtggctgcaggtgagttgaacagtctgattttcagtggggtctcacacagatgggatacggcttaggaggaatcctgggctgtgggcgttctcggccagtggccagatttccagcacttgtagcaagctcctgggggaggaggttctggaggaacccctggcagctgcggttcaggcctttggagttcttgtgtgctggagatgtggctggggtttgtctcacagtggaggcaaggaattgcaactcagaaatacattgctacttggctgcctctactctattattgtacaccttgaagttgaggttaattaagtcctgttgtggggtttgagggccagaatttaatttttggagttttatttaatgtcaggagcagattgggtaataaaacgtatattgagaataagatggccttttgaccttttagggtctagggctgtaaagagtctcagggttgctgccgaacgagccatgaactgggctgggtttttcatatttgatgaaacagcctaaacgctactgatttgggagaggtcagataaagaaaaaggagcattaaccttgactatgcctttagcttcagccacctttttaagaggaaattgctgggcaggttggggagggctagtcacggaatgaaactgtaaaccggactgggtgtgaggaggggagttgataaaaagattataggttggaggagcggagcctgaggaagaattcggacctagctcggcctggcgaggaagggagaggtcagatgggtctgtagaaaaggtagattagaaagactcagtgacacttggggttgggactgaggggacaggtgggagggaaacaaggaagatttgggatgagttgcattgggaacagagactagggagggactgatgtgtaaaagaatgcctggacatcaggcacctcagaccgtttgcctattttatgacaaaaattatttagaacttgtagggtggaaaaattgaaagtgccattttctggctatttggaactactgtcgagtttgtattggggtcaagcggcattgcagaagaaaataagatggttaaattttaggtcaggtgagagttgaagaggttttaagttcttaagaacacaggctaagggagaagaaggaggaatggaaggtgaaagcttgcccatagtgaaggaggcaagcccagagaaaagacagtagagacacagagaaggggtgggggtttcttgccctccagaaaagcagagaaggggtcggggtgtggaaataaggggttggggcacagagataagaggtcagggcatggaaataagggatcggggcacagagataagaggtcggggcacagaaataacggatgggggcacagagacaagaggttggggttcctgcccctcccccagaaaagcgggacttgccgctaagggtgaaggaccaaggcaggcgtccctgcgtggtctgacaccactgaaacctgggtgaatatcagagaggcatccttgcaatgattaaacaccaagggaaggctgccttccctagtccgtgactggtgccggagttttgggtccacagataaaagtgtctcctttgtctctaccagaaaatgaaaggaattgaaattaagagaagggagagattgaagtgtggcgccaagattgaaagaagaaagacgttgagggatagtgagagaggttggagaagagagtaaaaaaggctgcttattggatttaaaattggtgagatgttccttgggctggttggtcggaggaccagaggttgtaggtggatctttctcatggagcaaaatgcaggaggacaggggattgatctcccaagggaggtcccccgatccaagtcacggcaccaaatttcactcgtgtctgtgtgaagagaccaccaaacaggctttgtgtgagcaatacagctgtttatttcacctgggtgcaggtgggctgagtctgaaaagagagtcagcgaagggagataagggtggggctgttttataggatttgggtagataaaggaaaattacagtcaaaggggggttgttctctggtgggcagagtggaggtcacaaggtgctcagtaggggagattttgagccaggatgagccaggagaaggaatttcacaagacaatgtcatcagttaaggcaggaacaggccattttcacttcttttgtggtggaatgtcatcagttaaggcaggaatcggccatctggatgtgtacgtgcaggtcacaggggatatgatggcttagattgggctcagaggcctgacattatcattcataataaccagaactttatattcttaactacaattattaaagattttataggttacaatacactgggatatacctttctcaaagaaacatttaatgttatcccagaattaaaatatacttttgcaaaataaaatgtttatcaagtctgccaaaaagagagccaattatttkggtttctctctaggattttaataaattcctttgatacctagtcaaagcagttgagcatcctcacattgaacaaaatgaaagcaaggaagcgatcaatctcatttgaaaagtgaacaaacataaaaatcattatcttttaaaatttttcatttttacatgttgcaaagaagaataacctttcttatgtttcttgcatgtttcttatttcctcagtaattaaaaaatcatatttagatacatttattactagtgaatgctttttcatagttttaatcacattgatttgttgagaattatcagaaaacataattattcagataaggaattgtgaacagtcttatggattaatacgttctcagaacatcagtgttttagcaaataagatattatttacagtgagcacattgttagcctcactagatgtcagtgtagttctaagtaaatattttatatagttcctcagtagtgttgaatgagaagatgttttgctttagaacttaaagattgagaagatggaatagttgcaataagtgtttgtggtacattaattccaacatcctcctctgatgaaaacacataattggtaaatttatacacatcaacacagggccaaaaaatagtccaaggatgtaaataattatggattcataggatacattgtgcttccttagtcaccaatgtattttccgtacattgaaaagtcttactgtacatcacaacatgctggtcagccttttagggcttttcccaattgcaaagggagcatggttactcctcctgccatgagagggcagcactgagattgtctccagcccaggaagcagtgggcactgtttagtatgggttagcacctaggtttttatgtggaagcattcaagtcaggctgtggtgatatatgttctcagagtctaccatagtatcattttagtgcttttattacaagtcatcaaacactgtatctgagaaacatgaggataaattatggtacattcaaaaactgctgataaatagcaaagaagagaacagggtactttgggaatataaggccttttgcgtgagaaatgttttgtgctagctatgagtgaattttctacaagcagagaagttccatttggtcctctgaactggttaacattttcttgattctttgcttagtgtagcaaataaaattctgtttattctttttgagagttcccaaaatatctttattgatttggattttgctttttcactttattttatagttgattttaagtttttcttgagtgtgttcatcagatagccatataaaatggaacaatgcatttgtaataacaaatattatacatgatatttttttggccagcccagttgcacagtcaactgagaaagtggaagttatcactttcctcttaattccttttacatatttttcctctggatgagaaaatgttactttctcatatccagaaaagtgttataaaaygatacattgagatcatctgattccctctttattgtgattgtttctttaaaagaaaaaaaagcagaaaggggccatgaacttacaaagaaagttttaaagaatacaccaaaaattgttaaaacaataaatgagttcatcaaggctgcagggcacaagatcaatacacaaaaattaattatatttttatatacttgaaataaatgatctgaaaatgaaggaaacaattctgtttacaatagcatctaaaagaataaaatatttaagaataactataacaaaagaagtgtaaaactaatactctgagaactataaaacattactgaaataaattacagaagatctacataagtagaaaaacagcccatgttcatggacaagaagattttaatcttgttaagataatagtgctcctcaaatagatctaaagattcagtacaatctctgttgcaactgggattctctaggccagttgacttctttgtacaaattgatgagctgatcccaaaattcatatggaattgcaggggactcagaatagccaaaacaatctttaaaaagaagaataagttgaaggcctttcaaatttcataacttcccaatttcaaaacttacaataaagtgacgataatcaaacatatgttactaacatagggataaacatatagattagtgggatagaattgagagtctacaaataaatctatatgtctttggtcacccgaatttaacaagggcaccatggttattcaataaagaatattttttaaacaaatggtgctaggatgattgtatatccacatgtaaaacaatgaaattgggcccttacctcacacaatatagaaaaattaactcaaagcagatcaaagatgtaaatctaagatgtatgtacatataaatctattaaactcctagaagaaaactcagggataaatctgcaggacctcagatttgccaacgaattcttaggtgtaattcccaaaacatgagcaacaacaacaacaaaaaattggttttcaccaaaattaaaattttctgtgcttcaaaggatgctatcaagaagtaaaaaaacaacccatggaataagagaaaatattttcaaattatatatcccctttggaacttgtatccagaatatgtaaagacccatacaactcaataataaaacaaattaacccaattttaaaatgggcaaagaatctcaatagacgtatctccatagaaggcatacaaatagacaaagcacacggaaagattctcaacatcattagccatcaaagaaatgcaaatcaaaatcacaaggaaataactcttcacaccccgtaggatggctgtattgaaaaaaatataacaacaacttttgtcaaatgtggaaagaaattagatctctcatacattgctggtgaaaatgtaaaatgatgctgtcactttggaaaatggactggcagttcctcaaattgtgacacatagagttacatgtgtcccagcagttctactcctaggtatatgccaatataaatgaaaatatctagctacaaaaaacttgtacacaaatgcattattcataacagcattattcataacaatcataaggtagaaacctaaatgtctgttaactgttgaatagataaacaaaatgtggcataaaatatggcgtatccatacaattaaatgttatttggccataagaagcaatgaaaatacagcagttagtgatagatgctacaataagaaggaaacttgaaaccatgaaactattaagctaagttaaataagacagccacaaaggaccacatactatataatcccatttatatgagatgtccagaataagcaaatccatacaaacagaaagtagattagtgattgctcagggctgggggtgatgggtgggtaggagagtgatagctaaagggcagaaatgttctgaaattgactgtgggggtggtttcacatatctctgagtaaattaaaaccatccaattccgtgaatttagtgggtgaattcacatagctgtgaattttatctaaattgtgaaaataaaacaggaatgtgatgctytaaccagcataggcccaggccgcatgcttctggggaagaaattccacctgaatacttgggctgtaaataggtcattttcatgggaaaaggatgaatagatgccagatggtaagaagggtgaaagtctactacacatgtctgcgaggtcggtaagggatctggtctttgcaaaggaaggttatattagagctcagttgagaagagaaagggaaagggactcaaattcatgcttaagggtgctgtgacaggtatccatacctttattaaaagacatgtacaggaacgttcatagcaacacagtttattagccccaaatatccatcaatatttgaacaaataaattgtggtatattcaaaatggaataccatatggcaacaagaatgaccaaactacaaaagcatacaatatgaatgaatcccataaacctaatattgaatgaaaagagttattcagacagatgtagtgcctcaggcttgtaattcagcaccttgggaggctgaagcgagtggatcacttgaggtcaggagttcgagaccagcctggccaacatggcgaaaccccatctgtaccaaaaatacaaaaattagccaggcaggatggcatatgcctgtaatcccagctacttgggaggctgaggcaggggaatcacttgaacctgggaggcagaggttgcagtaagctgagattgtgccactgcatgccagcctgggcaacagagtgagactgtctcaaaaaaaaaaagaaaagagtcattaacagacagacaaacaatatgattccatttacataaagttcaaaaataggctaaatgaatctatgctgtaggaagacagattagtatatatccttgtggggggctgtgaatggatgagtacaggagaggaatgactttggggtgttgacagtgttctgtttcttgatcagggtgctgtttatatgaggtgttcactttatgaaaattctttcagttgtgcacttgttatttactcaccattctctatgtaagttagattgtgacaaaagcgaaattaaaaagaaactaaatacccttgttgttgtttactttccctaaagatagagagcacatcgtgtttatttctaatgcttattcaaaggggtagagactctgagaaaggatgaggtggcrggataactacttacaagagtcacagttacggggctattatttcctgggcatggaaagagtagatcccttccagcctagccatttcattcttattgtcttggaagcaaactgtccagctgttcttcttaacgtcaggttaacaatgattgtggtcattccctgctgcatgggtcaggctgtgagacaccctccccttaaatttacatagagacagaaggtatagacaggtgcaaatgggaagggaacagcgtatttctccactgtgtgcttatgtccaaattggaaaccagccttattcttgctcactaattattaaggaaaataatttttaactatcaggacactgttcttcaaatggtgattgggtgaaggagattttctttgagttctgtgaaatactaaaaattctatgtgttgataatgactaaaaatatattttccacttgtaaagacaaaacttctgtattgcaaagttattttaatagaataaaatcttagtttcttgagtcagtcttttgcaaatagggttccatgtataaactatcaagaaaatatttccaataaatgcactggggtaggtttagatttatttgacatatacaggaatatttgagggaagggagcaataaattcatctctttaatttgctgcaggctttccttagagggagcgcttttttagctggtgttaagatggagaaaggtgccttctatcgtgctgttgctgaattccctgctccagaaacatgcagaacattagcatgacccaactgcttgaaagcaaacaagatgctcttgtcttaaaaagcatcatttcggaggaagaaaagccataatgaaccctccctttttctttttcttaactgaggagtagcaaatggtatttaagctgttatctggcaacaaaagtttcaagtaatgttttttaaaaaagcctgccaacacttctttctgctgggcactgatatagctgagttaaaggccctttcgagatggagaatatgacaagaaaagttgcacacccctaaccaaagtgggctttccaagagctagaataaagccacttcattaaggtttctcacactggtgttttttggcagcatttttcaaggatcatttcctccatgggggaaatgaagtggcagtgtctttcctaactattgctaaaggtgaagtaagaatttgaattgagaaaggcagttaaaatagtatctgaacttttgaacttcctgatcagataattattcttgaaactctgtataagatggaaaagagaattaatgcctcttaaagtgtttaattttagaggactatcattattaaatagtactccttctataattttttgattgttgagtacaggcatgacaagaatttataaagatacttctgattgataacatagggtataaacagaaagttctcttaaataggaaggtgtatatgtttggaaattggacttgtctcttttgcttagacgtgtgtataaattaatgcaagatatttgtctatatctcaactccgggtctccctcctgcatatccaactacttactagacacattcccttgaatgccccgtaggtactttatttyaacatattcaaaataaaactcatcatctcagccttctcctgctcacccaccttggccctttactactgtttcctcattcttttttctattaatcatcgttaagccagtttccaaaatcaggcatctaggtatcaaccttggattctgccatcactgatgccacataccctaataggccacttctggtaaatttcctaaatccactcactttcagcaacccactattgcccatctacaggggaccactatcattctaccacttgactctttcaacattctgctaacaagccttcttgtagcccttcactcttttgcctccttcaagccatcaccacgagagggatccaagactcaactctccttttttttcatttctataccaaaaccattctttgggtttctgttcttaggatgaactcctcaacatggtgtgtaagattctatatactctgatcttgaccctgcttactactctcgctgatgtgaagcctcctgttcctattatctctgagaacacccaaccctgcttggtggcagcaagggacagaaaaagcacttgaggcagcaggctgtcagatttgctaatagtgcaacccaactcataaaaaccaccaagtccaagacaaggcctctttttgtgaagtaacaataacaagtagaacagacatttagtcagttttcactggctgtaactgtactagtgagagaaagccctgctccacagtttcttgcatcactacactctgggaagccccagtactttaccatgcaagtgtagccccacatcatctcactctttgccgtgagtttaaattcctccaactctatccaagggtccacgttcccctatccctggatgccatgtgtttcattgacatgagttttcctcctattaagcatggaggggtcttataagtggcgctgtgaggacagatgcttgcactttgtcttgacctctgcttcagcaagtgtattgtagctacatccttagctcactttggttttagtctcaagatcatcccagtcccctcctctatatttggttcwtggtttcatatactgttaaccaggaatgctaaaaatattaatttggtgcattatatttatgcgaacacttgagatgtttcaagcatgcaggaccacctgcagaatctctggaagggtttatttcctatgcacacaattagcccaaaatctttttaatacaatagatttttttatgatactatttgttacttaccttttaccattttccttatcccacctatggctccaagcagactaaatttctctcaggttcttatttttgttgtgctctctgtcttagtattttcaggctgctataacaaaatataccatgaactgagtggcttataaacaatagaaatgtatgtctcacagttctggaggctgggaagtccaagatcaaggcagtggcagatttgatgtcaggtgaagacctgtttcctggttcatggatgggggcttctcactatgtcctcacatagtggaaggggcaaagcagctctctggagcctctttcattcataagggtactaatcccattcacgaggactctgccattacaacccaatcacctcccaaaggcctcacctcataaccttatcacatgggtgattaggtttcaatatgtggatctgagggggacaaaacattcagatcacagcagtttctttcaagacttttacacacaggttgcctccagatcacaaggctcttacccctcttttgttcttggctactttataacatccacttagacctcacttccttcaggacacctaggttagacctttgcctgtgtgcttccctagcaccttccactcccttcacatagcacctaacacactctgttgggtttctctgaggtatgtaagctctgtaaccgcagggttcctgtctttcttgttcatccttgcatcttcaaagcctgccgcattacctggcccagagcaagtacttaatgatcatttgttaatgaatgaataaatagatttttccattaatcatctaatcagtgaatttacaattctatgcaattctttgatgctctaagaaattgaagttttattttctgaagttatatattagttttatttcctaaggaatttgatttatccttactttaaatcataactacccagtggttattatagctatgctgccatatggtaaaacacatgaagcatctaatattgccttaagaaagctgtttcacagtaaaaactcttcaggcccttctctcggcacttttcattttatgttgaaattattggtgtttgtatctctcttacctgtaagacattaggtgcctcaaaggcagtgaccatgtgttattcaactttgtatcctcacaaccttgtatctagtgcagtgttggaagtcagtaaatgtttatataaatgcttaagataggccagaatccacatcttggctcaaaaactgtataactgccaacacccatctctgtacttacactcccaaagcctcagtttctacatctgtaaaaatggggattctgctgtttaaaggatcatcttgcagggttgttatgaagtattacataaaatataatgtaaataaggaactcagcatagtgactgaaatataggaattatgaataagctaggatggggataaatctaagtttctttgtgaagacatatggtgtgtcaaaatgttaatttttcactgtcacaggctggcaagacacggtcttagatctagtaaaattgttgcaaaaagaaagcaaagaggcaaacttcccaacttttatattaagaatatttgtctgaaatataaaacaaagtgagaaattcaatgcaaataaaatacactacaggaaaatttatagagtgctcaaatggatgagttgcataatttgtcttatgaatatttactaaaagcaaaataaattggacaaataatattcttggactgtaaatcattgaaaatgatatatacagttggagaaaaggacaagaaaatcatagcaggacctactctttcctaattacaactccatagagttgtctatagtgtgcttgtttttcattaattttgtgattatccttcccttttctttgaaataacaataagaaaacaccaaggaaaaaggttctgtagtcataatatgcttaggaaagtcaagatgttaacattcacattctaggactgggaaacaaattttaaggaaaaataactttacccttaagccttaagcctcaggtctcccagtgtaacatgtttcaatttgctgagactaaggtgtttggctggattgtttgctgttgtctgatagagttcatcttaaagtagtttctattcttgtatgggtttgtctgacaattttcatatcatttagtgagaatttgtatttttttcaattgttgcctattcctctgtaattattgtaattgcatcttattatataatttgcgtaaatatatgcaatcatggaattagaaaacgcgggtggtgatatgcagtgtcacaactgcagtggttaaagatgtgtgatttttttaatctttgaaaaaaataaaagcgaagtaaatattgtaatttcaggggaaagcgttttagctgtctaaaactgattgcccagagaaatcaaccaaacatttttatttagacatagataagaggtttcatgtttttgactgttctaactcagagatttggaaatcttggttttaaaatatcagtttgatgactgctcaaacacttataaagtttcaatattaactttaaactataaaatactgaggatcgtatgcttctaatgataccttttctgtaggttgttatcaatgtgagtttgaataagcatttattaatactgtgaataagatgcatattatcaatattaacgtctgcatccatacagkkggagrtatttatgttgatgtagacaaagacacagacagtggaaatttatatgcctttcaaaatcccagtgactataaaattctgctcctctgactatacattaggtaaatggtatatttaaataagtggtcaaggcaaaaaaaaaaagagcataattcaagttcagcacccactgcaattgtagatgataaaaatgaggcattcatcaagctaaccctttcgcctctagaatttcatgtgcactgagagaaaagtccattgatctacattcagctcttaaaaactgcacttgctgttagaagacagaacatacactcaggaaaaacttcaggctgatactgctaagattttaacacatttataaaacttcccatcaatacctaatttattgagagtttttagcatgaagtgttgttgaattttgtcaaaggccttttctgcatctattgagataatcatgtggtttttgtctttggytctgtttatatgctggattacatttattgatttgcgtatattgacccaggcttgcatcccagggatgaagcccacttgatcatggtggataagctttttgatgtgctgctggatttggtttgccagtattttattgaggatttttgcatcaatgttcatcaaggatattggtctaaaattctcttttttggttgtgtctctgcccggctttgctatcaggatgatgctggcctcataaaatgagttaggaaggattcyctctttttctattgattggaatagtttcagaagaaatggtaccagttcctccttgtacctctggtagaattcggctgtgaatccatctggtcctggactctttttggttggtaagctattgattattgccacaatttcagatcctgttattggtctattcagagattcaacttcttcctggtttagtcttgggagagggtatgtgttgaggaatttatccatttcttctagattttctagtttatttgcatagaggtgtttgtagtattctctgatggtagtttgtattgctgtgggatcggtggtttgattgcgtctatttgattcttctctctttttttctttattagtcttgctagcggtctatcaattctgttgctcctttcaaaaaaccagctcctggattcattaattttttgaagggctttttwsgtctctatttccttcagttctgctctgattttagtcatttcttgccttctgctagcttttgaatgtgttcgcccttgcttttctagttcttataattgtgatgttcaggtgtcaattttggatctttcctgctttctcttgtgggcagttagtgctataaatttccctctacacactgttttgaatgtgtcccagagattctggtatgttgtgtctttgttctcgttggtttcagagaacatctttatttctgccttcatttcgttatgtacccagtagtcattcaggagcaggttgttcagtttccatgtacttgagtggttttgagtgagtttcttaatcctgagttctagtttgattgcactgtggtctgagagacagtttgttataatttctgttcttttacatttgctgaggggagctttacttccaactatgtggtcaattttggaataggtatggtgtggtgctgaaaaaaatgtatattctgttgatttggggtggagagttctgtagatgtctattaggtctgcttggtgcagagctgagttcaattcctgggtatccttgttaactttctgtctcgttgatctgtctaatgttacagtggggtgttaaagtctcccattattattgtgtgggagtctaagtctctttgtaggtcactcaggacttgctttatgaatctgggtgytcctgtattgggtgcatatatatttaggatagttagctcttcttgttgaattgatccctttaccattatgtaatggccttctttgtctcttttgatctttgttggtttraagtctgttttatcagagactaggattgcaacccctgcctttttttgttttccatttgctggtagatcttccatccttttattttgagcctatgtgtgtctgcacatgagatgggtttcctgaatacagcacactgatggctcttgactctttatccaatttgccagtctgtgtcttttaattggagcatttagtccatttacatttaaagttaatattgttatgtgtgaatttgatcctgtcattatgatgttagctggttattttgctcattagttgatgcagtttcttcctagtctccatggtctttacattttggcatgattttgcagcggctggtaccgtttgttcctttccatgtttagtgcctccttcaggagctcttttagggcaggcctggtggtgacaaaatctctcagcatttgcttgtctgtaaaggattttatttctccttcacttatgaagcttagtttggctggatatgaaattctgggttgaaaattcttttctttaagaatgttgaatattggcccccactctcttctggcttgtagagtttctgccaagagatctgctgttagtctgatgggcttctctttgtgggtaaccygacctttctctctggctgcccttaacattttttccttcatttcaactttggtgaatctgactattatgtgtcttggagttgctcttctcaaggagtatctttgtggcgttctctgtatttcctgaatctgaatgttggcctgccttgctagattsgggaagttctcctggataataccctgcagagtgttttccaacttggttccattctccccgtcactttcaggtaaaccaatcagatgcagatttggtcttttcacatagtctcatgtttcttggaggctttgttcatttcttcttattcttttttctctaaacttcccttctcgcttcatttcattcatttcatcttccatcactgataccatttcttccagttgatggcatcggctccaaacccacaggcaatatcatactgaatgggcaaaaactggaagcattccctttgaaaactggcacaagacagggatgccctctctcaccactccttttcaacatagtgttggaagttctggccagggcaattaggcaagagaaggaaacaaagggtattcaattaggaaaagaggaagtcaaattgtccctgtttgcagacgacatgattgtatatttagaaaaccccattgtctcagcccaaaatctccttaaactgataagcaacttcagcaaagtctcaggaaacaaaatcaatgtacaaaaatcacaagcattcttatacaccaataacagacagagagccaaatcatgagtgaactcccattcacaattgcttcaaagagaataaaatacttaggaatccaacttacaagggacatgaaggacctcttcaaggagaactacaaaccactgctcaatgaaatcaaagaggatacaaacaaatggaagaacattccatgctcatgggtaggaagaatcaatatcgtgaaaaatggccatactgcccaaggtaatttacagattcaatgccatccccatcaagctaccaatgactttcttcacagaattggaaaaaactactttaaagttcatgtggaaccaaaaaagagcccgcatcgccaagtcaatcctaagccaaaagaacaaagctggaggcatcacgctacctgacttcaaactctactacaaggctacagtaaccaaaacagcatggtactggtaccaaaacagagatatagatcaatggaacacaacagagccctcagaaataacactgcatatctacaactatctgatctttgacaaacctgagaaaaacaagcaatgcggaaaggattccctatttaataaatggtgctgggaaaacaggctagccatatgtagacagctgaaactggatcccttccttacaccttatacaaaaattaattcaagatggattaaagacttaaatgttagacctaaaaccataaaaaccctagaagaaaacctaggcattaccattcaggacataggcatgggcaaggacttcatgactaaaacaccaaaagcaatggcaacaaaagccaaaattgacaaatgggatctaattaaactcaagaacttctgcacagcaaaagaaactaccatcagagtgaacaggcaacctacaaaatgggagaaaatttttgcaacctactcatctgacaaagggctaatatccagaatctacaatgaactcaaacaaatttacaagaaaaaaacaaacaaccccatcaaaaagtgggcaaaggatatgaacagacacttctcaaaagaagacatttatgcagccaaaagacacatgaaaaaaatgctcatcatcactggccatcagagaaatgcaaatcaaaaccacaatgagataccatctcacaccagttagaatggcaatcattaaaaagtcaggaaacaacaggtgctggagaggatgtggagaaataggaacacttttacactgttggtgggactgtaaactagttcaaccatygtggaagtcagtgtggcgattcctcagggatctagaactagaaataccatttgacccagccatcccattactgggtatatacccaaaggactataaatcatgctgccataaagacacatgcacacgtatgtttattgcggcactattcacaatagcaaagacttcgaaccaacccaaatgtccaatgatgatagactggattaagaaaatctggcatatatacaccatggaatactacgcagccatraaaaatgatgagttcctgtcctttgtagggacatggatgaaactggaaatcatcattctcagtaaactatcacaaggacaaaaaaccaaacaccgcatgttctcactcatagatgggaattgaacaatgagaacacatggacacaggaaggggaacatcgcactcgggggactgttgtggggtgagrggagrggggagggatagcattaggagatatacctaatgctaaatgacgagttaatgggtgctgcacaccagcatggcacatgtatacataggtaagtaacctgyacattgtgcacatgtacccaaaaacttaaagtacaataataataaattaaaaaaagaatgaaaaataacaaaaaaaaaacaaaaaaacaaaaaacttccttggatrrtaataataatmatttttttctatttgagaatttggaatgttaacagaaaacatgttttctaccaaaataaaggtaacagtgatctggccatctgcattttaaaaaaaaaaaactcattgaaatactcctgtagaatagattgctcacttttccttgcttttgtagttcatagtttttaggaaaaaagtatcttttacctttaaaccaagaagggtatccaaattttgattgaaagcactcctgtacctcggttctcttaagtgtttctgagacatgagtttgcaggtaggaagctggtacggatgacacaactgggacagactggactaagccagcctcatccagctacatgcagctgcttcgcctttgtctccaaaggactcatcccttgttccacattttgaaaacaaccatgcatttacaaagaaattctcaatcttcttgttttctctttaattctctttaaaggaaggaaaaaaattctgtatgccctattcaagtgctatacattggtcttagggactggaactgaaaacttttatgatcaaaaaattttctcctccagttgccattctgttctaaattttactttattttttgatgtaggaatgtttctttaaacatcaagattttagtttccagtagaaaactaatgaattattaaaggatgggaacttgaagcaatctttagtgcttaataaggagaaaccacaaggcttgaataaactgttccatatttctcttttaatgctccgtttaaaatctagacggtgtgtcataagccttttaaaaaaaaacgattgtgtttaccaatatagaatatgagatttttgtttctttttaggtatttttcttgcaattaggatatactttgatgttaccatggctatggcttcacgttccaaacaatgagttttttcttatgtttgattaaaccaaaataatgttagtataatttccctgtaaattattatttgttgacaatcagtgttaatgccactaaaaattgagtataaatatcaacaaagtacattggtaaatgattaacaggacaaatgaaaagaaaaatagaaattctaaatagaattgctatacttctccagaattcattcctcctagaataactccctcagggtgaatgaaaagtcaggtgggcaaagctgtgagctccacctccttcaactatacaaattttgatttggtaaaggaaattttgacctcattatttcaccctgcyttgaaccaagtttttatgcacctactttattattgctctttgcatgtacattaaaacaaatattttattttgactttaacctagaatgagcactacagttataagcaattgacacaagataagtctaaaagaaccaaaaaaacatagagtaagattcgtgatagacaaaaagtgacttgctggcaatattaaacattgctaaactcaagcaacgaaaaattaggctaaatattgtcaacagtgtcaaaatgttctccattcataatctattattgatctacgataactaataaatctgtacactgtgattcatgtttttggaaaattgaactcccaacttacacacaatattccagttgcctctgaggaatgaggttataaataatttaaaattttgatgtcttgtttttctttaatagaaaatttattgcctaggtatagtagtgtattagggttctccaggaatcaaaaacaataggcattataaataaataaatatataaaaatatatatttatatttgtatgtgtgtatttattataaataattggcttatgtgattatgaggctaagaagtcctaagagctatagtctccaggctggagacccaggcaagccagtggtataagttctgatacaaaggctagtaggctgaagacccaagaagagtcttgaagtttttcagtttgagtccaaaggcaggaaaagacccatgtcccagctcaacagtcagtagtaggtgctccctcttactgggacttttggtgctattcaggtcttcaactgattggatggggcccactcacattagggagcagagtaagctttactcattctaccagttcagatggttgtctcatccagaaacacccagaataatgtttgaccaaatgtctgggcactccatggccaagtcaatttgacacataagttaactgtcccactaggtaacatatgaagaattgttttaaaaaaagttattcagctgggtagaaattaccatctgtctagaaaatagagttggagaagagaatgaagctgataatgtgcctgaaatcttttttctggcttctattccagtctgagagtcaggaaaagaagagatctctaataaaatgcttctaatgtttgggtcatttttaccacaacatcagtaatggaagagaaagtcaaaagaatgaggctccaggccaggcgcagtgactcacacctgtaatcccaacactttgggaggccaaggcaggcggatcacaaggtcaaaagattgagaccatcctggctaacatggtaaaaccccgtctctaataaaaatacaaaaattagctgggcatggtgccacatgcctgtagtctcagctactcaggaggctgaggcaggagaatcgcttgaaccccrggggcagagcttgcagtgagccgagatcacaccactgcactccagcctagtgacagagtgagactccatctcaaaaaaaaaaaaaaaaaaaaaagaatgaggctccaagatgagcacctgagcaccaagcagtcctcatccttctcactgctttggagtttgccagatttgggtactttgatccctagggaataaacactccttagctggacagcaacacaaataactcttaaatgaactgcgtctgttacacacacacaggcacgcatagagtttcaatggggtttattgaaataaagtggcctctacactgaagaattgtaaggactgtattctatccatttcctgtttacttctccatttatttgtattcataggtaaggtttactagcacatcattaagatactgtaaaacagcattaaaatcctaccttttaatttcctcaggtaagcgcctctcttgtcttagcaatgcctcggttctcaggccttgtttatctttctctgtaattgtgagtgaggagctttctgaactggatrrctgcctctgattttaccccttcaaattcatcttccttgcagctgattgagtgatccctctgaagaacaaacatgattgattgaagaataaacgtgccctcccaacttaaacagcttccaggccgcctcagtaacgtgaggattgagggaaaatgcctcagcctggctcagacagtgcctcccgtcttgggctgcttggctcctctcttcccattcagccttgttactctccagaagtaccaagcagcttgtaggttttcaatgccccaaggaatgtgtgcgccattcttcacactgttcttgctcctagatggctccccacatgctgaaaacccccaccttcttcccttaatgggtttcgatttagtcttcaaggcatgtctcaggcatgttcttttcccaaaagttttctgacactccctctgttaaaggacaaggtgcctttcctctgtcttttggaggaaatttaccagtgatcacactgagcatatatccgatagtctcatctcctcagctataaagtctttggttttagaacctgtattaattcatcttaacatcccctgtgcctaacagagtctaagtgctgagtaaatgggggctgaactaagctaaattccaaagatcaagccaagagttcttagttacttgaaaaacaaacaaacaaacaaacttctgacctttcttcattataatcttggcaaatcagaattcctttgccctaaaataactgtaatcaaggagttgacgctaaagtgatgatgagaactgtagtatcactacactaatgaatcttttagccttgtacaagaaataatagaaaaatccataaccagtttcacagagaactgctaataaaaatcagaaaacactataaatacggcattaaaaaaggtaaaaagctgggctgaagcttaaagatggaaatatttgcagaaaactaaggcagtgagaaatgatgtcctgtatcatgttttgatgtgttatattcatctttctggtgatgactttatttcacatgtaaattaggaaaaagggaaaggaaagcatatccatatcattcatgtccagggaaggaaagtgaagtatcttagaacagcttctcaagtcagctctacatagctgggcttttgaagtgctggtgaattttttttaatctcgccttctacaaagaaataacaaagcttagaaatttaaaaatccaggctactgtcaattctgtgactttccatgaatcagtctcgttattctttgacatcttaaaagaaaacagccatatgactgataatctttggtgaatttcagatgcatgtgccatagaaactgtgaagaaatttaaatcttaaagtactgatctttgggcttcttaaaaaaccttccagttcagatataatgtctgacactaaataatcaacttatctactttactaaaaatggccagtaccccaaactaacactgtaagtttacccagttgggaattttaaattgtggcttactctgagtgcttcatagaagttcccactcttacctccttctgaaaagttttttatgcatagtcacatgctgtgtacctgcattaccttctaatactggtcacattgcattgaatcagggaacaatggctggcccaaagtcagcctgtgggctaatcttataagtagatatggccaatctggcatttatactggagagtaactgacaagccaatcagatactctcttgaagagtttgaatatggaaacacaaataatagagtaatgcccaagcccccaaacagaaaacatatggtggaaagtagaatagagagctcaaggtgggttgctgtagtgtaaaccatcatttagtcatacttaaggtacggtcatgagaataggaaatagccataatgaatgagaagtgaactgctaatggcagagaatgtagactacctgcttgagagatttggtgaaggaaagcaataaagtaatattttagtgggaattatgcctgagagactttatttagagtagactggtagtaggaacaaatttagagtctaaggcatagcttgaagatgaaagaaaaaagaaagttacaaatgtggcatggccgcagaggagaaaactgaaaccaaactgggaagacagagtttatccttagaaagagagaaaaacatcctttctctgacacagaaggaatggagaaaagatagtggaagacactaagaactggaaagaaaatgagtgaaaaggggctcttcttttcccctcttggggactgatcttcagtacaaagaaaagtaagaaatacagaacaagaaaacaacagagaaaaatcaatgaaacaaaaaaatgattcttaaaaacagtcagtaaaactgataaacctctagtaagactcacaaagttataaaacaagaaagaagacagaaatcaccaatagcaataataaaatagggatttcaatacaaattctgcagccattacatggataatgggatactgtgagcagctttacattcataaatttggagaaatagaccaattctttagaaattacaaactaccaagcctcagccagaatagktctataaccattaatgaaattgaatttgcaactgaaaaactccagaggtatgcaatactaattcaccatttgaaagtcaataaatcattaacagagtaaaggagaaaaacatgagtatctcaactgacacagaaaagcatttgacagtatccagcacccattcgtgataaaagctctcagcaaactaagaatgagaagggaacctactcaacttgatacagaacatctacacagaaacccttacagcatatatcatacctaacagggtaagactgaatactttcctttaagatcagraacaatgaaaggacgtttggcatcattcgtattaagtatggtgctggaagttccaaccactgaaataaggtaagaaaaagaatataaaaagcatatgtattgtaaaggaagaaataaaactgtttctatttttagatgacatgattattctatttaggaaattccaaggaatctacaaaacaagtactgctagaactaataaataaattcagtatgattaacaggatgaaagaacaacatgcttaaagcaattgcatttctgtattcctacgatgaacatgtggaaatagaaatttaaaacgtaaaacatttacaatcactccaaagtaaatgaaatacttaggtataaacctaacaaaaaaatgtacagaatctgtctgtgaaaaccacaaaatgccataagagaaatcaaagatctgaataaatggggagacatactgtattcatgtatcagaagagtcagtatagtaaatatgtcagttctccccaaatttatctatagatttaatgtaattcctatcaaaatacaagcaagatatttttggagcttattctaaaatgtatatggaaaggcataggcccaagaatgcctgaaatgatcttgaaaaagaaacaaagtgagactattcactctacctgatatagctatggttatcaagatagtgtggtattaccagaggtatagacacattgatcaatagaatagaatggagaactcagaaatagacccacacaaatatatacaactgatttttgacaatggtgcaaaagctttgcataagaaacttttcaaaccagcctgggcaacatggcaaaaagtctctactagaaatacaaaaatgagctgggtatggtgacacgcacctgtggtcccagctactcgggaggctgaagagggaggatcacttaatcccaagaggctgaggctgcagtgagctgtgatcacaccactacactcccgcctaggtgacagagtgaaaccttgcctcaaaaaaaaaaaaaagaaaaaagaaaagaaacttttaagaagaaagtaagaatagagggatgaatgcatcttaaataatgttggtgcaattgaacatccataggcaaaaagaaagcctataaaagggcaacttgagggatccttatggcaatgaaatattttctatctcaactggatcagtgtcagtaccctggttatgatattgcagtatacttttgcaagatgttacaattggggaatactggtaaaaggcatataagatccctttgtattatttattgtaactgcatgtaagtctaattattgcaaaaaaaawtgctttaaaaattaaacaatattacctaatgaaaaaaaaaaaggagtgagtggacaatcaggaacagagaatggagacttacagccattggacggggtttggaacagtccatgtggaagtacttgtttgtcaactggagatgagtaaaaggattacccacagccgagcactgtggctcacacctgtaattccagcactttgggaggctgaggctggtggatcacttgaggtcaggagttcaagaccagcctggccaacatggtgaaaccccgtctgtactaaaaatacaaaaattagccaggtgtggcggcaggtagctgtaatctcagctacttgggaggctgagacaggagaatcgcttgaacccaggaggcagagattacagtgagctgagattacaccgctgcactccagcctgggagagagagagaaactccatctcaaagaaacaaaacaaaacaaaaaaacaaacaaacaaaaaaaacagttccgacactagtcccactgaggttagatctcatggatttgcagcagaacaattacgtgtatttggaaaagcctgatctcaagatatgatgacttcatatcacatctcgtacatactatactgatattcacagaaactataaactatcagctccaacaccttaaaaattaatggacattccaaagaaaatatacagcatgcactttcctgagcttttgcaaatgcatcaaatgaaaattctattgaaaatatggtcaaataagcacagcatgatggtacaaaaatgtgatgccaaggagtaggagagacagatttctgctgggttgtcttaatctgtgagtgtgtgagagtgggtgagtgtgtgcatctatgtaagttgaggggtaaggaaaggacctttacctccagataaagaagtaatatttctatctacaaagcccacaaaccagattctgttcagtagcattgttttcccattccactaagcccttccattccaatttcaactgcgagatgtgaaatgcagcacattgaagagatactctgaaagtatctagagatcatgcttctattgggaggagaagattaatttgacttaagtttctggagagcagatccattttgtgcatcttaatatcccctccacatttacttttatgtaagaacacacaagtatcttctgagtgactggatgaatacactccttttaatagatcaaactttgtgtctaacatttatcggacttaatggaggataccaaggcatttaatatactgttctttccctaaaatattcataaccagaatttttgcctgtcaccttttctctacaatgacaacttcgctgaagaattagttcaaatgtgtttctttgtttcctcatatactttcatatatgtaccaaagttccatctacaccatatccttggtgtacaatgactggagcatccacagttctatgagctcaaacacctagggtttcagaccaagggcaatttcaacttaggtaaccaaaagcttccaagaaaccctgaagaaatgtgtagtcctttgcgtccaaacattcctgacctgtacagacccatgagcagcaattagatttatttttcagtgttttgaaactaaggagagtaagtaattctggatggcctggtgtgttagtctgtttttgtaatactataaaggaatacctgagactggattatttataaagaaaggagatttaagtgactcacagttctgctggcttcacaggaagcatggcactggcatctgctcctggtgagggccccaggaagcttacaatcatgatggaaggtgaagggggagccagggcatcacacggcaagagcagaagcaagagtgagggagggggaaggtgctacctacactcttttaaacaaccagatcagtctcatgaactaacagcaagaattcactcatcaccaagaggatggtgttaagccactcatgagggatctgcccccacgatccaatgcctcccagcaggcctcacctccagtactggaggtcacatttcaacatgagatttggagggcacaaatatccaaacygtatcacctggttttcttaaagcaatctatttgaacttgtcaattcaaagccaaagacatagtttattattaccatcagagtcactcaatcttgaagatgatagggctgagaggaccagagctgagtccattttccttcctttagtcatcactgcactgaaattagttcagattaaaaagagtgagttctttgctttaaaatttcaaatgacagaggctctcatggaaatgccttcaggagtttcaaagcctccatcattaggtgcagccatccaaggcaaatatttgatacttcgtgaagagaagcgataagaagatatgtgtgtcctacaggatacattccataatggatgataatgttttaaatatatatatatacaaataaaaaccgagattctaattttttcaggtgtttcattagtaaatataaacatttcttccatctcttgaactgtaggaaatacaaatttccttttcaaagactctgttttgcatttctcaacattagagaggcaatattttaaaaggtaactagtgataaaactctctagaagagatggctaggacctagaaggacattttgatccataagccagcaacactgaaaccaggactttcaacccacatgcagctctttaggtaccacatgcagatttgatgggctctctggttacagaaacctggccaagttcgcagaactctgasagctccgtgcctcccactccagctgaaacacttgtgggaaaactgagcaaatggatctgcctcgcaggatcagaagaagtaggcaccagcaattccatggctcttctcttccttgtagttttatttttcttgttatgaaataaagcaaagtaatacaaaatttataaagtacaaagcaaattttaaaaagtaatgaatgctctaaaagagaagtcacttataattccactatcaagtgtgaatcacttttatctttgcatataaatcttttgcaaaagttaaaatagcatgcttatttagaaaaytcaactatcacccagcggcaaccattgctaatctattggtgaccacttggtcatctctttattcatacctacacacacaggtatctctgtaatttatgtaggggtcactctctatatcatgccttgcatctggctcttttattcagttgaatttcagagagatctttctattatcaagaaatattaaaaaaagtattttaattgttgcagagaatttctttaaatggacagatagatgttctagaatgtacgcagctaatccttcatttatgagtatgtaggttgtttctaggtttctcttctctgaaataatgcttcagtgaagctccttgtacatgcattcttgtgcttaacctaatagctccttgatataaatttctagaagaggaattagtggttcaattttgataagtatttcaggactgccaaaagaaaggttgtgaggacgtatgctgtcactagcaatacaggaaaagatggattctccatacctttatcagtattactaatatttctctaattttctaggagaaaaatgaaatattaacctcatttgttaggtaaagatgatgggccatttttactggtaatttttcattaatagtacaatcaaacatcttttcagatattcatttaccattttatttcttttgtgaactgctcatttttaaattgtgattttcatcttatttaaaattgctttgtaaaggtttactttatattataaatatacacttcatgtctgtcaggtattgcaaatattttcccaatttgttatttgtcttttgatttatgatgtccttttactgtatacaagtttttaaattatgtatatattttaacaccttcaaataacacctagtacataatttcatatttggcttttgcatttttaatattgtattgcttttgtttttccttgttattcagagttctaaaaaatattttcatgaatatataaaatatattttaggaatgtaccattatttcctcaacattggctatattgatatttctcaacactaatagtgctgtattggaggatagtgaggcgatgaagagagagaaagatacagaggaagagagaagtagctgtaattcaaaactctagtaagaagagaaaaagcaaagtgaaactgtttcctttatcactattgggaaagggacaaagagttagcaaaggcctgatagtgatatcttgaaaaaaatgaagagaggcatgttaagaaaaagtagcccctggggaaaataaataattctttcttctgagtggcagagaactatagcacattcaatttgtgtgttttagtagacttataattttaattaagcctctgggttttttctttgtgcttgtcccttttgttttaatgggacatgaggtcttttctttttttccttatttgtagggtccccagtgacctctattgcattttgttactcttggcaacaataaaatgtatctattctctttaggcttgtctaataagtggcattattgcattattcaagcatttaaatttgattgatgagtttatccataaggttgttcacaaatctgttaaagtcatttattttttattctgatataattgtgcatgccattattaatgctgctttccagaagagtaaccacatgttgtagggcctaatttcaggttcaaaatggaaagtggtgatcttctcaatgtgtgatttattggaggaaaatggagcttgatggggacaatctgggagtacatggttgggagggaacccccagatagacttcatgttactttgctgttactcaacagtttgcattgtgggacttccagtgccagtcagggtgaaatatagtttcacattttactaccacctctattgtttctctctcttttctcttctaagaccagggaatagaacataaaggtcgacagctttatcctaatctgaattgttttgaatactgcacttgtattttcatccttcattgatttttaatgcaatgtgatgtattatagccatattcattacggtgtgctgcaccaaaattgtgcttttggaagtgtggcttttaataaaaggaaacacttgtgattatttgtgccatatcagctgtgtcacaagtccttaatatacgtaattcagtaggggttcttttcccaatttcatagcaataaaggtagcacattggctccattgccttacttaggtttcagagttgtttggaaacattaaggattctgattttagtttccatgccatttcatttacatcagatgagtgagtccatcccaaaaaatgagttgggtacgtatttggacagctacaataagtgagaagggtgccttattttgcaaatgggcatgtctactcctgcctagcctcatcatctgtcacctttgctctttagaatgtggcttcttgccaccctcaccctactatccccacccctctgcctgaagctgattaatcacttccaaggctgtttaggttctgttccacacctacactgcaaagttaaagtgtctgtctcccttatgtgcactttaaggacaagatccgggcctgtcatctgcatttcctccagggcttgctgcttaccatagagtccagcacaaggtaacatttaatggattcaattaagtgagcccaatgtcaccatcttagcatattgagccattaatacatggaattgattgttaaaatacggaggccagcttccttcaagccttactttctttcaaaaatatttgttgaatacttgctgttttggcacagagaacatagtggtgagatgatagaaataatccctggcttcagtgagttacaatctcatgaaataattcattagtcttgtttctccaattcacatcctttcaagtttcaggttgggaaaacaaatcaaatctcccctcatattaaaaaaaagtaaactaaaatactgcctctagatgtccaggtgcagggactcacacctctggtcccagcattttgagaggccgaggcaggaggatggcttgagcctagaagttggagaccaacctggccgagaccgtgagacctgttactataaaacattaaaaaatagaagggcattgtgttgcatgcccgtagtcccatctacttgggaggctgagacaggaggattccttgaactgaggagtttgaggctgcagtgagctatgatcatgcctctgcactgcagcctgggcaataaagtgagaccccatctctaagaagaagaaaaaaactgcatctggagctttgctacttggatcatagtgtagcagagatgcatggtatagagctatcctgtgcattacgatagctgctagccacatgtggctgttaacactgcagtgtgctaggtctgaattgagaggtgctgtcactgtaaaatacataacaggtcttgaagatttatatattaaaacctgttcatcatctcaataatttttagattgattatatgtagaaataatatttttgtagtttgaatttaataagatattattaaaactggggccaggagtrggggctcatgcctgtaatcccagcsctttgggaggtcaaggtggaagaatcacttgaacccaggagttcaagatcagcctaggcaacataatgatacctcatctctacaaaaaaataaaaattgaaaaattaattacacttggttgttttcatatttttgtgggattacaagataaaatttgaaaaatagatgtagcttgtgtttgtggcttgcattattttgctatttgaaagtccaagtatagagtgaggcacagcatagactggaggcacattgcttcacttcaaatcctgatccttccccctactcgttttgtggtctttggcaatttactaaatctgtctttcattctttgtcttatcatcttgtaaaatcaagatagtgatagtacctaactcaaaatattgttatgaggatagtttatatgtctaaatcatttagaacagtatctggcatagagtgcatactcttcaaatgtttgttgaataagtaaataaacccactggtcatgtgcaccttcaccccagtaggtagaattatcaaagaagtaatgcagtttttaagtagcagtttcgtgaataacctgtatttttctaggagcaatagtagcaattgtagactgacatggtgaacatttttgatggtttattagtttaatttccttctcctcactttcttcctctctccagaacaggtggaaggaaaggagcaaaactcaaatatattaatttcattactctctagtaggctttttgggagaatgattctgaaatggatggcaagtcaggaatttttttcttcgcattatggcagtttcctgttactttatgtaggtaccttgaaataaatctaacatatgaaaactcaagcttctatgttacagagtggattctttggatccattgaagagcattgtcagcagccatccagacacctccatgtattcatgtattcattaactagagaagagacactttgaagtcaatcaaaatttaaaatatttatgaagcctatatataaagggaagatatattggttgtggcagagacactcttaaagtggcctccaattcttgtctcctggtgttcacacccttgcgtgggacattcctcttgcaagtaggcaggacctgtaacttgcataaccagtacaatatggcaaaggggatggaatattcatgatgacacatatgcagtaacatgaaaataagatgtcagcacccatccttctggagtttctcctttgcttgatggctttcagaaagtatgcagccctgttgggggacctgcatagcaagagacttctggcagcttctagtgactgaatgtggcctctgccaacagccaacaaaacactgccaagaattaagttctcccaacaactggattaagcttataagtgaatccttccccagtcaaacctctgatgagaccacaccctgccaacaccttcatttcagccttgtaagaccctatcagaggactaggtatagtagtgccaaactcctggcccacaatacatatgtgttcttttaagctgctagtttgtggtattattgttattcatcaataaataactaatacactggcatttttacttkcccaaatttaacctccaagcatattttatggcaaaagcaagacatatgcattgaaattattgggtgatttttccttttcttctttttactagcatcagagggatttaagtatatgatacttagcagtagaatcagtcactatatttataatatttcacagcayttaaaacagtatatacaccaaagactttaggttggcagacaatgattcagttattcatatgttgatctgatataactatgttgttaggaatgtatgagacacatatatttgggtttctgaagacagatatgaactgaagacaattttttcaagttattagcatcttccaggtggtagttggaatactgaaatggattaaatcacctgatcatctgtagacattaaagaaggctaaggacagagtccctgaagtaacaacatttaaggatcatgcagaaaaagaatcagcaaaagaaaaaacaaaccaggaaggtaaggaagatttaggagagtgatgtcagagatggaaagagtttcaagatgaagagaatacgaaaaaggagaagcaaaaatgagacctgagttaattggatttaggaattaggaagtgactattgacttcagcaaggtggagtggaagttggatttcagtgaatcactaagttaggaataaagaagtagcggtgaaatattcacttaggtaataactaaagggagacattgaactaaggaaagagttktccttaaatgatgcaagagatgtttatgtctgttggccytgacaagttaccagaagaggttatcatatgggaaaggaaaagagtaattgttaaagtgaggtccgggggttgagagggaatatgccgagtggcatcacaaagaattagcytgagatggaatagaatacatctttctctgactagaggggaggaaactagcctacatgaggaagtagatgcrtcacaggtgtgggggataagtcagagaatgcacatgtcttcaattttcccatttgctgagagtaactagggtagggttgagtagggctttaggtaagtatgtaagtaggtaaaactgctgatggtaattagagggaaagctcactaaacacaaatgagagtcttgctgagtagaaatgaacttctaaggggcattgagaatttcaccaaatctgaaagtaatatcattatgaaatctcccttggaattaaaggtgaagagatttcggtttgtgtccagcaaagtgagaaacctgaactggggaaataccctgcagccccacttccaagctgttgccaaggccatccctcttgcacacatgcagactttgctcatscctcttggctgacaaactaggcttgtgttgtattttaccttagtatagttagaggaagaaaaaattaggattagttcttcagattggaaataaggaattccatakgtaggagatactctttgcaatggggtgtggcatgcccactttcttcactagacagtgtattgcagctttgctttcttcttcctgttggaaatatattttcagtcaccatccctgttttcccccaatttaagcgaaacaggcaagagccatccctcatcgttctctgagattgcttcttttggaaactgcacacattatawttcttagaggtagcttttttaaaaaagaagaatctaagaccatgaaactggaatttttgtccatttaatttcttaaatggaatcctgaaattttgtgtctagggaaatggtctataaaaaaggcatcttctatatctagatgatctgtgtatgggtggagctctggcaatagttactacaaaggtcgacattcagatcttctgaaattattacagcagtttattctttcatttagtatagtgatcaaatacctgctatctgcctggtgctattctaggctccagataaggacccctgcttcagggagctaacattgttgtatgcatgcagaggggaaaaggaaagggagtgaacctgaaamtaaacaaatataatatgttttaaaaaaagatacattgaatcatgtttaagtatgaacaaattaaaatgaagagaggtgatggacaaaggctaggaaaaagaggctggctttagacacctaaaatctacagatttcagaagatttttkggttgtgaccagacagctaaacagtctgtgagtactttggcaagaacataaatggcgtaagaactgctgtgtccatatttttgaaagctgactytaagtcaggagaaataactatcttctgtgaacccgggagaagagacgtatccttgacattagctgaggtcagtatggccagtcaattcttttctctgccaaaaaaaaaaaaaaaaaaaaaagcccagaaagtaaggaaaacaagagggcaggagcctcatagatgaggaaaatcatatctttaaaacacagtttcttgttgataaataatcctcttactgcactggcaacaggactctctcctgccactccccctttgtcttacattcttaatcagttgattacataccactaaaaatacacataatgccacttcctcctttcctgatcacagccacaaacctccattttccttttttgttgttgtttgggcttttggttctgaactttgtgtttttaactacatttagastctgggaaatggaggtttctgaggttacctttgaaacatctttgagtgacaggctccctttggccacacagaatatcaagagtggaataaaaagtgtggattcagttcaaactccggtagcttttttcaactcagaaatggaatctggctttgactagccccagggaatgtaaacagaaccttacctgtaattaacctagggcttctcttgttctcaatgcaaatggagttayaattgtatttctcttagtagaatagaaaggctgtgtttcagaggggagctggcagttgaatagaggacaagttatctgtctaactgtgacagctctctcctatctccttctagaaaagctgaatgatgataaaactgtagttgcatttgatgtaagacatatggtaattactataataatattatcacccgggttctgcagtggctttgtcagtgaggtgcaatttcacatattgtctgcgataaaatccccgtttttggttattgatagcaatgcctttctcaaatgctataggtattttgtgacagctgcgaagttcctgcttcatatccaggtaattgggttgagaataaggcctgcatgctaaaacctgccgatgtgagaagtagtgaaagcccagggagtactgtgaatattttggtagttattaactgactaaatgggaagcctttgctagtcagtgcttctgaagcaatcctagagaaaaagaaagaaaagaaaagaaataaaggcaatctcctttagaaagcctctgttgggtcttcaatgacgatgtgcaaattttgagctaatcaattatattatgaatctatagataatatttaaaagctatatacagattcacaaattaattgctttcatgtcattctgctattgattgtttcataagtcaaattttacttggcttaattactggtttaatagaagttatttcagcataataagtatgtgaccatgtaataaacatttttatttatttgtcacagaaggaattggttctatagtatattagcctgagcttagctgtatatatttaatttcatggctgtttccagggaactgaattttgaagacactaacagcatgttaaaatggactactataaatccttttttggaaatacgtgggaaataaataataaataacgacagtgtgtcaaagtgattttattgcttagattaataaaaggaaagtaatacaatgtctggataggggaaaaaatcagattatggggttttttccttgttaatgttatcccttgtgcagaattcattttttaaaaatcccaccaaagacccataaaacagtgagctctattctggagttattatttaggcaccgataatcagtagtggcaacattcagtgagtaygtcagagcatactcttgttgaatcaaataaatatgtatatgtaaaggtgcagattacaagttaattctactatgaagtgctaaataactagaaataatgtgattaatttggggataaaattggtgttgtattggttggttgttatgatttaaattccttggttaattcctttttttcctcataaaggggaaattgcccagtttttkaataattgaactgcaaagttagcacaaaaactgaagacctttggccctagcatttatagaaaaacacttgggatttctataaaaaacctatagcaatgtggtaatttaaatcattttgatgcaattcaattcaagggttgcaattattaaatgcctgcaaagtccagacactttctagcccttgggatacagcgatgaacaaaattaagttctacttccatgagcttacrctgattaggcatggcttctgtgccagattatgggtataatataacatctcaggaatacttgctaatgacacaccagatgaagctgagattctgagtggccatttgttactaagagaaagaaccaagaattagctcctgtttgactccccaagcactctgaaccctagtgtagtggaaagattatcttctgcagaagtaaaaatattctggatttcccaaaagaagtttgctaacataacaggcaatagatacctctagttgggtggcatattttgcacacgtttgttaactcaccgtattatttccttctycaaattgttctttgactattttccaagggtcttagcatttttacattcatttgaagctcattatacaattaaggtattatgcctttttcatgtgtactataactagtgttcccacctatgattttctttattttgttggtatatacctttttaaagcaaatgtctgattcattgtctttaatttggagcaacagacttatcttcagatggaagtaaaaactcaacttgtagcttattttgttgttcatagtctaaaatgtagtaagaaaaaggtgcaccccaagaataatggccagtgtgaatgagcccttcttcttggagaaaagatcatgggccagtttcacagaaggacattctttctttgagattttatacacatgtgctattgaaatttgaaggagaagaaatattttctatggcgtagttccctttgtagggtcaacccttaatttacagaacattattataagataatacgatagtgtttgtgaggttgtccaaagggaataaattttataatcacttatcttttgaaattgcattaattgttgaactactgataatgaaattttgatactaaagattttttctaaggcagaggttatgtggtcatgtggtggaaggagcattggactttggactttgtaccagaggatgtgggttttcacttaaaaatgaggatatgaacctgatgatactaaractgaaaagacaattcaagtcaggagactggaagagaagcaggsygtgtgtgtgtgtgtgtgtgtgtgtgtgtgtgtgtgtatgtgttagaaaggggagctataagagacatattttggatacattcctcagagatgccgtgttgagatgttttgtagataactgaatatcatctacctctcaagagagtggtatgggtgatagaatataggtctgttaacaacatagcagcactaatrgaagccaaagagaaaaacaaatgacttggggagaaggtgtgaaatgcaagccctaaactgaccctgcaagtggtttttattattttccttgtttcttttggtttttgatgtttgaacatacatcttttctcaaagataaaagttttgcaaaatcacacagtaaaaataataggacttatggggaaaattgggatgtgacagatcactcaaaactcatagatgtgtaagcataacactaacaaaaataacaataaccttattaaattatcagcacccttaaaaagcatgttaacttcatgatgaagtttttagaaggaaaatatttgatagcttactggaagatggtgtaaggaagggttgaggcgtctgagttatagaggaaagagcagaagcaaacactcaaggcacttccaagtcagaatacatgcacacataaaggaaggatggaaaatggatgcagtcagctggctagtgcactgtgtgctcagctgctgttacttgttggagcaagatgttaggacygtgagaaaaaccactgtgaacctgtacctcacactgatgttagccccattgttaccagaggagcacatgaaagaaacacttttcttttcctctgacctgcctggccaaataatatttataattcattactttcagtaaggacaagagaacagaactytctgtattccaatttgaacgccttatgactagggtatcaatatctatttgccacaagctccaccacactctattgtcttacatcccctcatctcctatccatttcacacacrtatgtttcctgtcggatttagtttgcaggcccttgtgtagggaagaaaagaacttagaggaaaaggttacatttaagggtaggctctaagaactgatcattagaaaggtagaaagagcatcgagaagaaaatgttagattggaaacaaaaggaggagataatttcagagtagagttgtgagtataagatcctgcagagaggtccattgagattatggcatctctccagtaagacagcactagtacctttggtaagaaaagtttttgcatggtgtggtgaaggcagagccaggctgccatgccagggaaarggagcagcaaagggtgaagaaaggaatrtgctccactctttcaagaagtttgatgtggaaagaaaagagaaaggaggactggctgcttttatagggagacatgctgaaagagttttctttgtatggcaaggaacacttaaacgtatcatttgtagatggaagagaagtagctactggggaggaaaagggaaatgattgaagatgagagagcaagagtaagagaagagactaaatagaacaactctccagagagcttatttccattacataattcactccacaaatgtgggctcatctttgttgcatttctagctccttctgactggaagtgtgatttctagcaatatatttatagaatctcctctgccccccttcaaacacttttcaataaatgctccgtgtggttcatttgtaaagctatctctactgtagtagtttctaccagaagacatctacagataatgcaattcaccaagtcagcatgaagggttgaatccctggaacaactaggaatttttgcaggctatttctgctgtgacacagccctgaagtggctagcagatattcagcctgagtggaccccctttattactgatctattgcctgcctaattgtgcataacattccaaatattattaatttttaattatttacgtttaattatctgcattacttaagcattcraattccacagctaatgttctcaatgaaatatttactaaacagtcaaacctcttggattccacagaattaaatgttttcaatttgcagcaaacctttcctccaggaggcattctttgcactctagtgttctggaggtggctgcagtctgggtggttatggcttcagccttaccatccttttcatctcagggacactgtcaactctaatgggatggattgctctgcttggcattagcattaggaggttgagtgccgttgggacactcgtgccatctctcttcccacttctcttctgttagggccagaaaatgcattaacaaggagccagttctggcgataggaaagcgaaacaacattattgtggtcaaaaggcagatgtggtcaaaaggtcaagaggcatgatgaaaactaataatagctctgacaagagaagattactcacagctgatcagccagaaagcttttccagagcaaaatcaggacccactgtcgatggaaatgctgtttccagaacagaggccaaggaaacaggattatccaccccagcattcctgacataaatattctcacctctattatcctttgtacagaaggagggggcccatggtccacaaaatgtgaattggtttcagttcattttctaggagtggaaatggacagaattgtgytaatgtacctatgctcactaacggtgtctcccttctcaccaactacaaatcactgagagggttgatgatgtgatctgtacgcatagtggttaagactgagggatatacattagaccttcattcattccacaactatttactgatcacctgccgtgtgccaggcactgtgctaggcacttgagagacagaatacagcaagacaaacatagttgcttcctttatggaacttatagtccagcaaatatgagactccctggatttgagtcacaatggctgcctcctagctgaatgactttggggaacttacttaacctcttcagacctcaatttccttatctttaaaaccggaataatcatagtactttcctcatagggcagtatgactattgaattgttgatatgtgaatgcatgtgaaactcataaatcataagattggcacttacagcttgtttcactgggttgtagattaggtgtgcatgtatggtttcactaaaagcttgtacttgaggcctaacaaaattagcaatttaattatgagtgtttaataaacgctataattactggacacractctaagtagcagaagatatggccgggkygagcagatagatgttagagagtacaactttctgagtttgggtaacaagaagacacattagtcttatacctggcatgaaataagtgttcaataaatgtttattgttgttacagttgtgattatmattattaggccctgagggcttcatattaagctgaaattcatgtgagtttgtgcctagtaagtaaaactgacatactggagcactggcgtggtacttgtacatgtcaaatagtaactgttagctgatgcacacatgcagacccacacaagcacatacatgttagtgtgcatttttattgcaggctattaaaagcatttgttaactagaagggaccttagaaatgatatagtatggctccctcaggatgatgaaactcgagacctggagaaagggaagcaacttgccaggccacacagtgagtggtaaaccagggaccaaaatctggttctttgccccagctagagaaagtctgctggaccccaccctgcctctcttctaactactttacatcatgtgcaataacaatgacagtaagtaatatccacaccccgctgacagtctgcaaacgcctttctctttcatggcaagctgaattagaagctttggagtgtactgattttgccttctctgtctcaccaccttcctgccacctgtctttttgcattcctgatgaaaataaaacccaaatgcataaatcatatgactgatagtcataactggtttctttagattgctgtagctaagttatgcatgtatagattcactgaaaactttttttgacacctcataaaattagtatgtaaattgggggtaaaattgaatacccccaatttaaattgctgggcacagctctagttagataatatttggagacaaggcttggagacaagatgtagccagggtgaccagatgtcaggattgagaactctgtgagcttaggcaatgggttcaatgttttgaaattccttgttcccacaagcctcataaatactacctttgtgccttcttaaatacacagtgttttgcttagctgtttgcatcaggcatgtaacaggcggcaatatttagaaagttagagggcagcaccttccaaaatggacctggatttacctttttatcatgtttttctcctgctgaggagttcacattatcacttcatcattgattgtttttgtgtgaggtaatccatagagttttgcttgaaccccacaaattgaattaagagaactagctgctgttctcccttgctacagtgggtggctcccccaaaaatatcccacctcctaatcactagaacctataaatgtagcctttttcagaaaaagggtcattgcagctataataaatttaaggctcttcaaatgagattatcctggattacccaagtagacctgaaatccaatgacaagtgtccttacaagagacagaagaagacatggatacagagaagaggagaaggccatgggaagacggaggcagagactggagtgaggcaatcacaagccagttatgcctgggtcacctgaagctggaagaggagccttcggaaggagcctttggatggagcaaggcctggccaacaacttgatttctgatttctggcctccagaactgtgagagaatagatttccctcgtcttaagccaccaggtatgtggcaatttgttacgactgcctcagaaaactaatacacctgccagctgcaaggtggccctcctcygaatgcgaggtgttagaagggacagtgtctctcagagtcaattctgaaaaacactagttgtgtgggtgaagagataggcgggccttaaatggcagaaggagtgagtgagatgaaagtatggagaggccagacatgaaatcactaggcggattatttatgtatttttctgtacgggtgcatcacttctaaaagtattgtttgtttgcttgttttcacacacttgcttccatttattccctcktctcatgtacatggtggaagaacactcataattggccttttgtcttctaacctgtaacataagaacaacttgaacttcagaaccagccattttggcatgcagtattcctgaaattggttttagttatttcaattaggtatttaaattagcatttgtttctcttttaccattcattctcacacattggtcacatgaagtgttgatgttcttttaggtttgggaagttcacttgcagtagataaatcagtcacctaaaatgttactgtccaaaatcattggagcagttgataccgccagtatccatgactgactgcrttccttcatttggtctatggagatayttatcaagccctgtatgtgccagacactgtgtctggaatgaagtgaacagtggggcacagaacagatatggtttggmccttctggagctctaagcacagcagcacatcttctagatcttggctgactctggagttggtgttgcccaagatctcttcaggatctaactgagttggttttgtcttagactcttctctctcccaggctgaattagataaaccagactccaaaaggcagctggatgaggtcatctatgggtttctggggatgacgtgtttggcagaagtcccctctcctgtcattctccacctccacagacatttagaacagctctatccagctgcatatctagacagaacttgactcgacatccacagtatctgatttatactgaatttgccacagatacatagaatctgaagtttcccttctaaaggggtattttgagccataacaaattccatgaaaaacaactctatgtcctccctaagtgataacaatattaagagtggaaattgtcactcacaaagagcttgactaacaaattcccattctttcttacaggsaacttttgtctcctctccttcctctagccacagttaatgtttgctgagatgtaaattcaccctccactgctctaaatatattagaggtatcaattcatttgttcttcatacaaccagagataggtgctattattcccattttacaagtgaagaaactgaggtaaagttacttgcccaactttcaaggacattatgtatgagttgggactcaaattcagatagtttggctctagggtccacagtctttaccattatgctagactgccatcacagaatcagatcaacatgcattgttaatctatctgtgactgatgattgtttagccaatcagtaaccaaactgcaaagaaccagagttcttcgactacaggtactaatctctctactctgagccatgtaaaaaaataattgtagaagagagggaaattaaaaattaaagtgtgggkgtattgcattgaagctgcacatttacgtgagttaagagtccctgatcacagagcaccctctccaaacaagcctcccatctcctgaaggatgagaccccactgactgacttcgaccacagaacatgcaacctttgaaacatttccagaaacaatacagtccttcataacagtgtaggaatgaagctatctaattccctgtatcagccatcagaggtacaagtgacatgaaagtttaactggaatctttttttttccttatgtctcaatgcatactttgcacttttaattcagtwttgtgtcaagttcatacatctaattcatggaaactacttataaaatatgaagacacattagcaactaagatttggttaatacacatttcaaatgttgttggatttctttggagtacaacaatacctaaatgttgcattatttaaccaatgttggggtgtgggtttgtgcacatagggttcccagcaggtaatttatctagtgatcatgtcctgatgaacacaagggccctattrcaggcaaatcaaaagaggtaggactatgtcccaagtgttgcttctcttaccccaaggttgcccaatgcaatagttttcattctggtacatgcaaacatgtttcctctaaggtgcaatgccagaaacctagaggaaaatgtgtcttggttttatctgagaaaactggcaacaattcctttggaattgattccttttctttttattattttaaagagagaatagatggttattataccacttacgcagctaacagtttgtaggtcaagatgacctagagccaagaatgtgatattcattatgatacagcatgaaaaagagaaagttctgtttgtaaaggatttttttatgaagtcacaggcccaagggagatgagtacagaaagctatttagggtaccaagaataaattggatggccccctctctattcccttttttaatccccctaattatttattctgcaacttctcccccaacaagtatgtaagccacattagggccgggatttttgtttawtgtggcatccccagtgctggtatgtactctgtattaaaaatatattaatgaatgagtgaatgaatgaatgaatttcatctgaagaatgagccttccagacgaattccttgttaaaataagccagcacattgtctataaagcagcttccttgattaaggggcaaggtctcagkttaacgtgagataagagtttctgatttcagcatccagccaaatgatactgttctttggaaygcactctcttcttccctccactagtttttcttccctagcatttgttttggatctgtagttacagcattttctgctcagaattcaactgagggaaaaaaaaatgtgttttgagtaatactcactaaggtgaaaatctgaccatattttgagaaataaggggtttggaggctcaggacagaccatcccactgctgtcttagggacattgggctgctggagcctggcccaaagaaggtcttctgggaaatcaggactgagtctgggcaatgctagagtcagtgggtaaaatggctttggagtgtggcacacatagtaacgctctgtggaaccctccatattgacctgagcctggcctgatctatgagtcatctaaacctaacaaaaggcatctagaggacttggggttaaggccgagttattcttcaagtacacaattatggttgccagtaaaatgaatttcatgcttgaggtgatatttgtgggagaaaaaaaaaaggaagattaaaaaggctgtgtcaaamtagtgttttgattagaccagaagcatcattctagaaaatgcaaaatagtaggaacgcaataaaacaaacaaacagacaaaacccaaacaaacaaaaaatgctttgggcatgcctttcaggaatgaacgatgaaccaaagtcataaatcatccccctctattccctatttttcaggtgttatgtttctctattttgtagactttcatgttctacattgtgaaaaaataactaatgcacaatcccatatatttaagcttgtatgattactaatatttgtcatctttttaatttgtagaggatatttaatttactcttttctggaatatatgataatcctgtgctttactttctcatgaaggagagagagtaaaacaataagcaccttggtttaaaaagaactaattagcaagtttccctccggttctccaggcttatggcaaataactttcttcctgacaactgaatgttacatcccaacctccattagtcttaatagaagtcatgcattctctcccacttgctgtgatataagaataatttttcttctgagtagaataatggttgtgaagtcatttaggtagtcacagaaaaaaatagccttttattgttgttgttgggttttctttgattccgggaatgaggctaagagaaaccttgttccattttaccgtaaatactattaatccagagatgagtccttagcatacagaaatgattgatttgcatttaaatgagtgaatattcagagtttctagactcagataaaacatcaaaattatccagtgaccttggctaaattttagagttaactacttaggtggcctaaacaaaagcttgtattttcagcacacctaccatatgaaaaaaaagactaaaagctaccttccaccatcctgatgtaaattagacaccgaaagtatacactttacctccactattattgatttattcatttctgacctcgttcccaagacagctcactcatttcctccaccaggtccaggaccaatatcttactttaagtaaaaagttttcactcagaaaagtctggttgactattgtatttgacaaagtagaaaatagagttatggtgctgttttaaaagaactggggaggtctgattcccaatctgcataataaggctgtctttagcactgtgcattagcagcaagtaattacctccaactagaatgaaatgagggtcaagaatggttccaagtaatccagtggaagtgttacttgctttattgaacatgctaatacaaagctgtatttggaagagtcaaagaagaaaaaatgccccaaacccaaattgccttatgagctttttcacaagagcagtccagagtggtctgtacatgataaatttaagagttgcggttgtttagttttaccactttaaattaattcacctaagaatttaaatgattttgggcttctgcttttgtgtctaaatttaatgatgcattctgtgaatataaggataaacacacacagatttttatacatgtaactgacctattttcaaataggtgtgcctattcctgaataaatagattgatgtcctaccagattacaaattaagtagatacgatttatatggttttagtatgtgaaagtattagctgattctaatttcttcttgtgaaatactaagcgaatgaaacatacttattaaaactcaaamtgttattgacttatagtcatccatagttctaatctgggtgggtgacaattcaaagtcataacaataatttttttattagcagcaaattagctttgagaacaaaaatgcaatcagctccagaattcatacatttttttctttcattagacattaaccaaccaaagtttagggtgaatatgttttatacatctaggtcaatgataatacaaagaatgctagcctaatagcaatatcttgagctttttaccccactaacatacagcagaaagcacgtagaaaataagctctttcaacgaaataagtaattagaaatgacggactgttcagatttaaatttgatgataattatttaaaaatgacagaagtattggaagtttatcattcaaaccaccttaaaagtttttcctagtatacactacaacaacaacaaaaggaacattacaaaaactaagactttgagaggccagacatggtggttcacacctgtaatcccagcactttgggagactgagcgggggaggattgcttgagctcagaagtttgagaccagccttggcaacatagagagaccccatctctaataaaaaattttacattagctaggtgtggtggcatgtgcccattgacccagctactcaggatgctgaggacactgagtggggaggattgcttgagcccaggagttcaaggctgcagtgagctatgatcacgccgctgtattctagcctcggtgacagagcttgaccttgtctcataaaaggaaaaataataataagacgttgggaaacttttaaagcagaagagaaaatgtgggcatatgtataacttcccctcaaatacctctatcctatgctgacacactcatattcctaagaaagatagccggagaggattgccagacaaatgcaaactttttttatcctgcagaagtttcctgtcctgcattcttgccttcttatcatcctcagatgagaggagcttaatacatcagaaaagtcaggatacagtaggctatgtttcagtaacaaataaaccccaaagagcgaattgtttaacacactaagtttattctacactcaaagtccaaaatgaatcagatggccctcttccatcttatagcctgcaaggttgctgtgtcaagaaagagagagctaaaagtttccatgaggcgtgtctataagggccaggtttagaagtgccttgtgaaaccccccacctttgcatgcatcagggcctagccatgtgatcccaacctaaggcaagggagattggggagtgggtggcccacaagaggatgtgaagtggatcttaccactgtctctgctgcrggagaccttctagctcccttaagctcatctggcttaacagccagctctgtcttctctcctcagggctgtgctgtgggccctctgattctctagaaccaacatcccttcagagaaagagaacgttcagtgaaagaggaagagagagagatggaatgacagcactagctctcatacraagtcccaaaagcatggaattccagaatggaattcattctgcacatcattttcttcaagtggggagagagagagaggtaygggagtggggacgagagagagagagagagagagagagagagagagagagagaactactgaaataagaatttacccttatatttggaataagtaagaatataaataagaatatccttctcactctactttccttcctcccacataactactcccaccatagtgaatatgatagagtgtatatctgatttctttactccaaaaagatatcaagaaccttaagctttctttctgagccactcctcactaagcttatcctcatttcttaaagtataactatagctgggccattttacattctactgaatattctgtgacactgtggtcatcagcatgaatgacactttggggactcatctaaccaatattttggatgtctcccaagtgccaagtcttgtactaactccatcctgaggctgtgcttctctcaaagagcttgtggtctagctggtgtcatccaaatactgacagatacattacaggaaacacagctactgttgcttgtaacccacaccctgaggtgtgctgccaggtatgtgctcagccacacatcacacacaaaaatgccttctgaggtaccagttgtgtactgctctagagtaatcacatccaagatgggatggcacatacattaaagaccaaagctttgctcttctcatgagtgttaagaactgggaattcgtttcttcccgaggccaattctcacagtcttgatctgtcagaacttactggggttgaggagaaagatgatgttctgaacatggcctgtttgggcctgtttggggctcagttttgccatcagagatgttccttgctggcagtggcactggcccacaatggatagagctggcgtgaggagtggaagctgtaaaccaggacaccagaagttgccctttttagacccagctcttccactaactcactctgtgaccttggaggtgtccttttggcctctctgagctccagttttcctcatgtgtaaaatcaaatgtttggactagacaagggctctttcagctgtgacaccctgttattctgggcatctgtgttcctgcctctgtaattgaggtcatcagtcctatgtcatactgggtctgcagggaggatgaattggagcagagtcaccaggttgatcaactcgagaggcatccctcccacagtgactcaccaggagaaaaaccattagacccatcacctctgggacttgttgacactgattttcgtttttttctataacttctaaatgctcacaaactgaagaaggcaataacccttttttagtcagtgcagctaccaaaatggaaagaaagtacctttgcacctgtcgctgagctagcctctccaaaatgtacttagcccattgctgaggaagtctgtgggtttagagagaggactttctagaagacagagccctgcctgtcactggaagcccagcttagcatgaggggacttgtcacacagtactgtggaattacacacctttagagctgccaataagttcagccttctcctcaccttcacacagatttcttcacacacattttgcacacagggaagtgaagcccagagaggttgattaagccaaggtcatgcacggtatgaaggactgagatgagaactggcatcttctgactcctgactgttaggccagtgctcttgcactctaccgtgctaaataattcatagacacatgaatctggtatcaagaacagtgacatgataatggtacagccaataatggtagttacatataccacatatttattttacatgtatataatatgtgtattatatgtaatatatattctttagtcccaacttataggtaagaaactgagacacgtagagatgaactaatttattcatttggtgacatacagctcagttgttccattgaagcaattttttaagtgcttgtcatgagcaggcattaaactagtcactatgatggaatttagagwtaaattagagctctgccctcaaggagatgatagtaatgtataacstaagccaaagacatgggtaacagttatataagggagagatgggaccgatgtcagaagacagagctggctagatttggggaaactcaaagaaagggatgtatttttttttccagattgaatgggttagaggaggaaagacaagggtagaggtaactgaactgaatctccaaagaagtgtaggttgtagggcatagaatagggaatgaaaagccagaatgggccaaaaatatctgcatgaagccaaacagcacatcagttgacaagtttgttctttgacaagtgcgcagccacaaccaagggatagcaagtgtaaaatgcttagtagtaggtgaagacgaggaatgtgactaatctcacgaaccacctgtgataaagaaatctttgctttctgattttgttacaccaaaaaaaaaaatagaaaagccattagaaaacttgtaaacctggtatctaaactacaagcaaattgaaactgacccagctcactgttaagagtctctttgtgagggaaaccagagcattttcctgtaaagtcaacagggtttacagttgtaataggccattgattctgaatacacaaatctgaacaaaccacggatcaaatcagtctccctgaaagatggcagcttcaaaaggtaaaagccagatgcaacagagttaacctccatcaccactttaaagaggagcagagctgtgattgtctccactgaagaacaaaatgaagattgggtttaagccagtgttgtgctggtaaatatttgaacactgactgtttaaaaatgtgtgtgtgtcaaggacagaaaaccaaacaccgcacattctcactcataagtgggagttgagcaattagaacacatggacacagggagggaaacatcacacactggggcctgttttggatctgtagttattgggagggtcaggggagggatggcattaggagaaatacctaatgtagatgacaggttgttgggtgcagcaaaccaccgtggcacgtgtatacctatgtaacaaacctgcacatgtaccccagaacacaaagtataatagataatattttaatgaaatattaaaattaaactgccaagaatgtatatttaaaaaggtgtgtgtttaagcttattattaattttcccaataaagagcacataatttacaaataacaataaaatgttcagtattctttgttctaaattccatgtacccaatcgtttctttaagaatgtttttattgatttttgccaaattattgtatctatagctaacctatgggtgcaactgatgaatgaatatagtcccaaaataatatggttagtatttttggttaccttagtaggtaagaagaaggtgaaaccaaaaagacctgtgttggaacctcatttgctcctccataatattagtaacttccttactgaatcaaataacagttttcaaataatagaccaccactatttttccagttttgtgctgctcatgatgtaatgtctacaaacacagcacactttgaagtttaatatgtaatatttacattttctccatccatttctaataatcaacagtatagcaaatcaagtcctgattggtggtgtttgcttatttctatgatataatacttccttacagctggtttccagctcccaatgagatatcactgaatgcagagctggaaagagaggtaccgtagcaggccttatataacattttcactattatgcactgaatatgtgcgtgtatgtccccaagtctatatgttgaagccctgacccccaatgtgatggtatttggagaaggctcctttggtaggtaattagatttatgtaattaggtttagatgaggtcacaagtgtggggtccccatgatgagattagtgaccttataaaaagagaccggagtatcctataacactgtagttaaatatgaacagaattaacaataatacatagatttaaatagctagaatgaagatattgaatggtctcaacccaaagaaatgatcaatgtttgagatgatgggtatgccaattaccctgatctgatcactgtccatcatgtgtattgcaacatcactatgtaccccataaacatgtacaattattatgtgtcaattttttaaaactaaaaagtttaaaaaattaaaaataattgtagaaaataaaaacaccatggtcacaaaaaaataaaaattaaaaaagaaaccagagtttgcacttgtgcaccccctcgcctgccccatcaccataaaggaacaccctccctgtgcttcctctttctattgttaccacttactccccatcctctcacaactactaatctgttctccatctccatagttttatttccagaatgttataaatataaaattatacagtacattaacttttgagatgacttttttcactaagaataatwccctagtttcgtctacatagttgcatgtatcatttcttttatttctgagtagtattccattgtgcagataaaccagaatttgtttaaccattcacccattgatagacatgtgggttgtttccagttctttgctgttatggatagagctgccatagacatttgtgtattttgtatatagattttatgcgaatataacttttcatttttctgggataagtgcctaaaactgattgctgggacctatgattggcgcaagaaacttccaaactattttccagagtgcctgtattattttcctttcccaccatcatgtatgagagatcaagcttctctgtattctcaccagcattttgtgttgtcactgttttccattttagcagttctaattgctatgtgctgatatctcattgtggttttaatttgcattctctaatggataacgacgttggacatctttttatgtgtttatttgccacctgtatcacctctttggggaaatgtttcctcatgtcttttacccattttctaattggagtttgtttctttactatacagttttaagagttctttatatattcgagatgtaagaaatttgtcagatatatggtttgcaagctttttctcccagtctgtaacttgtcttttcattctcttaaaagagtcttttgcagcataaaagtttcaaatgttgataaatcatatatcaatttttggtgtcatgtctaagaactctttacttagatttacatcctgaatattttcacttatttttaaataaaaagttttagaattttatattttcatttaaatccatgatccattatgaattaatttttcatgtggtgtgaggttttaaatcaaggttcatttttctgcccattggtgtccaattgttcccgtgttgtttgttcaaagttatcccttctccaatgaaatttttgtttttaatataattcatttcattataagttttaaaaataatgcttgtgcgtaacaactagctcacaaaaatttaacaatcagttctgggagccagcacagggtggctccagcactttattggtttaaactatattgtatgttattgattaggagggaaaaagtagtcatatggatggttagaaatgatgagtgtttacctaaatgcccatcagtgatagactggacaaaaaaaatgtggtacatatacaccatggaatactgtgcagccttaaaaaggagcgagattatgtcctttgcagggacatggatggagctggaagccataatccttagcaaactaatgcaggaacagaaaaccaaacacttcatgtcctcacttataagtgggagctgaattataagaacwcatggacacatgtgggagaacaacccacactgaggcctgttggaaagtgggaggggagggagagtatcaggaagaatagctaattgatgctggacttaatgccaaggtgctgaaatgatctttgcagcaaaccaccatggcacacgtttacctgtgtaaaaagcctgcgcatcctgcacatgtaccccaagcttaaaatagatgttgagaggaaaaaaagaaagagtgagtgtttgtaaataaatacatatgtaaaacattataagaacataagggcccagaggtagcattagtatcattttgtagaaaattaaaactcaggtttgaaactcacattttactagcctcagagggaggaagcaggaatgggatgtaattcatgctattactttgaaattgcttaattaatagattattttcaaactaattgggtggccaggaagcttagtagaataatcatggcctctgtggtcaaatggagctgggtctgaaccttggctctgacatttaccagctttgaggaaatgccttattcactatcagtttcccttagtgttaaaatggagagaactccaagaatcaaaagctatattcattaatttaacaaatacttgatgagttctggtctatggagaagggattggggatacagcaatgagcaaaacagtcatgatttttgccctcaaagagtttacaatccagtgaagaggtggacagtgaacaaataagcacattagtgaaatggtattaccattgtgaaaagcggcatgaaggaaaaaaagcagatgtagtggtttaaacagacaaacccaaaacttagcacttttccaagcacacagagtttgctcagtggcagctattcatattactgcagattagggtacgattagtgtggtccaggcagaggtttggaggcctgtctggggacctgaccactgtcatctatgttgcatactgtaatgctcattttgcacatcaatctgaattggatgtgcttcaaggtcctcctcttactctaaaaatctgtgttccttaggtgtgtcaaacagggattagtttaatttcttacaaaaggtgagggtaaattcagcaatcagtatggtagtaattgactcagttgctatatgtgtttacattttaataatgtttttctgtgatattccccactcatgccttttttaacatagagtaaattatgaaaaaagacttagggagctagaatcctaggacaatgagatgactctgaaagtgtttacaaactttacttccaactactggcacacattgagttttgtttggaagtaggttattattaatcaatgtttttttgtaatgaagtccataaatccacattaaatacacatccagacttcttgaggtccttttgattttgcatattttcatcagaataattcactaaactcaatctgagtctttttcattttaagtttttgctgattttctactaagtgtcctctgacttattgagcaaccagtgcagcattggctgcctgggcagggaaggaaacagcaggggttatataggaatmtgagtgattctgcttcttggctcttgttcttatggtttaaaatagaaggaataatcttttcaccactgtctccaccacctccagttttcagtgggaagatgaggagtaagaggtacatggttagttattttctgtttcccttctctaatttcttttattatcaaattggtactgccttattgtaggaaattgggaaaataaaaactaaaaaagggaaaataaaacttatctgtaatgttactgttaggagtcatcgtctcccatactttgaaaccggatatgataattccataatttcagggttagactctattaaartctctacttatgcctctacagcactttaagaccaatagaggaagccatatacctaagtgaggcccaagatccagaaaaaaaaaaagaaaagaaagcataggtaagagccatataatgctgtgttacaggaactattctaaatacattgcaaatatgtttcttacaaccacactctattattaccctcatttttctatagtcacaaaagcagtaagaggtagaacctgaattcaggcccagtaagactggctccagagtccacaggctaacaaactttgtaatactacagaaagctgagtaaccatttccaacttccctcctcccctagctcattccctcctgtgggaagcctacactttcattgtttctttgtctcactcatggcccaatatttactttgttcctattttgacttgttgtgtgatgtctgtcactcctgtcagtggaggaactgttttgtcccattatyctctttctagaactttccctccactcacttctactgaaggccagctgtatttccatgacctgccaatacaactcacaaccatctcctccaaaaatctggtagttttacacagtaaccaaagtcacatacaatctttagcatagatttggggaggagggagggaaatgattaagtgcggtgtttaacatggggttggggaggttttgtgaggtcactgagggtccgacgactccttcaaaccatcagggagataacctctattgattggtgtatttttcttgaatttttttctatgcatacacttttctaaagtttattttatttatttttattttacccaacttgtaattttgaaataactcaaacctggagaaaaatggaaagtattttaactgaagactttttacctttacctactatattagtttcctgggactgctataacaaattaccacagactgggtaacttaaaacaatataaatgtattgtctcacagttctggaggccagaaatcttaaatggaggtattggcagggccatgctccctctgaaggctccagggaaggatcctttccttttcctaccttctggtgattgccgacagtccttgggttccttggcttgtagaggcattcctcgaatctttgacatcacatggcacttggcctccttcctcatgggtctctctgtccctcctctcttcttataaggaatgcaattgtattggatttagggcccaccctaattcagtatgacctcatcataatttaattacatctgcaaaggtcctatttccaaataatgttacattctgcagttctgagaggacattaattttggtggatattatttagctcagtacacctgtagtcaccaattgttaacattttgacacattcgttttatttttaactccaactgtccacccacccacccacccatccatcctcacacacacagattttgttaatccatttgaaagtactagacatgacactacacccctaaatacttcagctgctggtatctattaggcaaaataacattttcgctacataaccacaatactactattatctcatatttaatatgaatcccataatatccgatatagagatcatattcatatttccccattttttctaaaaacattctttatagctgatggatttttcccccacaaatcaagattgaataaaggatcaaacattgcacttatttattatgtttctttaatctccttttagctagaaggatacctcgctttttttaatttttcatgatactcatatttttgaagagtccaagccagttgactttgagaatgtaccatattctgggtttgtctgatcatttcttcattattagatcagattaagcatttttgaaaagagttccccgcaggagacgctgtctactctggttgcctgacatcctgaggctcatgatgcccgtttgctctgcyggtcatgatgccacatgtgacagctttgctggggtggcggcaaccgcttctctgcacagtcatgcacattgtttcccagtcttttcaactctcgcttcacatcgtctttttatttgtccttttttcttcagagcttttggatttctgattagaagtgtttagaaaatatctgtaagtgcttttttgtacacatttaactcagtccggcagtagtgttagttttcttccgctatgtagttgtttggaggaaaaaattttcacctgctgaaatgttttgactctcattttctaaagttttatattgactttgtggggatgtcatcactgtttcatgttttaattatcttgcgttttcctgtaccaacaaaaccagatgattctgtgtagacagcaataaggttttagagagacttaattgatttcttggatcaagaacactgtcttctgttgacacagtgaagttttttgttgttgtttttttgttttttaatagtagatggcacattttgtgtgatgggatgggggtggtagtgtgctgtctcttcttcctgaacaacccttaatttcatgatcatggtatctcccctgccaggtaagtatgtcatatggcctccttcctcattggtctctctgttttgaatgcttactttcttctgcttcaccatctaggctccaagggcacctcctctcccaaaaaagccatgcctggacctgcactctcaagcctcctccctttgtgccccagtagctctgatccaccaggtcattgacctttctctctktatcctctcaggtgtgacattttcttaccgggaatgattttatctgtgctcttccacttgctaggcctcactgcctcctcctctgcctcctcctctttgccaagcattcaccggctgactttcggctccagcaaggccttcagcgctggctctgcaggtgtcagatttttatttccccacctctgtgtaaattcagatttgtagcattctcagtctcttacttatgttgtagacaggggttatgggtggttttatttgctatccttgttcatctctgtaggtttcagagaacatgtgtggagagatccatatttaatgtctagaaactccaagcctgcatatatttattcttgctgctttgatgttttgatgtaaatacaattatatatttcacattttaaaattctgacatggtatagtataattgtatctatctttttctctctttttgtggtttgctttttacatttaactctttcattcttctggaattattctttgctttggcttgtttatctagaccttctgttcttgcctatgggcacaatagaacrtaaggaaacatggcctagtttgcttagcaatggacagatgcttagagaaatgaggggcaagctttggccttgtgcaaatgtggtggatgcttgctgaagcgcagagtggacaggaccagggatgatctgactgtgagtttcttaagaaagttgagtgttggtctcttggcacttgaggctctcatttctgcagagtttgtcaaggaccaacggcccatcaaatctggctgcttgtcagatgcttcagaacagctttatgtcttgtcacattcttagtcactggcttatgccccaaattctccactaacgtttcagcttctcatgagcagtgactacttccttgtctcagaggacatctagctggagccttgcccaaagtgggttctcagagacaattcagtcacctttgaaagcttctatcctgagatcacaaaaggggttacaacaaaagcagtgtattttcctttggagacggataagaaaagaaagacacctgagcgggagtgggtagaagaagtattatgcagcctctatgaggcctgaccctttgacagcctcaggtcctcttcattttcttcaataccccacttttaaatatacactatgttggtatattcaccagtagctatcagggaaaattcagccagatatcgggtgaaattcacccccgatatttcacgtagtttcttttctattttccctaagtgtcagtcggtctgagaaataaagggacagagtacaaaagagagaaattttaaagctgggtatccgggggagacatcacatgtcagcaggttccgtgatgccccccgagccataaaaccagcaagtttttattagtgattttcaaaaggggagggagtgtatgaatagggtgtgggttacagagatcacatgcttcacaaggtaatagaatatcacaaggcaaatggaggcagggcgagatcacaggaccacaggacggggcgaaattaaaattgctaatgaagttttgggcacgcattgtcattgataacatcttatcaggagccagggtttgagagcagacaactggtctgaccaaaatttattaggcaggaatttcctcgtcctaataagcctgggagcgatatgggagactggggcttatttcatccctacagcttcgaccataaaagatggccaacccccgaagcggccatttcagaggcctaccctcagggatgcattctctttctcagggatgttycttgctgagaaaaagaattcaacgatatttctcccatttgcttttgaaagaagagaaatatggctctgttcygcccggctcaccagcggtcagagtttaaggttacctctcttgttttctgaacgttgctgttatcctgttctttttcaagttgcccagatttcatattgttcaaacacgcatgctctacaaacaatttgtgcagttaacacaatcatcacagggtcctgaggcgacatacatccccctcatcttacgaagatgatgggattaagagattgaagtaaaggcaggcataggaaatcacaagggtattgattggggaagtgataagtgtccatgaaatcttcacaatttatgttcagagattgcagtagagacaggcataagaaattataaaagtattaatttggggaactaataaatgtccatgaaatcttcacaatccatgttcttctgccatggcttcagccggtccctccattcggggttcctgacttcctgcagaaagcagccacccagatcctgcccgaagttgcccataaascacttttggagaggctagattatggatccaattaagaatccctgtactgcaaattctaaagttctggcctagagtcctgtgagctatcctgcttacaattgttactagcagcacacacatgtctctggaatgcgaagaagaaagaaaaaaagacaaggaacgtgaaaattgggtgatgtcagcctcccttggataaagcccatcartggttttcattgtcttggggtgaggaacaaatccttgatagaactaatatgatcctccatgatctgcccatgccgccttctccagcatcatctgctactccaactcccttgctgcctgtgcaccagcccctggcctcatttcagtttctcaaacattctgagcttctttccaccagagggtgtttgcatatgmcgttcccactcccttgaatgcagctactccctctttttccttagttaatgcttggatatctttcagatctcaggtcaaatttcacttcttcagaaagtcttccttgattgcccctgttaaacacacattcttgtagcaactggtatttccagggtatttcttgcagttgtaattttacatcttttgcagggtccttttactaataatgttcttctccctaccccaccaggctacaatttccatgaatgcagaaaaagagtttatttttgccaaccattgaaatccatgtgcttaaaataaagactggcccacagaagatgctgaataaaatgtttgtggtatgcatgaatgaagtgattaatgtaaagcaactggtgagggctaaatgtccaaagtgaaacaaacactgaacaatcatgtaggcagataaacagttggctgattttttttaagaagtgattctttggtaatctctgacaaagatgctgatacaactgaatatatacatagctgagagacagatggaataactaagatgaaagttgaggaagaagattgaacaaaacatgataaaaaattcagagctacttgctggttgtgtctgaaagtagtgttcatttctagtcatatcgctgccataaggagttgaaagacagtgaggagaaaagcctaagaagggcagcatggatgaccccagattaaatgtcaagccactcacagaaagtttagagacttacagtggaaagtcaaaaggacttgaaggagatgtaattacagattcaaagctcaatgactgtatgtgataatgtcacctgctttcattttaacagagacctatttacacaatgcagatcctaaagtgcagatttggaaaattccaagtaaatttatgaagggtttttcaatagcaacaaaagaacctaaaagcatagggtagtggaaggtattaaagttgctatgtgagaagaaacacttgaatctgtgaatgaattctctttcaccctcactctctgtctctgtctagtgcatgtgcacacacrtttatattttaagaaaagtatttttagaaggaatctaacaaagagatggtgttaatttggatcttttaaaccaaaatactacatattcattttgcattttaatcagattttttcataatctgaaagaaacagatatatggctgctgttttccactcattagtatattctattgactccaaaactaaagggagatttataattctttactgtttaccaagagcattgaaggaaaaagctgaacattgactttttttatagagttgttatattatacttcatattggtatggagatggaattggcttctcaaagcatcattcttgaaatatatctcttcctccctatagaaaatttgtgcataggattaccagggacatttgtggaagatctggtgagaatagaaaaccagggaggtgggatgactaggaacagactgagctaaggcagggttaagtgagaccctgatagtaaagagagattgcctgttagctagaagttattgaaatacttatcacattaaagaatgtggctaaaggctcaaatagccatattttttccagctagaaaataaatcaaatttaacatgaccagcccacgctttattgataatagactaagatcacacagcgagtgctctggctaataggattgctgtgcagttacaaccattgctattacagcagatacagttctgcctgcaaaggcaccatggaattgtgcatgaccaaagacttgagttgtcctgaatgtctttgaccttgaaaagaggagataaatgggactgagcaacatggggactaaggaagacattcaggacagacctgaattgaagaatggggtgtccaaatcacaagcctggtctggtttaggtgaccatcatatacagaatggattgggagtcttaatttagtaggcaggtggagctgccagaagcactcaggctgcttctcaaaagcaggtgaatactttatgtcctcttttgtccatttccacctctacatttgtggtagacagaacaaaggtccacaaagatatccatgtcctaatccccagaacctttaaatgtgttaccttaccttaccaaataatttaccrcgacttactaaaagggactttgcacatgtgattaaggttaggggccttgagatggggagataatcctgtattattccattgtgaacccaacctaatcatatgaatccataaaaggggagaaccttttcccactgaagttgaaatcaaaaagagatgtgcccccaggagaatggtaagagaaatgcaatgtttttgaagatagaggagggggccatgagccaaggaatgtgtgtggtctctagaaactaaataaagtgaggaaatggattattttttggagtcttcagaaaggaacacagccctgccaacactttgatcttagcccagtgaggcctgctttggacttgtaacctacagaactttaaaatagtaagttgtattgttttaagcccctgtatttgtggtaatttgtaacagcagctataaaaaaaaataaagtctcttaatccaagttgataacgccacttgtctgaagtacttactgcagtaatcttacggatttccctgcttccagttctgtccttccacaacccacaattgttcagagttgtcctcttgaaaaataccaggtcagtgatatttcgtggctcaaaactatccaatgaatccatggcccatagcatgaaacccagaattctaaatggccccttttcaacctcttatcacactactttctctctcatgggccccgaagttccccctcagagataaagtttctgatttttataattgcttgcttgatattttttcataacgtgactgcctaggtataatttgattttgtcagtttcttaaacattatataagtaggataatacagtaactattttttataattattatactttaagttctagggtacatgtgcacaatgtgcaggtttgttacacaggtatacatgtgccatgttggtttcctgcacccattaactcgtcatttacattaggtatttctcctaatgctatccctccccctgaccccaccccatgacaggcctcagggtgagatgttccccaccctgtgtctaagtgttctcattgttcaattcctacctatgaatgagaacatgtggtgtttggttttctgtccttgggatagtttgctcagaatgatggtttccagctgcatccatgtccctgcaaaggacatgaactcatccttttttatggctgcatagtattccatggtgtatatgtgccacattttcttaatccagtctatcattgatggaaatttgggttggttccaagtctttgctattgtgaatagtgccacaacaaacatacaagtgcatgtgtctttatagtagcatgatttataatcctttgggtatatacccagtaataggatggctgggtcaaatgataattctagttctagatccttgaggaattgccacactgtcttccgcaatggtggaattagtttaccaccccccccaccaacagtgtaaaagcattcctatttctccacatcctctccagcatctgttgtttcctgactttttgattatcgccattctaactagcgtgagacagtatctcattgtggttttgatttgcgtttctctgatgaccagtgatgatgagcattttttcatgtgtctgcgggtgcataaatgtcttcttttgagaagtgtctgttcatatcctttgccctctttttgatggggttgttttcttcttctaaatttgtttaagttctttgtagattctagatattagccctttatcagatgggtagattgcaaaaattttctcccattctctatatttcccattcactcygacagtagtttcttttgctgtgcagaagctctttagtttaattagatcccatttatccagtttggcttttgttgccattgcttttgatgttttagtcatgaagtccttgcccatgcctatgtcctgaaaggtattgcctaggttttcttctaggatttttatggttttaggtctaacatttaagtctttaatccatcttgaattaatttttgtataaggtgtaacgaagggatccaatttcagctttctacatatggctagctagttttcccagcaccatttattaaatagagaatcctttcccatttcttgcttttgtcakgtttgtcaaagatcagatggttgtagatgtgtggtgttatttctgaggcctctgttctgctccattggtctatatatctgttttggtaccagtgccatgctgttttggttactgtagccttgtagtagagtttgaagtcaggtagcgtgatgcctccagctttgttctttttgcttaggattgtcttggcaatgtgggctcytttttggatccatatgaactttagttgtttccaattctatgaaaaatgtcattggtagcttaatggggatggcattgaatctataaattaccttgggcaatatggccattttcaccatattgattcttcctattcatgagcatggaaggttcttccatttgtttgtgtcctcttttatttcgttgggaagtggtttgtagttctccttgaagaggtccttcacatcccttgtaagttggatttctaagtattttattctctttgtagcaattgtgaatgggagttcactgatgatttggctctctgtctgttattggtatttaggaatgcttgtgatttttgcacattgattttgtatcttgagactttgctgaaattgcttatcagcttaaggagattttgggctgagacgatggggttttctaaatataaaatcatgtcatctgcaaaaagggacaatttgacttcctcttttcctaattgaatacctttatttctttctcttgcctgattgccctggccagaacttccaacactatgttgaataggagtggtgagagagggcatccctgtcttgtgccagttttcaaagggaatgcttccagtttttgcccattcagtatgatgttggctgtgggtttgtcataaatagctcttattattttgagatacgttccatcaatacctagtttattgagagcttttagcatgaaggctgttgaattttatcaaaggccttttctgcatctattgagacaatcatgtggtttctgtcattggttctgtttatgtgatggattatatttattgatttgcatatgttgaaccagccttgcatcccagggatgaagctgacttgatcgtggtgcataagctttttgatgtgctgctggattcagattgccagtattttattgaggatttttgcatcaatgttcatcagygatactggtctaaaattctctttttttgttgtgtcactgccagcctttggtatcaggatgatgctggcctcataaaatgagctagggaggattccctctttttctattgatcggaatactttcagaaggaatggtaccagctcctctttgtatctctggtacaattcggctgtgaatccgtgtggtcctggactttttttggttggaaggctgttaattattgcctcaatttcagagcctgttattggtctattcagagattcaacttcttcctggtttagtcttgggagggtgtatgtgtccaggaatttatccatttcttctatattttctagtttatttgcatagaggtgttcatagtattctttgtatttctgcgggatcrgtggtgacatcccctttatcatttttattgcatctatttgattcttctctcttcttctttagcagtcttgctagcagtctatcaattttgttaatcttttcaaaaaatcagctcctgaattcattaattttttgaagggttttttgtgtctctatctctttcagtgctgctctgatcttagttatttcctgcattctgctagcttttgaatttgtttgctcttgcttcactggttcttctaattttgatgttagggtgtcaattttagatctttcctgctttcttgtgggcagttagtgctataaatttccctctacacactgctttaaatgtgtcccagagattctggtacattgtgtcttttttctcattggtttgaaagaacatctttatttctgccttcatttcattatttacccagtagtcattcaggagcaggttgttcagtttccatgtagttgtgcggttttgagtgaatttcttaatcctgagttctaatttggttgcagtgtggtctgagagacagtttgttgtgatttctgttcttttacatttgctgaggagtgctttacttccaactatgtggtcaagtttggaataagtgcgatgtggtgctgagaagaatgtatattctgttgatttggggtggagagttctgtagctgtctattaggtctgcttggtgcagagctgagttcaggtcctggatatccttgttaaccttctgtctcgttgatctgtctaatattgayagtggggtgttaaagtctcccattattattctgcgggagtctaagtccctttgtaggtctctaaggacttgctttatgaatctgkgtgttcctgtattgggtgcatatatattaaggatagttagctcttcttgttgaattgatccctttgccattatgtaatggccttctttgtctcttttgatctttgttggtttaaagtctgttttatcagagactaggattgcaacccctgcttttttgccttccatttgcttggtagatcttcctccatccctttattttgagcctatgtgtgtctctgcacatgagatgggtctcctgaatagagcacactgatgggtcttgactccttatccaattttccagtctgtgycttttaattggggcatttagcccatttacagttaaggttagtattgttgtgtgttaatgtgatccagtcattatgatgttagctggttattttgcccattagttgatgcagtttcttcctagcattgatggcctttacaatttggcatgtttttgcagtgtctggtacaggttgttcctttccatgtttagtgcttccttcaggagatcttgtaaggcaggcctggtggtgacaaaatctctcagaatttgctgtctgtaaaggattttatttctccttcacttatgaagcttagtttggctggatatgaaattctgggttgaaaattcttttctttaagaatgttgaatattggcccccactctcttctggcttgtagagtttctgccaagaaatccactgttacactgatggtcttccctttgtgcgttacccaacttttctctctggttgcccttaacttttttcccttcatttcaaccttggagaatctgattcccttccaaaatggccaaataggaacagctccagtctgcagctcccagtgtgatcaacgcagaacacgcatgattactgcatttccaactgaggttcctggttcatcacactgggactgttggacagggggtgtagcccatggagggcaagccgaagcagggtggtgcattgtctgaaccaggaagtgcaagggttcaggggatttccctttcctaaccaagggaatccgtaccttcgccaaagactgtacctggaaaaacaggacactcctgcccaaatactgtgcttttccaatggtcttagcaaacggcacaccaggagattatatcccatgccgggttcagcaagtcccactcccatggagccttgctcactgctagtgcagcagtctgagatcaacctgcaaggcagtagcctgtcagggagaggggcatctgccattactgagccttcagtaggtaaacaaagcagcctggaagctcaaactgggcggagcctaccacagctcagcaaggctactgcctctgtagactccacctatgggggcagggcatagctgaacaaaaggcagcagaaacttctgcagacttaaacgtccctgtctgacagccctaaagagagcagtggttctcccagcmtggtgtttgagctcagagaacagacagactgcctcctcaagtgggtccctgacccccgtgtagcctaactgggagagacctcccagtagtggccgactgacacctcatacaggcaggtgcccctctgggacgaagcttccagaggaaggattgggcagcaatatttgctgttctgcaatatttgctgttctgcagcctctgctggtaatacctaggcaaacagggtctggagtggaccaccagcaaactccaactgacctgcggatgactgttagaaggaaaatgaacaagcagaaaggaatagcatcaacatcaacaaaaaggacaaaaaaggacatccacaccaaaaccccatctgtakgtcaccaacatcaaagaccaaagrtagagaaaaccaaaaagatgaggagaaaccagagcagaaaagctgaaaaytctgaaaaccagagtgcttcttcctcctccaaaggattgcagcccctcgccagcaacagaacaaagctggatggagaatgacttagaagagctgacagaaataggcttcagaaggtcggtaataacaaacttctctgagctaaaggaggatgttcgaatccatcacaagaaagctaaaaaccttggaaaaagattagatgaatggctaactcgaataaacagtgtagagaagaccttaaatgacctgatggagctgaaaaccatggcacgagaactacatgactcatgcacaagcttcaatagccgatccaatcaagcagaagaaaaggtatcagtgattgaagatcaatttaatgaaataaagcgagaagagaagtttagagaaaaaaagagtaaaaagaaatgaacaaagcctccaagaaatatgggactatgtgaaaagaccaaatctatgtgtgattggtgtacctgaaagtgacggggagaggggaaccaagttggaaaacactcttcaggatattatccaggagaacttccccaacctagaaaggcaggccaacattcaaattcaggaaatacagagaacaccacaaagatactcctcgagaagagcaatcccaagacacatacagtaactattttttttagtatgactttcactcaacagtatcattaagaatcatgtgttgcatgtagctggggtctgttcattttcattctaataactcacctttgaattctttttgatgtgttatgtaatttgtagcactacataatttgtagatgatgtgatttacagataattgcatcatatgtaaataagaaaatatttttttttccaaaaccacttttatttcttgttctttcttgattgcactgtaaatgacctcaattatgatagtgaattgaaatggtaacagccactgtttttatctcattctcaatttcagaaagaaatgtttcagaaggtcattattagggatgagctttattgaaagttactttttgttttgtttagatttgtagatagcattcctcagagtaaggaatttctctcctgtttgctaaatatttgcaaaattaaaaaattaaatgtttgctaaatagggtgatagacccgtgatgcgtcgtgatgtcttatttaaggggaatgcgtgggcaatcttagtttcatggccgtgaggtaggaaccagatgccggatacagttcagtatagctacccccaagtgttacgggcccagagcgaggagagtagcacacttgcgtgggatattgatttcacggaggatggtgagtgagaarccactaaatatttgctaaatattttggcatggatgaatgttgaaatttatataatgatttttctatatttattaagatgattatatcacatgatttttctcttttaatgctatgatcttacaaaatggtttctgttctttccaattctatatttttccctgttttttgccttttgttcaattgattgcatagtttttattattccatttcgtccctctatgagtttataaatcatatactctttcagaatactcacattagtgtacagttgggcaaaatcatccaacacaaagcctgttttgtattgaataccgtactgaaagtgaaaaaaaggatagttctattggtaatcaaagtataatttccactgactcagtatcactttcacaccatcgtaaagtcaaaaaatcttaagttggagactgtctgtagacacattgttcaataaatatcagaaagtgtaaaacatcatacaatgaaaagtccttttcctgctttagacctgcattcatccagtttccatccctctcaacataatgtgttactttttaaagttttcatactgatctttcccgaaatatttcatgcatatgtaagtcaatataatcattttgtattagtctgttctcacactgctaataaataaatacccgagactgggtaacttataaaggaaagaggtttaagtgactcacagttccacatagctggggaggcctcacaatcatggtggaaggcgaaggaggagcaaagtcacatcttacatagcagcaggcaagaagagagcgtgtgcaggggaactcccctttaaaaccatcagctcttgtgagacttattcactatcatgagaacagcatgggaaagacctcacccyrtgattcaattgcctcccaccaggaccctcccatgacacgtgggaatgatgagatctacaattcaagttgagatttgtgtggggacacagccaaaccatttcaaatatgttactactcttccatttttaagtaagtgatacatactttacacatgattatgcatcttcctttttaccttatatatttaaaagcatttcatagctacayatagaaaaatctttattttttcaataatgtatacgtttgtcccatattatatattatacttaaatcagtcccttacttataacattttgtgttgtttctgatcctgtgtttttataaacctacaaacataatacagatgtcattttgcacatgagagttattatctgtagaataaatttctggaagtggagtgctgagtctacaagcaggtgcatctgtcatcttgatagataatgtcacttgccctccatatgggttataccattttgcactcccatcatcaataattgagtctgcttatttttacctatcctcacccacagtgcctaatacatttagatttttgtcactttgaaactaagaacaataattctgtgtaactttttttttgtaattatgagtgacagtgatcatattttcataagtttaagagagatgtgagattgttcatctcttttgcccatttttccattggtctgttggtccttattgatcaaaaaatgatcattctctagcaagggtattagtcaattgtctgaacaaatgtttttcctagttcatgaaatgtatttgaattttttgatgggtagggtttttctgctttgtgttatttgcttgcytctggttttgtttggtatatagacaatttttctttgtatatggtagaatttttcataattcctacagtgtttgtcagtgttcttcagacaaacagaaccaataagatatatataattatataaagaaacttatttaaaaggaatcagctcatacaattaaggagtttggaaaggccaaaacctgaaggatggcctggcaggtgagagacccatggaagagtggatgttgtagttccagtatgaagattgtctactggcagaatttcctcttactcaggaagcagtcaggtttattattattattattattattattcaggcaagtaattggcccatctaccttatgaaggttaatctgctttacttgaagtccactaacttaaatgataatctcatccaaaaacaccctcatggaaacatcaagaataatgtttgaccaaatatctgaggactgtgacccagtcaaattgacacataaaattaactatcacacaccctttatggcttctgaatttttgtgtcatttttggaagatccacccccactccaaagttataaaaaaatcccatttttatctctagtgcattatgatttcatttttaataggtatatcttaaattctcatgaaatgtttcttgtgtgtgtaaccagactcaattgtccaaatattgtggattsaatataatcatgatcatcttcttctgatttaagatgccaaccttttcctaaagtttcatgtgcatttagatatctttccaagttttatgttctgtttggattattagccttattatgaaacagaaccagactgctttaattattgaatatttatagaatattttaatttctgataaagttagtctttgctctcttatttggtttctttactattctagtatataagaataaaaaaacaactaattttattacactaaaatgccatgtgccatactggtgtttctattagattcaaattaaaattacaaattagtgaagattgacatcttttttaaatcttcatttctaaaaatgtagtatgtcttttcatttgttgaagtattcttttgcttttcacttttttttttttttttttttttagaaataaggcctcgctctgtctcccaggctggattgcaatggtgcaatcatagcgcctcaaactcctgggctcaaagtgatcctcctacctttgcctcccaagtaactaggattatagacatgcatcaccacactcagttgattttttaartttttttgtagagaagaggtttctcttcccaggcaggtctcaaacacctggcctcacgcaattctcccaccttggtctcccaaagtgttgggttccaggcatgagctactgtgccaggcttcttttgtattctttagagctatttcagaagcttctttcttcttgatataagtctgtaaattttcttggtacatttttgcatagttattttattatttttgttgctgtcataagtgtgggtctggtgtgaaggttattgaattctgtatgttagtttataacctgatacatttctgcattttcatactgcttgcagtatgaaatataagataacagtcttataatttcttctcttttccaattttcatatctgtaagttttttctttctttcttttttttttttttttttttttttttgaggcagagttttgctcttgttgcctaagctggagtgcaataacgtgatctcagctcactgcagcaacttccgcctcccgggttcaagttattctcctgccttagcctcctgagtagctgggattacaggcatgcaccaccatgcccggctaattttttgtatttttagtagaaacggggtttcaccatgttagccaggctggttttgaactgctgacctcaggtgatctgcctgcctcagcctcccaaactgctgggattacaagcgtgagccaccgtgcccaggctttctcttaaaatttcatgagattctaagtctagtacgttattaaataataaagttaatacttaatatccttttcttatgaggatacttctagtatttctccattaattttaacactagctttgggatagaagtagatacattatcccatagttaagctactattcattgatgattattttcttgagtgtttataaagaatggatttggatcattcaaatgattttttgtatctatggagattattatattactttcccttactgaaataaaagttwtatctatatatttcttgatattgaacaccacctttccatatctggagtaaactgcacttggtgagagtgatatttttaattcagcagggtgagaatgtttagtgaagcattatacgttcaaaaatttgaaataatctacaggttcattaacagataaattggagttactttaataggtggatatatgtaagtgggattaatattgtatgtgaatggagattaacagattataaacatatgtagcaaggtagataaatcttataactttgcatcctctgacccctcccaaaagaaaagcagacacaaaagaatatgtactgtgtgatatgatttgcataaagtttaaacatgagaaaatttaaatgatagtgtttaggaatgcgtattttaaggaaataattatcataaaagtcaaaatattagttacctttaaaaaacagagtgggactgggcacggtggatggctcacgcctataatcccagcactttgggaggctgagatgggcagattgcttgagctcaggagttccagaccagcctgggcaacatggtgaaaccccatctctactaaaaatacaaaacttagccgggcttggtggcacatgtctgtaatcccagctacttgggaggctgaggcacaagaatagcttgaaacccggaggtggagactgcagtgagttgagattgcaccacagcattccagcctgggcgacaaagcgagatccatctcaaaaaaataaaaaattaaaataaaaaaattaaagaagaaagacagagacagagacagaaagtgattgggcaaatgagggacttccagggtgctgatatgtttaaattcttgacctgggtagtatttgcaaaagtatgtgctttataataattcatggagttttacatttatatttaatgtatttttctccatatgtgcatattgcattatgaaaagaatttaaaaattatttgcttataatttatttaaaattttcacatcactattcaggagtgaagatgtctatagttttctcctgtttttattctttttttgaggtttgatatgttgattatataaaaagaacttgragatttccattatttgtcttggctcagaaaatgttaaaaaatcactgtataattacccattctttaaagatttaataaaagttccctgtgccttcatctgagcttgttgtttttcttgttcattgaagagatagagattgtaaaatttggcccatttaggtttttgcaatactatgggtcacatttgataaattatgttttcttagaaaattgtctattttatctaggttttgtatatttgcatcaaaataaataaagtaatgctgtacgatcttttaatttcctctatttttatagtcccccctgagcccccatatcatttactggttgtgaatttgtaccttctcctgttcctccttgattaatgaaactaacagttttgggatttttttttaagaaccaacattagcctttctttataaatttatctgatgattcgtctaattcaatccttctcaaactttgatctctatacaaatcacctggagaccttgttaaaatactrattctgatttagtaggtctgagttggggcctgagattctgcatttgtagcatgttgccagtgatcccaacattgctggcccctactttgagtaataaggttctagcacatctatttattcttttatatgtttctatctatattaatctctttcttcacttatttttctaatttcctgaaagatatttaatacatttctttccactttatttttcattactaataagttttttatttatagttgacataataattgtatatatttatagagtgcagtgttatgttttaatgattgtataccttgtataatgatcaaatcaggttaattaccgkatttgttactttaaacatttatctctctttgtggaaatatcatacaaaatcttctctttttgctgtcttgaaatgtacacaacattgttatttattacagttgcctagctgtgttataggacaccagaactattcttcttgtctaactataactttgtacccactgaccaacctctccccgtcgtgctatcccctacacctaccttccccagcctctgataacctctactctctatttctatgaggtcaacttttttagagtacacaaatgagtgagatcatgcagtgtttgtccttctgtgcctggcttacttcacttaacataatgtcctctaggtttatgctgccacaaatgatagaatttcgttctgttttatgactaagtagcattccattgtaaactattccattctatacaccacattttctttatccattcatctatggataggcatttagattgattctatatctttgctattgtgaatagcactgcaataaaaacaggagggtagctatctctttgacacaaatgatttcatttcctttggatatatataataatggcattgctgtatcatatgatagttctatttttaattgtttgagaaacttctgcatccttttccataatggctatattaatttacattattaccaacaagtcataagagttctcctttctccacattctctccagcatttgttattttttatctttttgataacagccgttctgactagggtgaggtaatagctcatagtagttttgatttgcatttccctgattattagtgatattgaccattttttgtcatatacctgttgactatttgtatgtattcttttgagaaacatctcttcaagtctgttgcccattattaatcacattgtttgttattttgttattgcattgagttccttacatattctgcatattaaccccttgttagatgcatagttcacacatactttctcctattctgtaggttgttttttcactctgatttttttcctgtgctgtacagaagctctttagtttgatgtaatcccatttgtctatttttgcttttgttgtctgtgctgtagaaatactcgacaaaatactaagaaaccaatctcatcaacacattaaaaagatgattcaccatgatcractgattcatcccagggatgcaaggatggttcaatatatggaagttagtaaatgtgatacatcacattaacataaccaagaataaaaactctatgatcattttaatagatgctgaaaaagcattcaataaaattcaacgtcctttmacgacaaaaactcttaacaaattgcatatcaaaggaacatgcttgaacacagtaaaggccacataggacaaattcatagctaacatcatactgaacagggaaaaattgaaatcttttcctctaagacttgaaacmagacaagaatgcccacttttaccacttacattaaacacagtactggaagttctaggcagagccattaggcaagagagagaaataatggacatccaaatctgaaaggaggaagccaaattgtccctggttgcagatgacatggtcatatttatagaaaactccaaagattgcaccaaaaaactgttagaactaataaataaatttagtaaatttacagaatacaaatcaacatataaaaattagtagtatttctataaaccaatagcaaactctctgaaaaagaaatcaagaaagcaatttcatttgcaatagctaaagaaaaaaacctaggaataaacttaactgaggagrtgaaagatccctatagtaaaaactataaaacatggatgaaagaaattgaataagacacaaaaaaaatggaaaggtaacatgtgattatggattggaagaattaatatttttaaaatgttcgtattacctaaagctagctgcagattcaatgcaatccctacgaaaataccaaagacattctttacagaaatggaaaaaaaaatcttaaattcatattgaaatgcagaagactctgaatactcaaagcaatctggagcaaaaaaataaataaataaagcaacaggtatcacactacctgattttaaaatacactacaaggctatagtaatcaaaacagcatggtactggcataaaaacagacatatagaataatgaaacagaatagagaacccagaaataaatctatgcatttacaaccaattgattttcacaaagatgccaataacatacattgggggaaagagcascctcttcaataaatggtgctgggaaaagtgattatattcagaagaatgaaactagactcctacctctcacgatatgcaaaaatcaactcaaattaagactgtaatgtaagactgggcatggtagctcatgccwgtaattccagcattttgggaggccaaggcgggcagatcacctgagatcaagaattcgagaccagcctggccaacatggcaaaaccccgtctctactgaaaatacaaaaattatctgggtgtggtggcaggtgcctgtaatcccagctacttgggaggctgaggcatgataatcagaggcatgataatcacttgaatctgggaaactgaggttgcagtaagccaagcttaccccattgcactccagcctgggggatagagtgagactctgtctccaaaaaaagactgtaatgtaagacccaaaactatgaaactactagaagaaaacataagggatatgcttcacaaaattggactgagcaaggatctttttaataagacctaagaaggacagacagcataactattttatttattaataatttattaattaagattaattttaaaaattaacatgaaattaatgatttattaatatacatgtttctatgaatttccataagtcctgctttaatagtatgtagtaggttttgacctacatactgtggtatttttatgatttctttctctagatattttgatatttcaatatttgtaccctgtctgagctaagagttgtcataacagaaaactttttaacatttaggtgctattgaccattgttttctgaattttgttaatttctcattttttgcattgatgatactgtttctacttcttaaaatttgttgaagttttctttgaggcctagtgggtggttaatttctatgactgttacacawaaaggtgtatacttcattatcaaggtatattttgaggcatatcaattagactatatctatgtcatttagcactatatattttgctacttagtacttctacaccttgactaatttttcctactggatgtgtcaaaaacagaaagaagaaaattaaagcctctttaaatgggggaaagaataggtttttcaacaaatgctacctggacaactgcatatccatatgaaaagaagggaatggaaccacctttccactccatacacaaaaattaactcataatgaatcaaagagctaaatgtaagaaatagcactatgaaattctcaaaagaaaatgtaggtataaatctttatgaccttgattaggtatggattcttagatgygataccaaaaacacaagcaacataagaaaaaatagagaaagtggaaataatcaaaattaaaaacgtttttccttcaaaggataccatcaagaaaataaaaaaataacccaaggatttggagaaaattttaacaagtcatatatgtgataagggacttgtatttaaaataatatgtaatgaaaaaggggggcacattccaagatggccaaataggaacagcttcggtctgcatctcccagcgtgatcaacacagaagacaggtgatttctgcatttccaactgaggtacctggttcatctcactaggactgcttggacagagggtgcagcccagagagggcgagctgaagcagagcgggcatcgcctcaccagggaagcatgaggggtcgggggatttccctttcctagccaagggaagccgtgacagactacctggaaaaatggggcactcccacccaaatactgtgcttttcccaaggtcttagcaactggcagacaaggtgattctytcctgtgcctggctcgatgggtcccacacccatagagccttgctcactgctagcacagcagtctgagatcaatctgcaaggctgcagcstggctgggggaggggcatccaacattgctgaggcttaagtaggtaaacaaagcagcctggaagctcaaactgggtggggcccaccacagcttgacaagacctactgcctctagactccacctctgtgggcagggcatagctgaataaaaggcagtagacaacttctgcagacttaaatgtccctgtctgacagctctgaagasagcagttgttctcccagcattgcatttgagctcgagaatggacagactgcctcctcaagtgggtccctgacccccttgtagcctaactgggagacacctcccagtaggggccaacagacacctcatataggtggctgcccttctgggacraagcttccagaggaaggatcaggcagcaatatttgctgttctgcaatatttgctattctgcagcctacattggagatacccaggcaaacagggtctggagtggaactccagcaaactccaacagacctgcagctgagagacstgaccrttagaaggaaaactaatgagcagaaaggaatagcatcaacatcaacaaaaaggacatccacaccaaaaccccatccataggtaaccaacatcaaagaacaaaggtagataaaaccacaaagatggggagaaaccagagcagaaaagctgaaaattctgaaaatcagagcacctcttctcctccaaaggatcacagctcctcrccagcaatggaacaaagctggatggagaatgactttgatgagttgacagaagtagtcttcagaaggtcggtaataacaaacttctctgagctaaaggagtatgttcaaacccatcgcaaggaagctaaaaaccctgaaaaaagattagatgaatggctaactagaataaacagtaaagagaagaccttaaatgacctgatggagctgaaaaccatggcatgagaacttcgtgaagcatgcacaagcttcaatagctgaatcaatcaagtggaagaaagggtatcagtaactgaagatcaaattaatgaaataaagcaagaagacaaggttagagcaaaaagagtaaaaagaaatgaatgaaacctccaagaaatatgggactatgtgaaaagaccaaatctacatctgattggtgtacctgaaagtgatgggcrgatsaagccaagttggaaaacactyttcaggatattatccaggagaacttccctaacctagcaaggcaggccaacattcaaattcgggaaatacagagaacaccacamagatattccttaagaagagcaaccccaagacacataattgtcagattcaacaaggttgaaatgaaggaaaaagtataagggcagccagaaagaaaggtcgggttacccacaaagggaagcccatcagactaacagcagatctctcagcggaaagcctaaaagccagaagagagtgggggccaatattcaacattcttaaagagaagaaatttcaacccagatttcatatccagccaaacaaagcttcatacgtgaaggagaaataaaatcctttacaggcaagcaaatgctgagagattttgtcaccaccaggcctgctttacaagagctcctgaaggaggcactaaacatggaaaggaacaaccagtaccagccactgcaaaaatatgccaaattgtaaagaccatcgatgctaggaagaaactgcatcaattaacaggcaaaataaccagcaaacatcataatgacaggatcaaattcacacataacaataataactttaaatgtaaatgggctaaataccccaattaaaagacacagactggcaaattggataaagagtcaagacccatcagtgtgctgtattcaggagacccatctcacatgcaaagactcacatagactcaaaataaagggatggaggaagatctaccaagcaaatagaaagaaaaagaaaaagcaggggttgcaatcctagtctctgataaaacagactttaaaccaacaaagatcaaaggagacaaagaacaccattacataatggtaaagggatcaattcaaccagaagagctaactatcctaaatatatacrcacccaatacaagagcacccaggttcataaaacaagtccttagagatctacaaagagacttagactcccacacaataataatgggagattttaacaccccactgtcaatattagacagatcaacaagacaagttaacaaggatatccaggacctgaactcagctctgcaccaagcagacctaatagacagctgcagaactctccaccccaaatcaacaggatatacattcttctcagcaccacrtcgcacttattccaaaattgaccacatagttggaagtaaagcactcctcagcaaatgtaaaagaacagaaatcacaacaaactgtctctcagaccacactgcaatcaaattagaactcaggattaagaaactcactcaaaaccacacaactacatggaaactgaacaacctgctcctgaatgactactgggtaaataatgaaatgaaggcagaaataaagatgttctttcaaatcaatgagaacaaagacacaaygtgtcagaatctctgggacacatttaaagcagtgtgtagagggaaatttatagcactaactgcccacaagagaaagcaggaaagatctaaaattgacaccctaacatcaaaattagaagaactacagaagcaagagcaaacaaattaaaatgctagcagaaggcaagaaataactaagatcagagcagcactgaaagagatagagacacaaaaaacccttcaaaaaattaatgaattcaggagctggttttttgaaaagattaacaaaattgatagactgctagcaagactaataaagaagaaaaaagagaagaagactcaaatagatgcaataaaaaatgacaaagtggatatcaccatcgatcccacagaaatacaaactaccatcagagaatactataaacacctctacaaaaataaactggaaagtctagaagaaatggataaattcctggacacacacaccctcccaagactaaactaggaagaagttgaatctctgaatagaccawtaacaggctctgaaattgaggcaataattaatagcctaccaaagaaaaaaattccaggaccagaaggattcacagccraattctattagaggtacaaagaggagctgttaccattccttctgaaagtattctaatcaatagaaaaagagggaatcctccctaactcattttatgaggccaacaycatcctgataccaaaggctggcagagacacaacagaaaaagagaattttagatgaatattcccaatgaacatcaatgcaaatatcctcaataaaatactggcaaaccaaatacaacagcacatcaaaaagcttatgcactacgatcaagtcagcttcatccctagcatgcaaggctgtttcaacatacacaaatcaataaatgtaatccatcacataaacagaaccaatgacagaaaccacatgattatctcaacagatgcagaaaaggccttcgscaaaattcaacagctttcttgctaaaaacacgcaataaactaggtattgatggaacgtatctcaaaataataagaactatttatgacaaacccacacccaatatcatagtgaatgagcaaaaactggaagcattcgctttgaaaaccagcacaagaaaaygatgccctctcacaccactcctgtgcaacatattgttggaagttmtggccaaggcaatcaggcaagagaaagaaagaaagggtattcaattaggaaaagaggaagtcaaattgtccctttttgaagatgacatgattgtatatttagaaaaccccatcatgtcagcccaaatctccttaagctgataagcaacttcagcaaaatctcaggatacaaaatcaagtgcaaaaattacaagcattcctatacactaacagacaaacagagagccaaatcatgagtgaactcccattcacaattgctacaaagagaataaaatacctagaaatccaacttacaagggatgtgaaggacctcctcaaggagaactacaaaccactgtacaacgaaagaaaagaggacacaaacaaatggaagaatattccatgctcatggataggaagaatcaatatcatgaaaatggccacactgcccagggtaatttatagattcaaggccatccccttaagctaccaatgaccttctttgcagaattggaaaactactttaaagttcatatgaagcaaaaaagagcccgcattgccaagtaaatcctaagcaaaaagaacaaagctggaggcatcatgctacctgacttcaaactatactacaaggctacagtaaccaaaacagcatgatactggtaccaaaacagatatatagaccaatggaacagaacagaggcctcagaaataacaccacacatctacaatcatctgatctttgacaaacctgacaaaaacaagaaatggggaaagaattccctatttaataaatggtgttgggaaaactggctagccatatgtagaaagctgaaattggatcccttccttataccttatacaaaaattaattcaagatggattaaagacttaaatgttagacctaaaaccataaaaaccctagaagaaaacctaggcgatacctttcaggacataggcatgggcaaggacttcatgactaaaacaccaaaagtgatggtaacaraagccaaaagccaaaatagacaaatgggatctaattaaactaaagagcttccrcacagcaaaagaaactatcatcagagtgagcagacaacctaaagagtgggagaaaatttttgcaatctacacatttgacaaagggctaayttccagaatctacaaagaacttaaacaaatttacaagaagaaaacaaacaaccccatcaaaaagtgtgcaaagatatgaacagacacttctcaaaagaagacatctatgcagccaacagacacatgaaaaaatgctcatcatcactggttattagagaaatgcaaatcaaaaccaccatgagataccatctcaccccagttagaatggcaatcattaaaaagtcaggaaacaatagatgctagaggatgtggagaaataggaacacttttacactgttggtgggagtgtaaattagttcaaccattgtggaagacagtgtggtgattcctcaaggatctagaactagaattaccatttgacccagcaatcccattactgggtatatacccaaaggattataaatcatgctactataaagacacatgcayacgtatgtttattgtggcactattcacaatatcaatgacttggaaccaatccaaatgtccatcagtgatagactagattaagaaaatgtggcacatatacaccatggaatactctgcagccataaaaaaataaaggatgagttcatgtcctttgtagggacatggatgtgactggaaaccatcattctgagcaaactatcccaaggacagaaatccaaacaccacatgttctcactcataggtgggaattgaacratgagatcagttggacacagggcaagggaacatcacacactggggcctgttgtggagtgggggactgggggagggatagcattaggagaaatatctaatgtaaatgatgagttgatgggtgcagcaaaccaacatggcatgtgtatacctatgtatcaaacctgcaccttgtgcacatgtaccctagaacttaaagtataataataaaagcaaataaacaaataaacaaaatcaataataagaaaatttttaaaaagtagctattacaattcaataatacaaagacaaataactcaattttaaaatgagcaaaggatttcaaccaacatttctccaaagaagatataaaatgttagccaaacacacgagaagattttcagcgtcattcatcattagggaaatgcaaatccaaatcacagtgagatatcatttgacaccagttaggttggctatattcaaaaagacaaaaaataacaagtgttggcaaggatgtgggaaaattggaaccctcatacgttgctggtcagaatgcaaaatgttgcaacctctttgaaaagcagcctggctgtttctcaaacgattaagaatagagttaccatgtggtccaacaattctaccacttgatatctacccaagagaaatgaaaacatgtccacacaaaagcttttgtatgaatgttcatagcagcaccagacacaacagcccaacagtggaaaaaacccaaatgtccataaattgatgaatagattaataaaatgtagtaacccatataatggaatattcatcagcaataaaaayaaatgaagyacttgatgcttttgcctcacaactcttaagattctttcctttgtcctgactttagataatctgatgactatgtgcctaggtgatgatctttttgcgaagaacttcccagtgttcttagagcttgttgtatgtggaygtctagatctctagtaaagccaaggaagttttcttcgattagtccctcaaatatgttttccaaacttttagatttctcttcttccttagaaacaccaattattcttaggtttggatgtttaatatagtcccaaacttcttggaagcctttttcattaaaaaaatttttttttctttgtctttgacagattgggttaatttgaaagctttgtcatcaagctctgagattctttcttctgcttctttgattctattgctgagactttcctgtgcattttgcatttctttaagtgtgcccttgatttccagaagttgtgactggtttttatttatgctatctacttcactgaaaatttttcctttcatatcctgtatcacgtttttgattctgtcactatcttctgtgtccttgccaatattttaattaaattattcactctatggtcagttatcttcactttgttttctctgtgaagttatatttttgtgctcttattagagcatttatatttttattatattagttatctttatagttataaattgatcttagtcctctggtgtttgtttattcttactagttataactgtgaatattattatatttcttccttttctctccttttatctctggatccagcagcatactgattttagtcaataatttcttttctggtgtttgctttgatataactgtgtttctgatttatgacttgatttgccaactttaaatgaaatcctttgacttccagctgttttaaattaaacagtaaacacattttctcatcatttcaatttctttccctcttctcctctcaatgtttcagttatgttttatctgccactctaactcacatttttctagttttagtggtactgttaaatatatagtctccctcaatcttttccccaaacttattgattgactgaattttctcttttattggttcccacaaaaagacatcaacaaaataatattgctccagtttttgaactcttattaaaactattgtttgtagcccttatacttcaagaagagtttgcatatatattcttatctcaaagtctctttgcttgagaatctcatgggattgtatctggtattcagagttgctgtgtaaaaacaggaaggcagcctgaattcttctttcttgtaaaattgacctagtcttttcacctgtctgccgaaaggattctttatctttgaagcccagcaactttattgggatatgtctcattggtcattctgggtctttctttatttcttctattctatcacaccaactttgccattctcaacctctgtgaatctcctgtgatttttatactatctgattcttttgccccattttgtttttatttccttaattcttctattttttttttcttggactacacctttccttagttgtgcaagctcatatcttatctcttcctgctatgctaccatactttccctgaattattccattactgtgttatatatcatctttcatccaggtgatcactttaatttgaaggattttttttcctccaaattcatggcaagacatttgttcataactttcattggtatggtaatattttacagaaggatatactttattaatacattttttgscttttttcccttttgtcttggagtatagatataatttttattattcatctttgaatggttttcattttcctaagctctgtatttataagggctttcttgaggcaggaccaggtcagctttcctgtctagcatgcttgcccartgcaaaggttcttcttttccacagtctccacaaaggtagaacgcttctcaaaaaaatgtgccttgtctttccaaatctttatttggccttgcttcttcttttttatgaaattcattatagtcccattagggtagaaggtcacatcctgcttctgccacacttttgccagcaaggggtacagcttctgactctcaagacatacccatcacttgcgggaaggaaattgttagtagtgtgttctgagatctgtcatggctggtctcctacaactgaggtcttgagatctgtctttagcctttcccaaattcttcccagaagaattcagttgcttttagaaaatcttaaaagtattttaagatttaggataaatacttaaaagtatttaaactctctcctgaagtttatttaacaactgagtttttgttctgagttttccattctttatttgccttagggtggttccagggagagaagtttggagaaggctgcatgacgcagccatgagtatacactgggagtttccactccatccccaatctccaccaaaaagacggtgcttctgaaggtatttttttccttctaatgccttagtttctttatacagtggccaaaaatagtacaagaatatcttcatggcaactacaggcattgctcattgtatggcaagctgatttatggaamttttccactacagaattgatggttctgagcatgaactcaaacagcagttacctgaaaatccagacacatgaggtcttatcccccaatctgtcagttctgtcagggtgaaatgtgcgccttctcagccttctgtcttctttggtgctcattgctaaatagttcagtagaaatgcctcagaggaatcatcttggtgctggctccaaggctctgtgcagtcagccaggctatgaaagaaggcagcctgtgccttctccagactcattccygctccatcctcaacctaatcttcctgaatacactctccattcaagagccgatggaaaaatggatcactgacaaataacgaattattgtatgaattaacctcttgctggcaactgggcagtttgatagcagactcaaactgggtgatttgagaatttaataaagggactactaattcatcctatgctaatatgaaccctcatttagggttgagagagagtagccaagggatagtgcagtagttggggatttattaatggcagagascctttaccatttcttgacctggaggggctaaatggcacaggaaacacccaagagtattgcatagctagggcttctggaaaggagcttcagccttcagtagtgggctataggctgtagaaggagggaagtagggaaaagaatctcaccctctctgtgtcaccttctcagctcctgccagtgcttctcattggccaaaccaaatcaacagccagatagcaaatggagttacttgattaagtcctcctatgatggggggaagacagtggatatggaggggcagaaagaaaataaacaaccctacagggatccaccaattgcttttattcagaataaaattttattcagaataaaatttcaaagctattttattctgtaccaaacattgcaaatgttggcttgcggaaagcaaatacaagattattctaaagaaaacrttaagcctgaggccatatatcaattacaaggtgaattttagggctcaacacagttatatatcatcaagttcaaatgaacaaatgcctggatttgaatgctaaggcataggattatttcaatatgcacacwctgagcattttctgaaaatcatcaagcttttattaccattttatcctaaatcccctgaccacttctcattcaatttgcatgaacaggcctcctctttccacccttattttaatcctggagtttcctaactcagccttctcctctgctaattctactccttctcatagacaggtaactttttctrttctttgacatcagtttccacatcttctctagtgagatttcatactatttctttagctcagccctcccttatgaattcycagcccayagaacatagctgccaactggacattttcacctggatgctttatagacatcttaaatcatgttgaaaaactaactcattatcttaagcattcccaaacaaccttctaactcacgcgtgtgcgcrcacacacacacacacacacacacagacaccctgcctattcctgaattctcaaacttttaaaatatttcatggccttcatttttgttttctaacaaaaatagataaatgtatgaatggmatgtttttttggcagagaaataagtaaatatttttaaaatttcttcagtgttttctacaatgaaaaggaaatcaacaatttctatactctacgtaggggtcagyttcccaaacccatgacccattagtaatcatcaacaccttatccctggtctcccatatcccggtggttataaattcatggttaaggcacatagctcatgtcttccctgcttggaactgtatgcccatgtctggcattaaaacagctatttcttgaatgartaactctatgtcttttagctctaysctctaactatctccactgccagccctgcttcatctgattttagtcaataatttcttttctggtgtttgctttgaggacctatgtcaagatctgctgccaccaccttcacataggttctcagtgtcttcctcctatagcaccaaagggccttccagaggccttcctgcctccaaatattccctctctaatcctttctcttcactgcagccaattacctttctaaagggcaattgtggtccctctttaatttawttttattttatttgagaccggttctggctctgtcacccagtttggagttcgatggtgcaatctcagctcactgcaacctctgcctcccaggctcaagctgtcctgccacctcagcctcccaggtaactgggactataggtgcatgccaccatgcccagctaatttttctatttctttgtagagatgaattttcaccatgttgccaggctggtctcaaactcctgagctcaagttatctgcccacctcggccttccaaagtgctggtattacaggcatgagccactgagcccataaataataataagaaaactcactacttctgccttgctggctgggccacagacgattcctgtgtatttcccaaaacagtatgcacacacttgcatttgcaggttagagacaaagtatgtccactctaggttcttgctgcccttgagctaccttccagtttgctacctcctatctacaggactaagacccaagttcttagcatggaaatcagttttccttttcagcctcatttcctgccttacccatccactcacttagaacttggattcttcaacctcttacagtcccctaaaatgttttctgtgtgccatgccccttttgccttccccaggagttcctatttatgcttcaagaagcatctcaaatatcactccctccatgatgcctttgcgaactctctagcattagctgctccttcctctgatgttgtcctattttgtctatctctgtgttgtgcaataattacatctttacatttctgttggcccagcacaagccctacaggccagggctgtattgtagttttctttgtcatcctacccatcagtgccaaatttggaaaatagcaagaactcaatcaatagatgctaaactaatgaacactttattagcctacatttatggagcattcttggtacccattaaacagtttcatctctctcatatgtcagtgttatgtttcactgcagctttccctaaggaattttgtgagaaatatggagtattgcagcactattctttggtcacatgggggtttaattcctatttatacttttcttgtattactagaaataatgactgtaactacttatctggcaaatctctgaaatttctttttaaggaaattgttattgttggagaaatttgcaaagcccgactctgccagggctctattcctcatatctaagcagttaattctctactacgttacgtttagctttcggctctggaaacactctttgaatgcctcctttgtgcagatttatccaactctctcctctttctttcattaagcttgccctgtaaagccatattccttctgttttcaattrtgaatttatttcctctggagctttctgacttagaatctatttgaacttctatagaaactttggttgaaaaggaaaaaaagaaaaaaaagggcctatttttaaaggttttctctttcacctaatattagaggggatttctttgtgattaaacaaatttgttataaagtaacacacactgtgaaatatccaaacaactacaatgtcattataaatatatttttcttatcagagaaggcaacaggcaaatcagccactcttgcaaggtcatatttcacagagacagctgaattcacccactgttgaattatgttataaagccagtgatttagtattgtcatctattttgattgacaccaaaagccttccaggacagtaaatgtaaagatgttagaagaaaatcacttacaaaatggcttgatagttcatgttaatgagttttaaaatgcggtataacaacttaatcaaatcagacagctccataaaagaattaatttggtcattggctctctttccaaaatgactttgttgtactgagtaaggtgagaatttttctgtggctgaaacattcacaactagattcgaaatgacatagcctgggataagttatggattaaccaaagtttctcaggagttatttatatttggcctcttgttaaatgagatgcatgtcttttctgaagtttcattttaatgaaagagaaagaagaatatgaatgacatgtattaaagaccccgagcccacacttaaaacctcaattttggataacttgtgtgttaccttttagaaattagagtgtcattgggttgctattatgggtcgccaacagaaggggattcaggaatatctccatactgccccagaccacagcaataattttctgcaatgtcaagagaaaaacacaggacaataaccagttgaaagcagcaaagttctgcattattttttgctgtcctcttgtcccaaactctagaggagattattagaaacgtagtatctgcccctgtagaattatgggcttatgacaagactagagacctaaggagactagtttcttgtctatccgggctcaaacaccaacctctttcatgcacttccagactgaagttgtttctaaggtcagctttaaggagaaaattacatataatcagaattaccctccagaattcataaatcaccttccattggtatagatcactgtctcttggattgagcagcagattaagtagtcagattgcatttaggtttacattatataaaatttaatatgttttggctgggcgcagtggctcacacctgtaatcccagcactttaggaagccaaggtgggaggatggatagaggtcaggagttcaagaccagcttgggcaacatagcaagacctcatctctataaaaactttaagaattagctggacacagtggcacatgcctgtagtcccagatacttgggaggctggggcagaaggatcatttgagcccaggagwttgaggctgcagtgagctatgatcatgacactgcactccagtctgggtgacagaatgagaccgtgtctctttaaatattaggaatcaccttcagaatggcattgaaaggcaggaagtctgccaggcagtgcgtgagggaagagcagagtcatagactctcctcagactatcttattgacggacaagttacaggtacttttaaaatcagtctctccttcctctctctctctccttttctcagctttctgtctctctcctagagttaaattttaatgaaaaaaaataatgtgaattatttgtgtgttatatatgtgtaacatttctatgtatttrtattattaatatgacataataatataatatttgtattattaatatttatttaaaaccatcagcacacacttagaacctccgttttgggtaatgtagttattaccaacattcctacctgacatttatttgtgtatttgttcagtgtatatctgtgtcttctgtgagactgtggggtttatgaagaaagggactatgtatcttttggctcaccatttcattcccacgactagcatggagccgaagaggagatgaaaacatttttatcaaatgaatggctaaaggagagagaccattagacattactacctttggaagttctcttagtaactgtggctcaatcatgttgcagtgttatagacacctttataatttacaaagaactttcacaracatggcctcattataaaggtgacaagcatgattgtcccccataccagtctgtagaagaagaaactgagacttggagaggctaaccaacttgtgcaaagttgcacagctaacttatgacagaactaggtcttgaacccctgtcttctaacccttagccagaccagttggagttccccatccccagtgacctctcctacatttatggggactcttgtgtatcagagtttgtgactctgtgcccgtgtaaggcagtgatcacatcttgtccctcacaacagagatgtattaagtgcctactatgcgccagacatgcaaaaaacttccaggacgcaaacaagaatgagatgtatgtatttcttgccatcaaaacaactcacaatctaatgcagcatagtgttaaacatgtacatttctaatatactgttgaatatgtttgtggatgaaatcctatcctgcttgcagttgcaataatctgcaggttaaatggaaggaaaagcaaggcttgctggtttgcacaaacgttaacaactattagctcaagttcgaaacaagattgtaaccattctgcacaagtgttaaggagtgcatatttgcagagctgaggccaggaggcttaaattttagaaacagctgtggaactcctttcagtatgtacagttggaaggaggctggcattgtcagggagtcgctctggaaaatacaggcactgaatatattttatcttttcccttattccagtgttagtgtccccatagaattccaagtgagaaaataacctgcaaaggtgtgaggtgggaatcatattacaacattcaagcaggtgagatcctcagagatgaaaggggaagaaaatggcactttaatgcatgagagtaatcttccaggatttgtaccaggatgtgttatattttaacaagaagagttcycagaagggtcagtttcaggaacatcacatgaacccctggagaaaagtaaatggttgattggctgtcacacttactgtttcaatatgctgggtaaagcaaagcgaggaaaggtgaggtctcaccaagtgcagattacaaaacaaatgcattctttgtgtgcttttttcatagtagatgattttgaaacaaaaagagaaaaataaacctgttgagtagaaacttgggaagtaaaactgagtgatagaggattagttttcacatgtaggcggtacacagagtttgtacagtttcgtagttacaagacagggtagaatgaatatttaaagagaagactgttaggaacaatggttcagaaggatgaaggaactcaataaggttgtgagggattgagaaggaatgttttgcttgaaacatggagtatggcaacaatgaatgagcctagttttgaatcaaaatgacctgaaaaacttctgtagaaagtttccaacaaagcagtgctgtattatggaagatcctgccatatggattgaaacttttctagaacttttaatagacgagccctcataagtaagatccaggcaaccaaattactactctttgaatgctattgtgggtatcatgtcaagatccaatgttttctttccatgttatactraagaaataaaacttaatgtctatagttcaggttatattygaaactttaatagttctagattgaagctagcataaaaacactgtatactgagcatggtggctcacacctgtaatctcaatgctttgagaggccaaggccagaggatcacttgaggccaggagttcaagaccaacctgagcaacatagcgagaccccatctgatatggtttggctctgtgttcccacccaaatctcacctcaaattgtaataattcccatgtgttaagagcgagaccaggtggagataattgaatcatggtggcagtttcctctatgctgttctcatgatagtgacttctcatgagatctgatggttttataaggggcttcccccttttctcagcactcatcctccctcctgctgccctgcgaagaggtgctttctgccatgattgtcagtttcctgaggccttcacagctatgcggaactaygagtcaattaaacctcttttctttataaattacccagtcttgggtatttcttcatagcagcatgaaaacagactaatacagtaaattggtaccaggagtagtggatcactgctgaaaacatacccaaaaaatgaaaataaaaaattagccagacatgatggcatgctcctgaggtctagctattcaggaggctaaggcaggaggatcgcttgagcccagaagtttgaggttacagtgagctatgattgtgccactgcactgtagcctgggtgacagggtgagactttgtctctaaaaaagtgaaattaaaaaaaagaaagactccataaatgacattttaaagggaaaaaatgtttatgacaattatattgtatattcaaacaaaatrtattcttatttcataaccaatgaaaatctgtgttgactggaaaagagattaattatggtcactgagaagcagaatgtaaagcattatttgcaggaaaagaaagcctagtttcctttacatgccactcacatattggtattttctcattattagaacttacatttttttaagttcagagttttaaaattccccagagacttctgcaaaacctgaaccatcattgagtaatccatcaaaaatccagaggcattaaaagttccatgactaatatgtgtgaaatgtttgaagatgaaactctcttttgtaattatagaccgcagaatgtggaatagtttctgccgtttgaattacctacctgaggatactacttgaaagttccatcttccgtaaataacagycagcctgttatagaagacaggcagtgttttcatacctggaatagaaattattttagaatcatttccatgcaacattttttcattattactaagatctsgtgactatgaaagggagtaaacttacacagctggctcttttcagacagagagattcaatttattcttgttccaatactgtaggaaaataaaaaggttaaaattaccttttggattcaatgtgatattttccctagatacctaaacaaatggaagacagrcagctttcccagctttggaataggggacagtaagggatttcccttgtagcgtgttgtgttttatctgaaatctggcccttttctgtaattaaaaaagggatttaggtactgaatttaatcctttaaatggccaatatcttgtaacttttccagatatttccctggttcatcaagaggcaagagacttactttaattctgatctaatatgtacctgccttttaattatgtgctaaaacaatttgggagatgggatggtttggtacaaacttgctcctgctgtggaaatggtgacttggttgatctaggttctggtccagaaatgtgcaggtttgggtttgttttttttttttcaattattatactttaagttttagggtacatgtgcacattgtgcaggttagttacatatgtatacatgtgccatgctggtgcgctgcacccactaactcatcatctagcattaggtatatctcccaatgctatccctcccccctgcccccaccccaccacagtccccagagtgtgatattccccttcctgtgtccatgtgatctcattgttcaattcccacctatgagtgagaatatgcagtgtttggttttttgttcttgcgatagtttactgagaatgatgatttccaatttcatccatgtccctacaaaggacatgaactcatcactttttatggctgcatagtattccatgctatatatgtgccacatttacttaatccagtctatcattgttggacatttgggttggttccaagtctttgctattgtgaataatgccgcaataaacatacgtgtgcatgtgtctttatagcagcatgatttatagtcctttgggtatatacccagtaatgggatggctgggtcaaatggtatttctagttctagatccctgaggaatcgccacactgacttccacaatggttgaactagtttacagtcccaccaacagtgtaaaagtgttcctatttctccacatcctctccagcacctgttgtttcctgactttttaatgattgccattctaactggtgtgagatggtatctcactgtggttttgatttgcatttctctgatggccagtgatgatgagcattttttcatgtgttttttggctgcataaatgtcttcttttgagaagtgtctgttcatgtcctttgcccacttttcgatggggttgtttatttttttcttgtaaatttgtttgagttcattgtagattctggatattagccctttgtcagatgagtaggttgcgaaaattttctcccattttgtaggttgcctgttcactctgatggtagtttcttttgctgtgcagaagctctttagtttaattagatcccatttgtcaattttgtcttttgttgccattgcttttggtgttttggacatgaagtccttgcccatgcctatgtcctgaatggtaatgcctaggttttcttctagggtttttatggttttaggtctaacgtttaagtccttaatccatcttgaattgatttttgtataaggtgtaaggaagggatccagtttcagctttgtacatatggctagccagttttcccagcaccatttattaaatagggaatcctttccccattgcttgtttttctcaggtttgtcaaagatcagatagttgtagatatgcggcgttatttctgagggctccgttttgttccattgatctatatctctgttttggtaccagtaccatgctgttttggttactgtagccttgtaatatagtttgaagtcaggtagcgtgatgcctccagctttgttcttttggcttaggattgccttggcgatgcgggctcttttttggttccatatgaactttaaagtagttttttccaattctgtgaagaaagtcattggtagcttgatggggatggcattgaatctgtacgttaccttggccagtatggtcatgttcacgatattgattcttcctacccatgagcatggaatgttcttccatttgtttgtatcctcttttatttccttgagcagtggtttgtagttctccttgaagaggtccttcacatcccttgtaagttggattcctaggtattttattctctttgaagcaattgtgaatgggagttcactcatgattttgctctctgtttgtctgttgttggtgtataagaatgcttgtgatttttgtacattgattttgtatcctgagactttgctgaagttgcttatcagcttaaggagattttgggctgagacaatggggttttctagatatacaatcatgtcgtctgcaaacagggacaatttgacttcctcttttcctaattgaataccctttatttccttctcctgcctaattgccctggccagaacttccaacactatgttgaataggagtggtgagagagggcatccctgtcttrtgccagttttcgaagggaatgcttccagtttttgcccattcagtatgatattggctgtgrgtttgtcgtagatagctcttattttgaaatacctcccatcaatacctaatttattgagagtttttagcatgaagggttgttgaattttgtcaaaggctttttctgcatctattgagataatcatgtggtttttgtctttggctctgtttatatgctggattacatttattkatttgcgtatattgaaccagccttgcattccaggaatgaagcccacttgatcatggtggataagctttttgatgtgctgctggattcgttttgccagtattttattgaggatttttgcatcaatgttcatcaaggatattggtctaaaattctcttttttggttgtgtctctgcccggctttgctatcaggatgatgctggcctcataaaatgagttaggaaggattccctctttttctattgattggaatagtttcagaaggaatggtaccagttcctccttgtacctctggtagaattcggctgtgaatccatctggtcctggactctttttggttggtaaackattgattattgtcacaatttcagttcctgttattggtctattcagagattcaatttcttcctggtttagtcttgggagagtgtatgtgtcgaggaatttatccatttcttctagattttctagtttatttgcatagaggtgtttgtagtattctctgatggtagtttgtatttctgtgggatcagtggtggtatcccctttatcattttttattgtgtctatttgattcttctctctttttttctttattagtcttgatagcggtctgtaaattttgttgctcctttcaaaaaaccagctcctggattcattaattttttgaacggttttttgtgtctctatttccttcagttctgctctgattttagttatttcttgccttctgctagcttttgaatgtgtttgctcttgcttttctagttcttttaattgtgatgttagggtgtcaattttggatctttcctgctttctcttgtgggcatttagtgctacaaatttccctctacacactgctttgaatgcgtcccagagattctggtatgttgtgtctttgttctcattggtttcaaagaacatctttatttctgccttcatttcgttatgtacccagtagtcattcaggagcaggttgttcagtttccacgtagttgagtggttttgagtgagattcttaatcctgagttctagtttgattgcactgtggtctgagagatagtttgttataatttctgttcttttacatttgctgaggagagctttacttcccagtatgtggtcaattttggaataggtgtggtgtggtgctgaaaaaaatgtatattctgttgatttggggtggagagttctgtagatgtctattaggtccgcttggtgcagagctgagttcaattcctgggtatccttgttgactttctgtctcgttgatctgtctaatgttgacagtggggtgttaaagtctcccattattaatgtgtgggagtctaagtctctttgtaggtcactcaggacttgctttatgaatcttggtgctcctgtattgggtgcatatatatttaggatagttagctcttcttgttgaattgatccctttaccattatgtaatggccttctttgtctcttttgatctttgttggtttaaagtctgttttatcagagactaggattgcaacccctgcctttttttgttttcctttggcttggtagatcttcctccatccttttattttgagcctatgtgtgtctctgcacgtgagatgggtttcctgaatacagcacactgatggctcttgactctttatccaatttgccagtctgtgtcttttaattggagcatttagtccatttacatttaaagttaatattgttatgtgtgaatttgatcctgtcattatgatgttagctggttcttttgctcattagttgatgcagtttcttcctagtctcgatggtctttacattttggcatgattttgcagcggctggtactggttgttcctttccatgtttagcgcttccttcaggagctcttgtaaggcaggcctggtggtgacaaaatctctcagcatttgcttgtctgtaaaggattttatttctccttcacttatgaagcttagtttggctggatatgaaattctgggtggaaaattcttttctttaagaatgttgaatattggcccccactctcttctggcttgtagggtttctgccgagagatctgctgttagtctgatgggcttccctttgagggtaacccgacctttctctctggctgcccttaacattttttccttcatttcaactttggtgaatctgacaattatgtgtcttggagttgctcttctcgaggagtatctttgtggtgttctctgtatttcctgaatctgaacgttggcctgccttgctagattggggaagttctcctggataatatcctgcagagtgttttccaacttggttccattctccccatcactttcaagtacaccaatcagacgtagatttggtcttttcacatagtcccatatttcttggaggcttttctcatttctttttattcttttttctctaaacttcccttctcacttcatttcattcatttcatcttccatcgctgataccctttcttccagttgatcgcatcagctcctgaggcttctgcattcttcacgtagttctcgagccttggttttcagctccatcagctcctttaagcacttctctgtattggttattctagttatacattcttctaaattttttcaaagttttcaacttctttgcctttggtttgaatgtcctcccgtagctcagagtaatttgatcgtctgaagccttcttctctcagctcgtcaaagtcattctccatccagctttgttccattgctggtgaggaactgcgttcctttggaggaggagaggcgctctgtgttttagagtttccagtttttctgttctgttttttccccatctttgtggttttatctacttttggtctttgatgatggtgatgtacagatgggtttttggtgtggatgtcctttctgtttgttagttttccttctaacagacaggaccctcagctgcaggtctgttggaataccctgccgtgtgaggtgtcagtgtgcccctgctggaggggtgcctcccagttaggctgctcgggggtcaggggtcagggacccacttgaggaggcagtctgcccgttctcagatctccagctgcgtgctgggagaaccactgctctcttcaaagctgtcagacagggacatttaagtctgcagaggttactgctgtctttttgtttgtctgtgccctgcccccagaggtggagcctacagasgcaggcaggcctcctggagctgtggtgggctccacccagttcgagcttcctggctgctttgtttacctaatcaagcctgggcaatggcgggcgcccctcccccagcctcgctgccrccttgcagtttgatctcagactgctgtgctagcaatcagcgagactccgtggggtagtaccctccaagccaggtgcgggatataatctggtggtgcgccattttttaagctggtccgaaaagcgcaatattcaggtgggagtgacccgattttccaggtgcgtctgtcacccctttctttgactcagaaagggaactccctgacccttgcgcttcccaagtgaggcaatgcctcgccctgcttcggctcgcgcacggtgcgcacacccactgacctgcacccactgtctggcactccctagtgagatgaacccggtacctcagatggaaatgcagaaatcacccgtcttctgcgtcgctcacgctgggagctgtagaccggagctgttcctattcagccatcttggctcctyctctcaggtttgggttttttatgatggtaaaatatacatattataaaatgtatcactttaattgtttttaagtgtacaattcagtggcattaagtacactcacattgttgtgcaaccaataccactatccacatgcagaactttattctcatcccaaattgaaactccacactcattaaacagtagctgtccatttccctcttctctcagcccttggtaaccactattctagtttctgtctctgtgagtttaactattctgggtacctcatatacatgaaatcatacagcgtttgtccttttcgatctggattgtttcattgagcatgttttcaaggttcagcaatgttgtagtttgaatcagaatttcattccctttcaaggctaaatatgttctactccatgttatacacattttgtttatccattcctccattgatgggcatttgggttgtttccaacatttggcttttgagaagaaagatgctattgacattggtatacaaaatttctttgagcccatgctttcagtttkttctatatatctctagaagtgaattgctggatgatatggtaactctatgtttaatttattgaggaattatcattctatagaaatgtgtmgttttttttgttgttgttgttgttttatttgtttgttgagacagggtcttcttctgttgcccaggctaggcttcagtggcatgatcacagctcactgcagccttgacctcctaggcccaagcaatactaccactttagcctcccaagtagctgggactacaggtgcatgccactacacccggctaattttttttttttttttttttttgagacagagtctcactctgtcacccaggtgtgatctcggctcactgcaacctctgctgcccaggttcaagtgattctcctgcctccgcctcctgagtagctgagattacaggcgccagccaccacgcctggctaatttttgtagttttttattttttagtagagacaggrtttcaccatattgcccaggctggtctcaaactcctgagctcaagcagtttgcccacctcaacctccaaagtgctggaattacaggcatggaccaccatgccaggccagaatgtatagttcttaatcagcattccaggtgatgttatgatcagataatttgagaaacatttatttgtcagttacctattgctatgcaaccaaccactccaaacaattagtagcttacaacaacaaccatttatttagctcacaattatactgggtggctcttctggcctgggctgggtttgtctggtctctgttggcctagctcatgtttctgtggtcatttggctggtcttttgggtgctggctgttctcagatggcctcagtcatatatccagtggttgcttggctataggctgaagcaatggcgtgactaggcctagaacctttccttgtttagtaagctaaccccagcttgctcccagggtggcagggtcccaagaacagcaagagagcaagctccagtgcataagctcttttcaagtctttgcctatattatgtttgcttgtcctgttgggcagagcaagtcacctggccaagcccagtgtcagtatagagggcactaccaaatggtgtggacacagcgaggcagaaaaagagctgagaccattactattattattccaccacaacttaactgcttgattcagtattctgacgtgaactcagggttatctgaaaactttctcctgccgtaataaatctgtgaatggagcataatcatgtctgaagttgcatagagccctctgaaccacatgccccagcacctctgcaacgctctccatttgagggttcattcattaatttaataaatacttattgwgaatctactcgtgtctggaactcttctaggacctgggtatacagctattgacaaaatagtccaagttcctcttctccagggacttacattctactgcaggtggaaaagttttaggagtgagaataaatgtttggatccctagcacatattcaggaggttttgtggttgtcattgtttaaagaggaagaagtttgaagaatgttctttattccctattcttcaccactatgtgcttttactaatatttgagtagagaaaaatattttggttaattagaatttccaggtatttaaatgccagaaggcagatgcaaacctgtgggaggatattaggattgacttttaacttgtaatccttatagcttggtgcagaagtaaccgtggcttgccgtaagggcaaaagccacaattacttttgcaccaacctaatacaagactgatggattcgcttctcacttcctttatgctttctgcaaggctttgtggctaagacttttggccccatagctacctgagggagggctactgatctttacagctcaaagggcactgaagagtcacatccagctgagcagtgatggatggctacaacagacattttctttggatacttctttattttattattattattatgtgtgtttaatcctatgggagtagaccagcattctatatttttaaagtagcactagtttgttggaaaatttgacttttataaactgaaagtgtatgtcatcagtacctggagatgagatgggtttaatgtccagctggtgctcagaggggctggsactctctgcatgggttagtttgccagctaaaactcacttcatgcacaagagctttcattgaacaacagtcaagctttgcttcagggtaagcaggtatttcagtgggggagaattaggagacagcatgtagtagtattcaaattaggatctttagagtcagacagatgtgtccgttactagcttggaccttgggcaaatgacttaacctctctgagtctcagtttctttatctataaaatgggataataacactatctgccccataaaactggcagcactaacagaaagcatgcaaagcttgtagcatagtgcctgcagtggacacttgattaaaaatgttagctaaaggctgttatcttttttttatttttttagatggagtctcactctgcctcctaggctggagtgcagtggctcaatctcggctcactgcagcctctgcctcccgggttcaagcaattctcctgccccagcctccggagtagctgggattacaggtgcccgccaccacacccggttaatttttgtattttgagtagagactgggtttcaccatgttggtcaggctggtcttgaactcctgacctcagatgatccacccgcctcagcctaccaaagtgctgggattacaggcgtgagccaccatccctggcctaaaggctgttatcttaataaatgctgttctgatctacagttacatcaccacaaactgatgcctttggcctggcccacagtgccagaatctgaactacaggggagttactctttgaaccaccctagcaccaatcctagctgagaaaaagacatttatgaaactgatttgccatttgtgtgtagccagtcaggaattcctacttgggctcttggccactatttgagcaacttttctgtaacactgaaccatagaagcagcccatccaccaccaccacaacaataaaaactagcacttcacacactagcaccttacctggaatgattttagaggtgttagagagccccagaatatctcctgtgtaactttccaccagactttatggacgagccaactaccaagctgtaaattgattgaatcttgtattttcctctttggacttagctgggcccagtgagagtttggttgagagtagattttggtggatgggaacaggagtttcatgaggtaagaggagaagagagagagaatttttgttcatgggtataggagccatgtaagttgtataatttcactataaacatggcacgcagggagagggtgaattgtgcccaggtaggcaggggaaattgcaaggctttggtgttggggagagcacagagataaagaaattacgggtaggagagggatccaaaggggaaatgaaggagagtgaaaggcaaacttttcagctgagttacatgagcgacatcaactataacacaaggtggaaaaatcccatcttcctgtcctcccccatgtgacaagaagctgatctgccttcttggatttatttccttctggggctgtatttctctccttgcgctttgtctcacctcctaccttgttataggcgatctttctccccctgaggaaatcataattctatcactgtggaaattgaagtgtcttcagctttcttaccagtcttagagtattttcttaggccaaattgccaatttcctcttttatggaaaatactaaaatacttttttttaatagagtgaccttgatcctttcccatttgctattctttccaatttctagactggagctagaaaaattgaatgaagttgtcagcctagtggcaataaccacattaaaatgtttctctgaaagtctttggagcagagtccttgggcatttttaccagtgaccatccatgaagtgacagcactatagacacagggttttgtgtccagagaactttccaccagcccttctggtatgatttactgtgtctgtcttatccaggccctaacacagggcttggagcacaatcagtgatcaataagtgttaactcagtgatagggcagatggtcattgatttaaaaataacaaccttgggccgggcagtggtttacacctgtaatcccagcacattgggaggccgaggcgggcagattacctgaggtaaggtggtcgagaccagcctgaccaacatggtgaaaccccatctctactaaaaatacaaaaattagccaggtgtggtggcacacacttgtaatctcacctactcagggggctgaggcaggagaattgcttgagcctgggagacagaggttgcagtgaaccaagatcgtgccactgcactccagcctgggcgacagagcaagactctgtctcaaaaaaataaaaataaaaataaaaataaccttgcctcgtactgttggggtacacacttccaascagtgacccttggcagctctgggaagctctgagacgtgttcttccttggagtagtccctctcagcctgcgacactgtccatctaaatctgtggcacaggttctccaactctaggaggccaggaggcgctatgtctgacaatcgtttgaccctgtggctccaggacaccccaryactctggactaaacacactgcaccactcctctccttaaagatcttaaggattgtgctctaattagtttggaaatggaatttcttagactatttctaaaagcagctgcagcctggggacaaattgactaaattcaccagttctcctgaaaatgatatttgaaaggaaagttgagctgcttctatcttcccagagaaatctacatgtcattcagatgttggagaccctcaagaggcagaaatgtcttcatcccctgccgtttgggtactgactaaaaccgttgatccttttccttgaagtctgaggttctgctgttggcctctgaaaagcaggggacagaatattctggcagactctggcaagtagatgaccccttgctgggagtaagcttcagccttttccaaggtctgccacaacagaagcagtaacatgagagcggcactcagtaggacaatgacgatgaggctaatgagagcttttggccgtgagaaacactgcctccccaagcagcattcagatatgtagaaacggtcttgttttacgtgccttggtgcctcgggcctgtacaaagtcaccaacacattcaaactggagtggagaattggggatttaaaaatgtgattgctgaaggcagcaccatcttaacccctggagtcatcgagtgctcatttgctgctaggggacagaaaarccattagagatattccctgggtatgtagcccagttatttttgttttttaacatatatcccaagtgattcaagagcatgacaaggtttgggaattacagtccttgagcacartctcccattggtactttacaaggttatactttagactaattgaacttgttttatttttattttatctgtaatgatatttgatattcattttgtatataaaataattttgtttttatattttgtatatgtagtatgtagtacaacataattattttgttagtaatatttttattttataatatagtgataatgataatacagtaactgcatataagtacttatatacaagatattgttctattgtaatacaatataatcattttgatagtaacatttttattttgtaatatagtgataatgataataatatagtaactgtatgtaagtactacttattatatacaagatattgttctgaatgcttttacatacattatcgcaattaatcttcacaatgactttttgaaggaggtggtattagtaacatcattttacagatgagaaaagacaggcacaaagaagctaaatgatttgcccaaggttccatagcggtcaagtggtggagcttgaatttatacccagacctggcgattcttaggtctgagacttttaactaccacactgtgctgatccaagtggcctgaagctttacaaaatttgattagagagagttgcatcactaggaaacagagagatataagaagtctgtgggaagggaaagaaagatgccttctctgcagaaataatgtttaagagttttttaagccttaagtaaattagaccatctgtttgtggccaggaacatactcagtggaataatgtcccagccaatagaaaaatagactttgcagaaccccagcagtcagttgctgacatgagtatggaatccacaggaattccaggttactccttgctccggaaataaggaaaagcactaatatgaagtagatcttggcttcacccaacctgggagtgggaggaagtctgcctctgaacgccagaaaaaacctagggatagtaggggacacgaaatgcaagcagattcctcaaatctccacttgaaagctagaaagcttcactatgtattctgcactgacagggaaagacaggtcctaattggatcgactgatccttctcttggtgggagaggccttggcctttgtgaaccaaggaagagatttttatgacaaacttttctagatgctttttagctgaagttaaagaagattatgggtgaattagaaaagggatttataatasaactttggattaatttattcattcataaacatttattgggtgctttggctgaattaggcagtactctaggggatacaggaatgaagaaaaaaatggttcgttcccaagaatcttacaactgagtggtggagacagacagcaaaaccagcaacagcttaatgtggtgtttccatagacatgtttgagaattcctatggtctatcaggcaagggcactttaaacttcttaagggttgggaaagtcaagtgcaaaaaagcccccaaagaaggaggctttgcattatgtcacaaagtagttgcagttacccaggctgatatgcaaagacctccctggcagaaggagcagtgtgtgcacaagaggacagaaggcaagggcaccccacagtcctgcgggtgcacggtgagcaaccagaactagccagctggtcccccaactcatgtcctcttttggtggaatctccacacccagctctacaacctcaagaatcccaagccagggtctaggtctcaatatgaagtcagactctgtttctgaagcctactctgtgattctatgcacaatttcatgctaatattcacctggacaatggaaggcatgaaaagccattcagcctcgtttgtgaagttagaattgtcaaggaaaggggctgatacttctcaagtaatcaggcatggggctaaaggctttctgagttttggccaggaggttgttgtttgattttacgtatcgtctttattatgagctttctcacccaactgttgctgtctgtcttaatcactgaaaaccatcctctcctaacctgcagtcatgttacgatttgttttctcctagtctcatattttctctggatgcatttcatccccagtgtgaggagaagccatccctaaatcctaacgctacattgtgtatttctaagcacttgcctcaaggccccactcccagcagctattgatccctgagagactattatatttatttgcattgacacgggggctcaccaccttaagtgaaaggataaacaattaatgtcccagctcctggaagtcggatggcctttctgggatgccattaagacttgtcttggagagggctgtttaaagtagctgctcagactgaactttaactaattattcaatcaacgatttggcaggtcagtcaatgggaaatgatgcacagtttgctgaaattgatcacacttcatttcccatcaattgtaaagccaaattgtgggtaaagtcataagtaaaggatcattgcctgccattcttaggaccatgtttccctatcccttccatttacttaaaccccagcctcatccataaaagcaagagaattttgcacttacagagggaatcagtataaaatgtttaccaccttctgagatggaaggggaagggagagtgttttctatttcataattgatatgttgcagccacataatcctctaaccttttcctctaaccttttcggcagctcagatgtggaggctggattttaaatcccatgatccattatgcatcacttacttccacatctattaccattccgtcagccaagtgacaggattccccatcagggcctttgactgtgtggggctcttcaactttatgctggcggataggcatgtggaacttcatacatgggtgatttacagacaattagcaggaggcaatggcagattaagtgtagctcttctgaaaaattatgaataaaggatgtaaaaaggaaggtccccccacccaggccctgcccaggaaaaggcttagaatgatccaagcagtgaattttatgacagtaactaccaccctctcagaagatgcaaaatggaatgtgtgcttgtccacattgattggcagcttctgaaaccaatcaccggcccaggtcagtagagccccactggtaggccaacagatcatgaagaaagcagagacacagactcggatttccacataagcttcctcacctgctttgttctcccaagccaactggccttttttcttgcacactgggacctgataaaagcctctggkacttgagatgaaccactagacaataatcagaatggaattttctgggaaatgtggccatatgaaaaaaatgatcackttttcctcacaaggatttgcaaagtggaaagagtaggattttaaaaactgtattttgtagcagagaaaactaaggtttagaaatttgaatgacttccttaacaaatatttattgagaacttgccatgtgctaagcacaatattaagyactgagcttactyggtattagtcggaattctccagagaaacagaaacaataggacactcgcacacaaacacacacacacacacacacacacacacacacacacayggagctttattatgagaagttggcttatgcaattacggaggccaagacatcccatgatcagcagattgcaagctggggactcaggaaagccagtagggtaaatcagtccaacctgagacccaggggagctgatgatataaatcccagtccaaaagcaggaggagatgagatgagatgtcctaatttaagcactgaggcagaaaaacaggttgttaatcctttccttaaccttttgtcctgttcaggccctcartggatctgataatgccaaccacactgggtaggaccagctactttactgagtccaccaactcaaatgctagtctcatccagaaacaccctcaagacacaccaraagtaatgcttactctgtgaaccctgtagctcagtcctcacagggctcacagtccacccataaatatgtacatatattatgtatcaataaaaattgttctaattgttttaattaaaatgaagagctagtagtctagtggaggagacagacctgaatgcaggcaaaaatgatacaaggtggacagagctgaagcggttgaagtggaagtgctttgggggttcagaggaggggcacctgcctcaattttggggtggcagagggtccagcaaggtctgtgctgaggaaatgacataaggcatcaagaacaagcaggagtgaaccaggtggagaaggcttttcaggcagagggaacagcatatacaaagccccagaggcaagacagggcttcacaggcaaaaggttagaggccaaaatacaaggaggaaaaggggagagaggtgggctggagagacccaggggcctgttcggggaggcgtgtgtgagcttgtaagtagctttctcctcagagccaggcctctgatcccagcatcctgaaaggcagggggctcagtttcagctctagccaaattcaccctcctccacctcctcctcctcttcccctcaaatctccttcatctacccccacatcccctccttctccactcctccccctcatgctcctgtatctcctccctctcctcctcctgtatctcctccctcccctcctgtatcttcccctcctcctcctcctgtcctccccctcctcctcctgtatctcctccccctcctcctcctgtatctcctccccctcctcctcctgtatctcctccccctcctcctcctgtatctcctccccctcatcctcctgtatctcctccccctcctcctcctgaaactcttcctcctctttctccactcctcctcattcttgctagacggaaaaaatagttatttattttttattgatacataataattacacatatttatggagtatgtgtgctattttgaaattttcctttcggtcactgtcaagcacttctggaggtaatgccttttctacaaagtgcacaatggtcrttgcacactcaaacatcccccaaccccctgccccctgaaagaaggccatatgggctaagtgatctgatcaaagtcacttggtgctaattagagatggagctgggatttaaggccaggctctctgtcccagctgctttcattgtgtaaactgaacgctgacttggcctctttgtatgtcactcaaaaaactcactgggatgcacacccttttaaatgacatctttttctttttagaattgtttcatgttggagaaaataacatggttctcaagcctttcaacagtcctacatccacaaaaggggaaagggacactgcactgaaattagaatcttcaacaacttcttcaatcttccctttttaattgggtgaaagtaatgtactcctaattatttgagaaatgatgtgataagccccattattaagacctcttttttctgagtgacatgagcaatttaaaaggaagggaaattaacaatggcatgaatggtgcattatgtgctccaagttcgggtacaatcattgaaccaaaagagagggggcaggggaatgagactgggctttctcgtaatatttctgagttggtgagcatgaagggagaaaaaagccagtccaagcttgtgtttcagactctgtaatcaggaaaaggcaaaaaaaaaaaaaaaaaaggtaaagacacagtatctttcccttccttctcaagcagtaaacactgggggacacttctagtgagtgcatctgacatcaatttctattcttcagcatcggaatgtcaatgaagtagaacaggggatgtttccacaagatattaagatgacagacagtcttactctctgttcactggagagtagaattggtagctctccaactggtatgattttagggggtgcaaatacaaatgcctaggggaaccaggaaggagctctccatgggcaaggctggcatgggtgagggtcaagggcacgggagcatggcctctctgcacgtcagggctgctgctccgctctgcatgactgtcatcacaagcaagagggacccagggatccaggtcctctgagttttcaagggaggccaaaggattctaggttttatctttatgtgtttaaatgacaaagctcctcattttgaaatgttgcagtgctgttgacacgttactaataaggtttgtgtccttatgttgtagaaggaaaagtaatggtttgctgaatattattaaaagttcttacgtaggattttgtaagtctcaatagtatgagaaagaatgaatgtgagatagggatttggtattaaatattaaatacaagtcttcagaatatggaggtcatattacagagataatatgtaaagagacataatatagtacaatggaaagaacactacacgtgggatgagaattactcaggatgtccacagacaagggcttcattagccctgcctcagtttcttcatctggagagccaaagattcaattcacagtccatctaggctctcttctaaccttaaccttggtgacagccctagacccacactgaaatccatcagagatccttcattggcgctgagcagtttatgtttcattctgaatgatggagttctcttccattaggcaacttcaggcaaraagaagaagaytgtatcaggggttcacaaaataaagaaaaaagaaagcaggaaggagagttctagaaagagccaccctttagaaaaattctggtgcaccttcatcttctcaccatcacgatacccccatttttgcttctaagtctttatagatcataagtcaacttcctaccaacagttaagaatcttaacaacagttagaaactcagaatcctagcagcacaggcatcttctgagtactcaccatgcacgaggcactgtgccaggtacaaacattcatattcctcacaacaaccccaagtgataggtttctagagaactgttactgtacacatcttgcagataggagaactggggctgagaaatggaaaagccatttgtgcaaatccacacagccaggaggaggcagatcacccagcactgactccacagccattgatcctaatcactcccaagaggctgaaacatgtgctacaccagttgggctctgggaatctggcctcagtttaaatcctgcgtctgccacacagtgaatgtccttgaaaaagtaatttaacctctttaaagcctcagttttccgacctgtcattgagaagaatgaagtaactgccacaagttttgaggattagtgagctctacataagggatgtcaggtacattataagcgttcaataaatggtggtgattattgttattagtccactatcattcttraatatcttgtttcttactgaactgctaggagttgcaaaaccatcctgttaagcaggaaaagcaaggaagccacttaacagatgcaaatggcatttcacaagggagtcagagacaggggctgagaagggactcagatggcttcagcccagctcctagctgactgaacagatcacttccttgaagcctctagaggaagcagtgaaatgatatcaattcccctgagctttggaagggaaaaagattctatcttgcttaaactgttctactgtagagaaatcatatgctttagatgccagggcagkggggagatacccctggatcttcccaaaggtcatttgttgcaggcagagggattaaatacttaccactgcttgctggtatggaacactgaaaacacatcttctctctagatagaatatatgaaacaaaaaggaggctcccttctgccagctgagggaaattgcagggcagtgcactttgtcatcactgtggaagtgcctggtagaacaggtgacattgggcaagagaaagcccttcagtgccagatttgttttcatcactgtgttctgttctcatcatattgtggtgtgagactcgcaaaatctcatgcattctcaccacgggagcctgcatcttcattgctgaagggaagtggagagctcaaagcagttcatgcaggcaattcctccaaaaagttccccaaactatctggagcatcatctcattctccacttcaagttaattccaaaggctggcctggaggaacttctgcacagaatttataattagcccagctttgtggaatagtcaggcctgagtcctttgttcatgctgatatgagtagcagaagggtttctgcaagttcttgcccagttgcaattgaagtgtttaggcggttagctctttctgctagaaaactcaccttgggtgtgcctgccactctggcacatgtcttcaaaaatgtgctttgtcacatttaaataytgatgttttgttcctagttatggaaatgtaggagtgtctgtctgatggttcatttctaacccccaaattcctatcttatacwttaaactgccctgaaaatcaaaagcccttggaatcaaactccagatacacagccacattgccaacacactactttagcaaaagatccagaacatattttacatgaaaacctgtcagactggttttttattataaaaataatgtaaagaattgagccaagcacccatgttattctgatgacaaagaaaactaattgtgctaataacactaagcaaagtcttcagcaatcattctgagctgtaaattgggcatgcttttttaactgtggagcctctttatgaggtatatgaagataacaagcatgcttttgaggggattcttgtgtaattgacattttttaagtgccgagaatgtggttctaagacacatttgagactggggtcttgcactcgttaggcagtccaaagtatttttagcttccttctcattggagagctagcatttggggcgtagggagaatgaagcttatgccatgyttttgtttcctttgttgtttgtttgtttgttggggagtgtggggatacaggatctcactttgtcacccaggctggagtacagtggcacagtctcagctcactgcaacctgcacctcccaagctcaagcgatcatcccacctcagctccccaagtagctgggaccataggtgtgcaccaccacactcctctaatttttgtatttcttttagagatgaggtcttgccatgttgcccaggctggtcttgagctcctggactcaagaaatctgcccacctcagcctcccaaagtgctgggattacaggcctgagccactgtgcccggccttatgccatgcctcttactgaatgcacctagtaacaaactaccccacacttggtaattgttcattattattatctctcagaattctgaaatttgcagttagatggaggctgargctggaatcattaaaggctccgttacacctctgggggctgatgctggctggtggcttgcacctcagcaggagctataggcaggaacacctacagatgtcctcttsttgttacccgggrktccgcacagcatggctgctggtttgcagcatcaagtatcccaagacagagagccaggcagaagccacatcaccaattctaatctagccacagaagccacacagtgacactttccactgcattctgttcttcgcaggtgagacactaaggtgagcccatatttagggcaagtgaaactagattctacctcttgatggggaagtgtcaaagaatttgaggagatgaaaaacttcaaatcagtcttttttaaaaaagtagtcaaaccagtctctttttaaaaaagtattcaaacctttcttccatcccctgcttgtaaactcacatcctgaggaataatgacttgaataattctaccagaatccaagaaaccaaattggttgggggcagggggtatgttgcttttattgtttccaagatgaagttctctgtgaaactagaatgtggttcctcttatagaaccctctggaattagcaaatgattcccaaatagtacaggtaagactcctgagtattaatgacttcattatattttgttgccgccatacttcaagtcaggatgcttgatgacttgatgtgatatgtgtgtgtctcctcccatccaccttaagataagcaataggcaatatccaattgtgtgagaacctgcattgttcacatgagcctttgtcctggataacagctcctgttcatcaatatgatacattgcactctgacttkctacttctgtctttctttgtggatattcctttctcctctctgattgctttttcttcttagaccattactctagttgatagtgcyaggttatcattggatcccatctccctctccaataagcctgtgattgatactaatcttcctcatgggacacatttyataggatgcacattggaaaccactctctaaatcttagctttctatgtgctgacaatttacaaggttgcacctcacacacatctcaggaggcttaaggggaaatttgagagccatgtaatcacacctcctaataagaacagaaatgcctttcatacacagatgctgtcatgccattcagcagtctgtgctgcgccccccgtttgtcttttttcccccagccaacaaaatgcacatctagggaagtgctatctgggaagtggccagttcctagaagcccagcatgaatcatttctctcttctgcaggagagtagtgttttaattattctaatgaaagctttcacttgccattgaatccataaaagcagaaaattaaggaggttgcgaacacctctctgargcagaaaccttgctttataatatacctgcacctttcctagcaaaactgagaccccaagaaatttatagacacaggatattacccttccagtttaacacatgctttggcattgaaattttacctttccagacccaagaaagtattttgtgaaaagttttaatttctcatktgaagtttgtacccctaaaatatgccagccaagaaagccaatataatgcagtatttgcttacaacaatattagattcagtgtgtcctttaaatgaaggcttgtgtccagaaaatagagggaatcatgggactcaaaactttaaagcaacctaggctagattaatgatttgattattagtttataggaaactcaaaggaggatgctgtggtctcttatacctcagtaaggtcacactatggaccagtaaagtttaagcattaagaaactgggtttgttttgcattttaacttaaaaattcagacccagttatatccattgtgaaaaagtaaatatttaaaaacttgggttttctggaattgygagatttcattcccaattttgttctcacctctgaaaatgggatacttttttgtattggcccttttaggagaagtgacatctcagacccctcctgtctttcttcctctaccatctgtgttctttatggatatatatttcttggcaaatttggtgtcatgggccacattgtgtctccccaaatttgtacgtggaagtcctaattcccattacttcagactgtgactgtatttgaagatgcaggacgtacttaaggaggtaattaagttgaaatgagacctttagagaggccctaattcaatatgactggtgttcttatgagaagaggttgggacactgaaaacacaggccaagggaccatgtgaggacacagtgagaaggcaggcccctgcaagccaagggaagaggactcagaagaaacccaatctgccaacaccttgatcttggacttcagcctctggaactgttgcggggagggattctgttatttaagccacgcaaccagtggtattttgttatggcagcctagcaaactaatacattggggatttctcctgcatataatagaaactcatttttccatataacaaactaaaacccccttgcacatccctaggtacagctctgtgcatggtgacagtggcataaagctgtaatactctccatgacttagtttcagggccaccggcaccaggcagagactggaacccggtaagcaccattgaagctcttccagcatgggttcccactgagaggcaggcagagcaactggaggtttgtgctgacaaagcggcatggagctataatgtccagagccactcagaactgcaggatggcacaagtcaagaaggaactgtgtcagagcagaggtgaaatctcggacagctcagaaatcttggcactgaaggaggcaggagccttcacagttagattgagagtgggcagttttttctctatctgttgcactttattatattgttttttwaaattattatcatatccagcaccacagggaagggtgaggctgagcacaggggcctggtagaactgggtcattgtagcgccaactagaagagtgtgagctacaaagcaggaagaacagtttctcaaaggggccgratgggggtagtcattggggtgccatgagcaggtgtcctgtgctgatgctggcagattaagcccgcatgggtttgcttcacattttaacttcaaaattcagcctcagttatatctactggagaatatacacatgaataaaagggtcactgttaaggagacagatctgagagagcccagataacaagctgcaaccaggccccaggcagcagaggaaagggctgcttggtcagtgtgggcctggaagcttgggagcttcccagaagccaggaccacagctttattccaacaccctgcagctgacccaatgtgctccccacagagaatgttctcgtaagaccttgtacttttctttcatagcattggctgcagttgtaattttgcatttgtgcaattctttggttaatattggtcttccccaccaaaccgcatgttggtgagggcagctggggctgttttactctccactgtattccctgtacctaaggtggtccttggaaagagctgactctcaggatatttcttgaatgaatgaatgaattgattcatgttaatatcacctccccttctccaagtactcagaatcttgctactggtacaggaacttataagatgcgtggaaggccaaggacaggagacagcatctcccaggggctcactgaaaagcctgtgcccttttccagcctccgggcctcatattgcaggtgcctccaggcgggctggggagcatctcacctcwgcctagcactgtgtgctctggatggccagggaaggtctccagggcrggatctgattctagggatttcgcaagggactttgatatgtgagacccagaagctccctgcagagaacaaaggggcagtgtggactgcctgtggagcctgagccaagatatgatctgggcctaagaaggcaccatggcatggctattcagtagtccacagtcctgctctggagcaaaccaagacctaaccagccacagagcaccagaatccccagctggtcagttcagggatttagagaagcttcctttctcccaactccatctgctgtgacccaccttccttagtcagcccctcaccagacaggtcctctttcttgcctctgccctttctaccttcttctgtatccttcccccgctccaggctctctctctgtctgtggattctctttgtcctgggtataggcataaacataataggcattaagaggtactggaaagcctgatcgattctgaagtcttgcactccccagccatcctattaaaaattttaaaatacctaatattccaccaccattatcccttttggctttagaatttacattcttacrcgtggacacaatttactttgtgagaatcaactgtgtctatgaacctgaaatagtctgttaaaaatggatcatggagcccgtgtgctcacgcttgtaattccagaactttgggagaccaaggtgggtggatcacctgaggtcaagagtttgagaccagccaggctaacatggtgaaatcccctctttactaaaaayacaaaaattagccagktgtggtggcagatgcctgtaattccagatactctggagaatcacttgaacccagaaggtggaggttgcagtgagccgagatcacaccattgaactccagactgggcgacagagcaagactgtcttgaaaaaaaaaaaaatggatcatagagtagatcaattttgatcagaaaatgtcactaataaaggtctggaacatggggtgcatctgtagccacatgggatccttgggtggcccggaggctgtggtggggtgacsagttgggggtaacatggtaaggatgcttggaagaagaaagtgagagaagggggtcaatggaaagacataggtcagtgggctcacagcctcgtccactgtgccgggtcatccagtcccactcaggctccctccctcctgctgcccctcctccaggcagtcttctcccctgcagctacagggccccagctgccaggccccagagacccacccaccctccacgggtgggaaacatgaacacaggcaggtcagctcagtcttctatcacaaagctcacatacatagggaggcccagcctcgtccaaggctgatttcaggaaagaagattattctccaagattttctcttaggaggcagcaccacaaaatggaagaggaactgactgtaagttctaacctgaattctagtcttggctttggcagtaactcactgggtgaccttgggcaagttccttcgcctcccagggcttctctttcttccatggcacttatgtggtttattttaaaggtcatgcatgctatctttgacctgtytgctgccattttctttggaaaaaagagccctgggagatatgattaaggagagagtcctggcctgttagccaggggagccctcctgcccagaccctgtaagcactctggataaccctctgctcctcttatgttaatttcctcctctttctcacctatcctgctgtctccatataagggcacagcacggccaattgcatttaaaattgccttctaaaaggcacacacatgcatcctggctggtcagtctttgtgtggagctgggactgattcatctcaggggcgtaattccagctttggcactggcttgtggaggtgtcattgagaggggttcagagggctaagcttaccaaccccccagaagaggggacacatagccttggctccatgtgccaagcagcagcataatatgcagggctctgcaaagtcagcagagaaaggacagcaggtgtcaaccactgcacatgttttacttatttattgatttacagtccatcttcccagtttgtatatagcctccttcatagtagagattcagcctcattagctgtctctggcatccttagcttgcagaatggtgcctggaagatagtggaccactaaagaacactttctgaatgaatgaatgaatgaatgaatgaatgaatgaatgaatgaatgaaaatgtgttaggtacaagtgttgtgctgtggaacacactcctggattctggctcctgccccacaggcttgtccccaaactgatgaagagcaaggcaggcactgcgcacagtggtttgggtcatcagcagtccaagaatgttttccccagtgtaggtgctcccccargttgatgggagtctgggagaggtggtgctgacaagagagtttcttcacctccactccaaagacagaaagcaacgaaagttaatgacagaagcaagcagcaggtgccagtgccagctccactgctcagtgcttctggatcctttcacggttctgtaatgtactcagtccccaaaggtatatctcctgccttctaatcacttacaacaaaaacacatgttgccctttacaccaaagataaattgaaaggtgttcaggttctcttctacttgggcttatgaccaagtctcagagcacctacattagggggcaggggtgaagtatactttcccattggcctcttccaattgctggaagtgcgagcttaagaggggtgaccatttattgagcgtttactgtgtgtgttgaaaactgtgccaagctctgtaaataagacaacatcccaaggcaaggcgactgcaatctcctgagaaatgctggcaaacaaaccaccattataaccgagttggagtaattcagggcagagatggtggagggctggactgaggagcacaatgggaactgggagacgcagagttgagagaaattgagggttataagacttaatgattgatttgttgaggagaaggaaagggagggtttaatgtgactcccgggtttctggcatgggaagccaggtgggattacaaccttcactgcatggaagacagagtggcagatctggggagactgaagttgagttcagctttagacgtgtttggtggtgatgttctgatgtgccgtccaagtggaaaatctcattaggaattggaattatttaataccagatatcatttaatgagtgggggagttttattgtttcagtatttttacacttcaatagtgctttagagagacatgtcctcttgtgtttgacaaaacactgatttgcagttctggtatccctcctgagtaagtcttatttttgagataaacatcacatcagccccgagtgcaactaaaaatgagctgggccagggcagtggggactgcagtctgtcaaggctctgtatttaacaatgcctttctccagtggcctctgccctgtgcctcccacactgtcagctctaaaggatatttagtccttgcagcctcaaattctttaacccttctttggcctcttaagacaagccctgggtatcactgaaacctaaggcatgtccagaaacaagcacaaaagaagaatgtgaccactgctgcttaacctggccagagaaattcactaagtcttgcacctgaaaaaccgaaacaaaacttcctagcaaatcaggttcccacaatcaaaggatggaaaatctcactggaggttggaaaaatgatcagagcctcttcaaaacttcaggacatcaaaagacctcactgtactcttattagaaatcaagctggaaggaaacatcatagtccttcaagtgacacatgaacgaatggaaagccgaaacccactttctgcagcttcagaaattcatatttttattcattcaaccaacatttattgagtgtcttttatatttaaaacactttgtgggacagtgtgggacacaaagaaaaagaaagttattctgtctcccaatgaagtgacacacaaatggctgagtttggtgaagaaataactgcagtgagtagtggggtttgctgatagcagtggaggaggtggaagctcctctacagattagcttattgaaccctcacagctttatgagctcgggtctagcattaccattattttataggtgagggaactaagacacagggaagttgagaaattttcccaaagtcaacagttggtaagtgatgggatttgaacccaagcaatcattattaaagacaactctgctgaataagtagcttttacataggacctgsaatgttgggttggctgtcaaaaactgcagctgggacagctgggagtgcatttcagatgaaggctattctaacaggaaaggcaaggacaggktacatttggatacgtgggtggtggtccagtgtgggcatgtgtagagttcttgaaatggatcagtggaaaataagctataaagggtcacttttagaaatatagacttccctctttagggatgagggggttacagaagatcattacgttggagtgacatgatcagaactgtattttagaaagaacacatgactcctgcactctagccacttagtacaataagtggaaaaaagagaaagtttcctggcttctgaaacaacgagtatagttacattgcctgctgtcacaaagggatccccaaagatgtgtaatagctcaaaaatgacagcttttgtcttgttcacatggtcaaaaaagtgggaggttctactatgtctcatccaaaccatggtttagggacttggtctccttctgttctttggctctgtcacgttcaatgtgtggcttccaatgttactatgccatgtgtatcaaggtgtcagaaagggaaagagagtggagaagacagttgcttctgaagttttccaatgacctctgctcctgttccattaggaggcacagggctctccctagaggcatggggactagaaacgaagtccctgactgggcagccacttccatctgtgactccatactgtggaaggaaagcatgaattttggtggaaagttagtcatcaccatcatacctgagtgaggaaagaaaaacacatttacccttcagcagtaacttttcaaagtagtctgacacctcattttgaagcctggttgagaaatgagttttacgagcaaatgaggcttaaaacaacataagcacagtcccatttagcaccaaatcttatttgtctaaattattgttgaaggttccaaattgattttatactttcctacctaagtgaacaaaacttaatttaagcttttcttgatgacttaggatcaccattatgaatgtcatttatgggaatgcagtgtgttgtataccagcagcttttgagtggtgtggaaatgttagttcctgggctgaatgcctcctgaattctaggctgttccattaagtctcttcattaacctcttgggtcccttagaatttttacagtcactgtgtattctcaatacctcccatttctatgtttctctgctttctgatttctcctgccatttttattatttactaacccattcatgtaggttttcttttttcttctttaagactccccaatcctcttttctttccagtcctttcactgattttgttttgcatattatggtggaaagagcaggcacacatgtgggagtggctttggcctcagcactgacactagctgtgctgcagaaactatgaccttgagcaatttaacccctgagcccctgtttcctcaatataaactaaggtggtaatatggatctcacaggcttacattggggttaactgagatgctagtaatagtataaaaattcatctgtaaaaattgatcgtcattatgactgttattttggcagttggacctggtttttattgtcgtcgtcaatagaaatagaaagagtccataggactccagggagttggaatccagacatgaacagaggaatagctagaatactcgagacatctctatggagtggacagctgaagccatgagtcaggctcctgaaagtctccaagaggttatagatctactaatgtgcttaagcagaatctcaagaaaggtctaatataaatggatgaagccataagaggaatatcaagaaaagaagactggataaaaatattccctgtttctaagaaaagaagaagttttctaaaccttgaaactcttttaagctatcaatcctatctgccaccattcactcccagccttcttgaaggagcagggggcctccatctcttcttgccaggaatctgcttcttgtattttacaattccttgccaaatctgggcagagtcagcggagtgaaggcagttgtgtctgggcagtctgcctaagagtttccattacataaacagtaggtgcttaataacttgcattgtgcacataaaagggaaaaagaagaaaatgtgatttttcactgctacagagtaaaccattctgtggccccagaggatgcatcatgtttagcaagattaaagcaggtggcaaagtccctccccagtgggtacatcacagctaatgtccatcaatgattagcaaatgagtagacggtgcctttgtcaataatcctgtttctaccctcatgctttatttatttagctaatggctgcctagctggtagctcatcaagatggtgtttactgagcttggcaaagtgaaaaattatgattttgtttactcatgtgtttccagctggggtgctgagttgttatccaggcagctgatgaccgttcttccactctcagagcccctaacacaggcagttcagtaaacaaaccatcagcttgagaaccagagcatcaacactgccacaatctggttatttgctactttgcagtcgtcagtgtccagaacctcaaatgatgactcattctggaacctcccttatacttagataataaaacaaatagaagtcaggttaagtgtaattggtttagtttgagctattcagttgtttatgagaaaaatgagtatttgctccaaattaaatatttgatttgggatagttttgtctcttgctctatactcaagcatgtaaaaatagaatggaaacccaaacagaaaacctgggagagactatcactctggaatggttctcacacatgcactaactaatttagttatttgtayagcaaatatatagtgagtacctactgtgtattaggtcctggggatattgtggtgacttaaacccaacacaaacatgaacctagttcttcagaaccttgcaactttgtaggaaagagagacattgaatcagtgattgtcaatatgatgagaattataaagggagaaacagggtgctwcagtagtcttggagtttagggaaggatccttgagaaagtgatgctttgaatgggagatgaaggagttccaaaaatcatagacagcgaaaggcagagagggtaagcttaaatattattattatctcagttaagtcacaaaataactctgcgaggtcagtattattgctccggtttacaattgaggagacttgggttccaggggaagcacgtgcaaagacctgagaccagactttatgaatagtgccacttggagctacaaggtcgagcaaaggcagtgtggctggagtagagaggaaccatgagaggcatgagatacagagggacttgccaaggagttcctaattaaaagtgcattttagaaagccactctggctggtatggagaatggattgaggtggatgtaggaggactggcttagaggcatggcagtgactgggtgaaaaagatagtgagttgaaccaggggtggagtcaggggaagcaacctgcaggaagatagaaatgattaacgtcaacagacatacaggaggttgggtcagcagggtcagtgagtggctggatatgaggggagaggcactgacaggttattctacatggctctctttatatctgtaacaattgagccataataatactaatagctgctccttactgagtgtctaccatagtcattctatagatgagaaaactgagactgagagtagggaagtacctaccaatagatgactgaactgagatctgagccccagcctgactcccaagccagtgctctctccactctaacactgtatttatgattctggtcaattcaatatttttctcatttggttgactgaaacctcagatttttcccccaatgtaattcagctatatatacgactccaagttctcataattcttttgcatttgaccattaattctcagttatcttccagatttcgagccatgctatgtttatcttcaggccatttcaaacagcagaggccagagaagccagttttgtggaatcgggcttgtcgggccacattaaatatcacctcactctaatgaaaatgcaggtttttgtttgttctaatgagcgcagggggcctttatgtccaatctcttcctagaggaagtaattgcatacgagtgacctttgaaggaaatcacatcagggagttatttgaaggcactgaggtgagccagtgcgtaacatcaaccaatgtactagcatttcagaaaagaaacaaataggcytgtcccactgacaactcatccatgccccctttggacagagaaaaatcatctactgcttgctgagaaagtgaggcactgaggcacagagatttctttaactatttcttgaacacctactgtatgccatgcactgtgcagaatcgctgcctcatggcactcctgttttagtggcagggaacagacaatacagaaatttttaaaaagtttaaatcattaaagattttgataattaccatgaaggaaacaaattggatcatgagaggtggtgaactgtacctcaacttcctcatctagttaaaaaggagagaatggtggaacttgcctcttggggctgtcttcaggactaggttagataacgtatgtattgggctcggaagaggtcctggcacattagttgaacacttagtcgtgttatgtggggtaacatcgttgttatagaataagtgggggaggcagtcaggaagggcctcctggaggaggtgacatttaagctgagacctgagcgatgaggagccaagcttatgaacaactgggaaagcaaaggctggagaccagagaaggaatgcttactgtttcccaggaacagaaaggagagggaaatcagccaggccggagaayagagagtagggtggggagtgaaatgagtgagggccatgaggcagacaagattccaaccaggtaattaactcagttttactctataagcaggggaagggagtggtgtgagctatgctttgaaaccccactctggcagctgcgcagagaatgacctgaaaggtgaaagctgcaagacaaaggaggagaactgcaaagtcgaggcactggtgggagggtgttaggcagagggtagcgaccttgttggtggcaaagtattagtttcttagggctaccagaataaattatcacaaatcggctgtgtaaaaaccacagaaatttactctctcacagttctggaggttaaaagtatgaaatcaaggtgttggcacagcgcttgttccccctgcaagctctagggaatgatacttccttgcatcttccagcttctggtggttgccagcgaatcctccgtgttcctcacctactagatgcatcaccccaatctctgcctctgtcatcacgtggtgctctccctgtgtatctctgtgttttgtgtctcttcttataacttcaccggtgactggattgagagcctaccctcatccagtatgacctcaccctgacttacatctcaattacatctgcaaaacctctgtttctagataagatcatattcacaggtaccagagagtagggcttcaacatagcttttgagggaagcagaaaacccacaacagcaaggtgagtcctgactgtcccacctctaaggggatgtcctggcttgaaagtagccccccatggcccagcttctggggtaagcaaaaccgccagccatgcacaaaggcattcagcatctttcctgtaattgggggttgaaatgctgtatagcgattcccagttgcttattccaaataagcaggcaggtggtgcagaggaaggcagcctgcagagtgagggcagcatgtcaaacaagggatgttccttcttatttgtctgtttccttaaaaccacttacacttctaggttgcaacttaagtgtactattatttaaggattccttttcggtgagtacccagtgactttgaacagtctatggatacaggtggattttcttggatttttagaagtgaggagacttggggttcatcccagatgctacctttcgtgtatggttttgaacaaatcccatagccccctgaggttccacttcttctgtaaaatgaggatgctggcccagcccagtggttcttaaccttgaggatgaatcagaagcactggagggcttgggaaaacacagattgctgggccccatcatggagcatctgattcagaaggtctagggcagtgcctgaatattcacatttctggcaagttcctagactttgttgttgctgctggcctgggaaccacactgtgagaattgctggcctagatcatctctgagatttctgcaacaatattattccataagtctatgaagctcattttaatgtaaatgactagatgaagtgaattttctaaccttagctagcaaaatttggatcccatataaaaatatgtcccagctactgctcactctgtttttcactttgggtttacctctctagacttaagggtgttgtacagagaatagaaagagagaggggccatttaaacaacacccttaagtatagagaggtacccaaattttgctagctaagactagaaaattcacttcatctcctgtggctagtggggcctccacatacaaggctcccagagaagtcagctgaatgttggcttggagcccaatagaatcacttagctttggtggcacttatttagggtggagggtggggcatagtagatgcaattgaaagcctgagaataatggcataaataagcccatgaaaagatgttcatcattagtcacttggaaaatgcaaatcaaaagcacagtgaggtacttcttttcacccattagaataatcaaaagagacagtactaagtgatgacaaggatgtagagaaattggaactagtgggtgggaatataaaatggtgtagccactttggaaagtagtttagcagtttttcaaaatgttaaacaaaattgtcatatgacccagtaattcccctgctagacttccattcaagaaaaaaaatgaaaacatatgtccacataaaaatttgtatgtgaatgtttataataccattattcacaataaccaaaaaatggagacaaatccaatgtacatcgaatgatgactgaataaacaaaatgtggtatggacaaaaataatcaaagtactgacacatgctagatacatatgtgtatatgtacaagatgacgctgaattttgatgaacctcaaaattactatgctaaatgaaagaaacaagacacaaaagactatatattttattgttccatttatgcgaaatgtccagaaaaggccaatctttagagataaaaagtagattagtggttgcctagggctggacatggaagggacagtgactataaatggacatgagatttcttttcaggatgatggaaatgttctaaaattaggtcatgctgatggttgcccaactctctaaatatacaaaaaaattatttttaattcatgttttaaattgagggattttatggtttgcaaattaatctcaataaagctgttaaaaataattttacaaatagaatggaattaaataaaaaaactaatgggatttcctgcacctccctctgaaggtcatttagtgctgaaggtggttatgacatatgcagattccaaatactgggctttagaaaatattatcctagttacccagtcagaaaagatcaggaactgcttactggaagaatggggacacttaaaacacaataaacacatctatttcacactccttatgtgccagacactgtggttaagtgctttacatggcttatcattcacttattctttgcaaagtatatttgttgaacaccttctatgtgctgggcactgtccttggtgctgaagatactgtgtgamtaacacaaagtccctcctttcggggagcttaaacgtgtagatgtacaaatattatcttaagattattttaggtagtgatacatgaatttaaacaaaaacctggatgatgagaggtagttacagtaggtgggaaagggaacagtttagattgagtggtcaaggaaagcctccctggggaggcggtctgaggtaacacgtggaaaagtcatcatgcagacatgaggagaagagtggcttgggtgggaggaattgctaacataaagtatatcagacagcaagcagtagagaaatgacagtgtaagcaagggagagttctgtacaggatgatgctgaaaggatacacaaggatagaagctgcagatcttgagagccatgacacagagctcagtttaaagtttggcttttcatggaatagtatacagccatgaaaaatgaaatcatgtcctttgcaacaacaatatggatacagctggaggccattatccaaagtgaattagtgcaagaacagaaaaccagatgccacatgttcttacttataagtgggaactaagcattgggtgttcatggacatacagatggcaaaatagacactggagactactagagtggggaaggagtgatggggcaagagttgaaaaaactattgagtactatcctcactacatttgtgatgggatcattcatgcctcaaaactcagtatcacacawtatacccatgtaacaaatctgcatgtgtacccctgcatctaaaataaaagttaaaattataaaartaaatataaaaataaatataaaataaagtttggcttcttattccaaaagcaataagaagcaaatagtaagatctaagcaggtgagtgacataatttgatttacatattaaaggggaccctaggatctacataggaacagaaatataaaagatagaataaaagaagtgaacttaagagctaagagtgctgcaggaactacaagacagtgggggcttagatgaagatggtggcagcagggatggtgagaagtggtaggatctggggcatatgtagtaggatagacccaacaggattgtctgagttgtaaagggcagagaaaaagaggtatcaagaaagatccttgaatttgggcttgagcacctgggtagaaggtgcaccattacttgagatggcaaagcttccctttgagtttggctttactatcttcgtgtcatagatgaaaaatggggctcagaaaagctaagcaactttgcttcaaattacctttctaatgagtagaagaagcagagtcaaagtcagtgactcaaaaaactatcttctaaactgctcagtactgccttctgcccacggatttcttgcatccttggccagccagtagatggaaatcagatgaggtggcattcactgggtggagacagaaagacttcttggcagtgaaggctggtgggtgggcttgtcatagaacaaaaaagaaaggaacagcttggaagagtaacacttttctagtgaatcacattaaataatcagcakggcttatacccagtgtcagcctgaactgagattgacagctaataaaaagcacagtaattacaggaaaacatcagattggaaagtacagagattcttgaaacacctgaagccatttaatatgtcttatgtttgctccagactaacaggcagctcccagagcaagaccggtctcattactgagctaatggacattatgctctgaggtacttttccctctgccaaatatatcagaattttaaaaacggaagcctgrtattgccatgctgcaaatgtttacaaggacatcgctgagtgttttaggtgtcaagtttaatttcagttggcctggcctattctcttaaggaaggctccagagcagtcagccaggtcacagggagaattccttctgctcttgctcttcaggctgtgacagaaatcagaccttgattccctgagcacgcttcccaagaagggattgctcctgtcaccacagcccaaaggagttagttgtgatgaaagttgtcatgcttcgctattccattattttaggtatgtttgggggttttgttggtgatggtgctggtttttgttgttgttgctgggggtgggcaggggtgatggaaggagaaactcattcacacattctaaaatattcatgagtcctcctctaaattgcagatagtatcttagattctgggatgatggcaaatacttaaaattaccaaagcacaaaagagacagcaaaaataaaatggtaagatctgagtgtgcattcacatgtgtgtgtgtatctgcacactccctctagagaccccacccacctgcctcccactggctcctgtacagcatgctggcttctgggggcctgggctgtagctctgagcatcagcagcctggagaacagtcactcttccatgtgctgtgcattttcctgggcatttttcacctcacaacagctctaatgaccttggcatcaagctcttactggggmttaataactggctgggcttaatggtccttactgtgtcccgggccattttcccagccagccattaattccaggcagtgccctggactctggtcattatggttccctgggctgagaggctgcccagtggcaaatggccacagcctcctctgcagacagaggtttccacagcctaccaccctttctctttgtggcatctttagcaaggcctggggtttacagccaaataattggttatggcatcacattatgtctactttgtatgtggcagcaggtaggtttctcagaggatagataaggcagggggttgggtttcattcactcatttattcatccatctattcagtattaattaaatgatttttcttatgagtcaggatggaagagagactactaatctaggagtgaactaagatagatgcctatgtttcctaagaaggaacrgagtgtctcaccaaatgaggctttacggaaaatgttccaaagaatcggggaggctgaacactatgaggaaaaagtcagagagaaggccttgctcagcggagagcccgctggagccacctcccctcttgtgtcttcggcagtacatcatctcccaggccgacgggcagagattcaagttcacctccctgtgttccacttagtgattcatcaacccagcatctgaatgcttaagggaagaacatgtaaatattgcatcaggaatcttgactcaccaaggcatgaatatttccacccatatcattaagacactaaaggttataatggtactgagagtgtgggagcatgcttctctcagaggactgtaccaaatcatgaggaacagggtcgcacaatttgtacaattttttgccattctgcctcctaagatatcatcagtccccctgaatacaagaaacagacttcattttgtcctttggaagtgggtcagcctttagtacatgctcttctcagctgctggaattgtaacattatgtttagaacagctattgtcattttattggcacgccttaccaaaagcacctaaggcatacttcagacttcgatcttttttgcattgtttgatgcatctgcacaactcaaagaacgagtgttagtgtctgacataatcaataccagagctcagatttctcaggtagcagaaatcaagagggtggcttytggggactgggtcaacctggcatgttctagtggtgcccactaatcacagagggtcagtatggcaaggtcaggaaacttggccttctyggaaagagtgttcagctggcctgctctgggcaaagagaaagagagagcgccaggtccttggaaggcccctaaggcgatgtgtttcacctgccaaccagtctctgttctgagaatcaaagcagaataattaattaaggggaaagagatgctactgggacctttcttcagaatgttttccctagtaataatgactacagtaaaattacagatccaaccggaaaattcaggataattctaggtgagcgtgatgagaaaaagcagcttcccatggccttagggtccactgggatgaacttacaaagtaaccttattaagcaaatgtgctgagttacacagaacctcaggggtgtattaagtcctcagtgaaggtctttagaatgaatgaacaaatcaatgttgtctggccacaagtatttagtgtcaaagtcagtcctgccatgctccaccatcaaccctctgtcaactctttgcagtcagctgtggtctctacttcctcaatccgaccacgatcacactcttgtcacttctgttcagctgagactattttggccgaagtcatcaaatccaaagcacatttcccaagtcttgttttacttgtcctatgacactgttgactacttgctcctttttaaaattgtctcttctgctggtttccattacataatcctttcctggttgttctctcacctctctggctcttctggataggcttaaatgttccctcatctttggtcccatggtcccttgtgcctaattgcattatagcacttacagcacagttctgtcatggtttgtctgggggcaccctcaaygtggactgtatgctcttttattgtgttattaaggttggcscaaaagtaattgtggttttggccattacttttaatggcaattagttttgcgctaacrtaatatctgtagcaccaggttcagtgcctggtacgtaataggaatttcaccattgaataaattatcatggaactcttccctcttcatcatttatgtatgggatgtgcaagtaaaataagggaaaggaragttaagcatttcctccattttttggccactgaaattgcctctcatcccaacagttcgcccagggattcaggactccttactccagatttcagtagttttctgaggggaataggggccactttctggacatctggaatgtggcacttcctaaagaaggtttggtctcaaccacatttcagcatcatgtacttaatgttctagttagatgaatctatttcaaatgatcctccaaggaatggaggtctttggtagaagattcttgtcactttactgcatccactgagcccagtgccctcagagtggtaacaacactactgattaaaaaatagcatcactgaatttctaagaggcaggaaagaggcaatgaggtaagaaaacatcccataacactgattctgcttattctactgcactgtgttggcatcatggtgaatccctttgtctctgcagtcaggtttcttgggttcaaatttcaacactgccaccgccttacagtgtgatcttgagcaaactgcttcatttttctacccttcaatattctcatttgtaaaatgggagtgataatatactatcttagagtattatytgaaggattaatggaattatatttataaaaaatcagaacagtgcctaacacagttgtggctgaaaagcactcagtaaatattaactgactggccagttttcctttgtgcccccagctttgctgtgctctccacagccccttactccgacttcagcagagcctccwctccttatactgtatcacactgtattgtcctcctttactgaccactgtccctcactaaagtgtaagctttcaaggctatttgccccatttttgcattctgactgcctagcacagtgcctgtcatgtaagagtaattagatgttgggggaattatgagaatttgcaatggtagaacctccatttcataagccctgcatcaattataaaccctaagtgttcactgctgatatcgtgagtacttattgtacaattactttatggacccctgcattctcttctaaatgggtgataggaaccctggacaagagcaaaaggctccgcactgaccaataatcctaatagcacctaacatttagtgaatgatcactatgacaatcctatgctaaaggttcaaccgtatgcagttgctatttttgcaggccaaatattggcagtttcaaagggctcaatcgaatacggtatctatcttaatttttttttattctaccatagtagaatgaggttttaacctcagttagagatgagaaaactgagacttgtggaggttagtgtcttaccaaggtcccacagctagtaggtkgtggaagcaaggctgggcccatcctgctacatcccagagctgatgctttgaggcaccacaaggcragggaagttggctgccctcgggtgctctcagtgtagttctgaagacacagccatgtctcaggaaactcccaaaataaacacaaaactgaatatatgcastactaagttggattcaatttcctgagacagtacaggaagccagcgtgtcctgttcaaagttaacagagaagaagcgcatagactctggaaaaaatctaacaatgcaacatcccttcagaacatcttgttattttcttgtacatttgctggccttggcctcgggccctaattacattatcttcaaacagcaactagaaatattgctcattaaacatgaacacgggaatgtttaatttgttaggacgtaggtgttttgaaagcaaatcattggttcagggcattgaactgagtgctgccattggagttgtctttggtgaacaccatgtcctggccagaactttgccatgatgcgtgttcactgcagatgagagaaggacctaggccctgcaattcctagctggggtctgtggctctgagcttgacgctttctttatgtttatgaaaatgggacaactcagtttctctccctcatccgttaaaatagaagaagcaatcctaatgtcacttcaaaattatggcctctaaggggttacaatcagcatgtcatttcccatatgatgcttagatgatgtgtatttggtacaaacatatttgtacagcatccaagaattttaatcaaggtttaactttcaataaggtgagttaagagcatcacaactagtgtcacagcaatttgcaggatagtctttgcttcaacttgggagtaactttggactcaaaaatacctagttttgaaagccggaagcacaactttattactggctargaataaagggcaactttggacaaatttgttaacatctctatgcttaagtatcttcatctgtaaaatgaccacgagagaaaccttgctgggttgatgtgtcgatttggttatttaatatcagtaaagcccttagttcagtgtttgacaggtcagtgctagctcccttttgctcttgtccattgttccctgtcacccatttagaagagaacgcaagggtccataaagtaatagcagaagggatatactctgacatgatggggaggagagaagagatgggtgcccttcttcaaaggcagggaagtagcctgctggtgctgagtgagggttaagccctttgcccctgacagtgtccttctccccctgccttccagcccctgaaaatgcactgcagggactgtgccctggtgaccagctcagggcatctgctgcacagtcggcaaggctcccagattgaccagacagagtgtgtcatccgcatgaatgacgccccyacacgcggctatgggcgtgacgtgggcaatcgcaccagcctgagggtcatcgcgcattccagcatccagaggatcctccgcwaccgccatgacctgctcaacgtgagccagggcaccgtgttcatcttctggggccccagcagctacatgcggcgggacggcaagggccaggtctacaacaacctgcatctcctgagccaggtgctgccccggctgaaggccttcatgattactcgccacaagatgctgcagtttgatgagctcttcaagcaggagactggcaaagacaggtacaaaggcacagggaagaagatgcaggggagggtgaggataagtcatcactggctgactcacccaaagcaaagcttttgctacaggcttttgttgtgggctccactgctcatgtcattgctagagttcacttgtagggtcctctgcgtgactgggctgctcaagctgactttacaagacaaagtgaaaagaagcatggagataattatatggatatttcagggccttatttttgaggaagaggctacacagctcctggccttcattggttaaaagtgcagtataacagctttattgcatttcattttacttgcataaaccctcaccaaaaaaaaagtatatgggtttattttttcccattcaaaggcaaacatttatttagtcaaccaatatttcttgagtgcccactacttgctcatcactgtgcttggccctggggaaacagtcaaacacaagtatataaagccttggacacttaccaagtagtagccagtgcactgagggtcttgagagggaagaaaatggtgctgtagatgtgccatgggccctagcccatggaaacccaaactgttagctacaactccatattaagacacgaaatcaatgtagtgaggcactgaaagattttttttctaaagtaatgggaagaatgggataaaatggaacagagtagaatagaaaagacattatcagcattcatcccacatagtaagttaggtaaggtattgtttcatgaaacttttatttcagtttgatagagatggagatagatggatagggatttcttctcaaagtgatgaaaatgttctgaaattagtggtgatggttgcacaatcctgtgaatgtaaaataaatatmactgaattacacactttagaaaatgaaattaaaactgtgtctgtgtgtctcaatcatgatgtaaaaatgtatttttcactataggttgaaagatttggaaattactggtctgggagataaggaaaatgctttctcaaaaagatgtacataagctgagacccagggcaataagtcttggataaagtaaaggacctggggagtgggagggagaaacctccctggaggtccagggaatcaggtgtgagagaacatgcagtgggttggagaaaagccccctgtggctgcagtcaggagaactagggggtgggggtgacacaaggtgaagaagagaggtgaaaagatgtcagctggacaaatctaggtgaagaaaggacaatgaagaatcaagggccactagagagtacagctctgggttggaactctggctctgtcactctctagttgtgagggcctggacaagttatctaaccttttagagactcagtgaccttacgtgtgaaaagggaatagtgactactaatcgctggatggactggtctaataatcaaattgcctcatttccttaattctaaaacctgtactttcatacgtttgtgatgtaatttacccctcttacaaaaactgttactgagtcaattgcttatctttaaactaaaggagagtcagacttagtggtgcatgcctataatcccagctacttgaaaggctgaggcaagaggatggcttgagcccaggagttcaaatccagtgtgagcaacatagcaagaccccatctcataaaaattgttttaaataaagtgatatgataaatgcaataaagaatataaagtaataaatccattctttggctagcagctcattattagagaatagtctcaaagaaagacttaagtacagtgcccccaaattctttgtgtggaagagctagatagcttttaaatcctagaaaccttgtgactagtcaaggactgcaccaggcaggaggcatgggtctggtggaggaaggagaaagagctggctgttggcactgtggccttcctcactggaaggcccagcagaccccatgggcagcccagccagcagatcacattggggattctgatcatcatctccagctgccacaaaatccagtcatgcattgacctttgcaactcacagataagagagactgtcactcagttgaatgagttatttaatcaagaaaacattttataaggaatcaagaaggaggggaattatttagtttcattttttacttgttggaaaatttgaaataagtagaaaccatctcaatagaaaacacttttctcttttttagtttaatggttgattgctaaataagtattcctaaaacactgccgcaatgttagctatttagtataattaaacattgttctggactccttgagaaatcattttaagctgataagttagatactaagtcatcataccctttggccactcaggatctttaggaacccttctcacagcaaggcatatcctgctcactaaattcactaaatactggccaatgagaagctttttctcaccaggtctttcttcctggtcgtcctggctggtacggagggagccaaagctttgtggagtggctggtgggactctttccacagacatccatctgccagggtccacgtagtccctactcaggggaatcacacttatgaatgtggaggatgccagagtacactgctgcttccagaaactttgtgcctcttgccttcgggaaacagtcttaaagaagccaatactctattgacttaatattctttacctgtagcctgctccaagctaaaagaaacaagtcagaaatggccattcaggacaaaactatttctgtaaattaaaacctaaaacatttagggtgtaatggtatttctcaatgtatgcttttcttcaaacccaacaaaacagtagcatatgatacataaagtacagaatatctaacttgcagatctcatgatcaggactttccttttgggtgaatattttgaagaaatagggtcatttaatagattgtgattgatagaagtttcaccctccttaaaagtggagaaaaaagtggctcaggaacaatctgcaattaagaagcatgacaaatgacttagatggccaagtggtattctttgatattaaaaagtaactgtacttgaaaataactttataattgaataagggtacattaggaaaatatgattcagaaccaatattatagtaattagataaaggaagcgtaaatgaaataactgcaggaagaatatttccatagagattataaatgagattctggtggagcagaaaggcccttaattgtaatttagtatgcactatagaattatcagctcagtgtgttacttcatcatataaaagaatatctgataattttccctaaaaagcacatgacagctcttcatattctttcattacagctgattaagtgtaaaaacagtagatattcctttgttagaaaaagagttcaacaaagagttttagaaagacagcacaaagtgttgcatttctatagcacgtgaccccagaaggctgttatttaggaagtctggggaattttaagtgttactttaaagaactcttcactttagtttctttcgtcctctaccttgcattcttttccccattttacccacaaagccttttcctgtgcagccacatcctcctgtattcaggctgtggtttacaatctctactacatcacataaaacagaaccagagttatgggagagtttctgcccttggagaaagccccctttggtgtgtccaatagctctaaaagcagagggaatataagtgtgattcccagattaggctcctgaagctgtaagtgagctgtcatcctcttcctgggttccacatcctcccagttattcactcacccagattaggtctagaacacatggccagtgcattgtcrcagcccataggtgaaaacagcttctaacttaagggaagccacttcctcttcttaccctttgccattcagtcagctcttctccattccagctccttcagyctcaaaggtcttatgaatatatagccttagtgagaaagaaggaaaatcattaatacctatgtaggctgaaggcttctgaatttcataattcctgccctgactactgatggcagtccctacacagcccccagtagcagaatgttggaagaattttcttcatggttgctaaaaagcaccaaaaagaatggtgaaattatttaccttgattgctcaacctagaaactaaaagaggaggaagagatgtcaacgtaycaacataccaaacttggtgcttttcatacatgcttgcttatttagctctcaagtagcccaggggacagagattcctatgcctcctttatagataagaaatgaagggccaaagatcaacaataacttgcctcaggtcatccagctggttatgatagaaacaggtaagattcagcccacttattcccatctttaggagcttttaaatatgctttctgggatgttactaggtcaaaatacaatggaataggggaatgaatgagcaaagggcttaagaaatagaaagttgaagccatgatccccaggaataactaagccacccatgctgtcaggtattggacaaaatgaaggactccttaaaaatgtcctctctctatttttttttcttttttggtccttatatgaaatgaaaataatgatgcaaactgatagacagaaggttttccttcttctcaaggatgggtgccacacagtgcaagtagaaaagccttcctgcacctctgttattcacatcacaaatgatgctatggctgggcaaagtcagacagtctgaccttggggataaggtgtttgaaactggctaatgaggcatgccgtaagtactgaaggaaaagtaaaagcagcaacccccgaagaattgaaattaatatccacagtagtgtagcatggtaggctgagtcattctcacaggatcaaattagaccttggtgttatgtctccacagttatcctaaggtgtagcatrtggtagaagctcattacagatgtctgaatgggaaaattaatgaatggtggggtgcaccagttcattccttaaattttgtsaatttttggtctcctagtaaaaattttctgatatgtaaaatgaagcaaatgttcagttaaatataagcattcctgtggctcttttcctctggtcattagcccatacccaaatgagtgtacccttcttacggaaagatattcaatcaagatgttggtgttagtctacttgaaggcaagctttcaccctaagttcagtcaatcaaccaattgactaatagatagataaatacatgtgaatgtttatttatatttaataagctactcattatctagcctgtttggggaacaaggagaatttctagttactcaagtgttctcgttaagaaagagttgttaaacgggggctgtcataagaaattgagttgtggtaacatacacttaaacatttaaacactgatcatcatctttgatgatgcagaagtcccttgagcatctttcattgtcacaaattcagcatgagcattaacatcaattatgattgtactgtggaatatggtaatgttagtaagagatgtcaatttgataaagttccagatatttaccaaatggaggagagagggagagactcttgtttatagttagccttactctaggaaagaattaaagatggtagtgggtataatggttactttaccagcttgcagacttaattattgttccttccaggaagatatccaacacttggctcagcactggctggtttacaatgacaattgcactggagctctgtgacaggatcaatgtttatggcatggtgcccccagacttctgcaggtaggatttattctgcaagtgtaaatcatcagccgtgttgtgcaggatttataaatatctgattctgaatatcaaccatgaaacatgtctaactgtcttcttgaagcaattaattagcatgtcccaagttctcattctagaaacaacaaacagcatttaattatgttatataaaatattgaaagtttttgtttgtactgctggagaataaatccatcttgtgggctccatttatcctctgaatatttatcagccagaagtaatgcaataattggcataatattaacgatgaacaagcattaagaaatattagttttactctcatttcaaaggaatgtgataattttttaatgaattaaagagagcaattcctttgacagtgagggcttttttctaaaattaaaatatttctctgagcctccttcccttgccacatcagtggcctgggcttgcacttctaaggccaaaagcacaggcataaatattttgaggtgtcactttaaagagaacatgcatacatctctgttgccaccttaactttcctcctggcatgtgcccaggcagagttcagggcataccacaaatgcactcagcaatattcagggcctgatttttggaagcctgcttgaaaactcgcctgtaatttaaaatagtgagaccagaaattccagaaagtaccctagtttttgggaacgcctgatggcctgcacatggactcaatcctgattttcaaatggcaaaagctggggtggggggcatttaaaacttgctttttaaattgtgtgcttacttatactatctggtgttttatttgtttattttttctaacaatgtctcgaaggccatgagtctttaggcaaaagctgcaatttggaggtttaaagcaaagatgagaaacagcatctaatcatcccattaacattttaccacttttctctctttttaacccaaagatccaacacagcaacaatactaattgatatggaagagtcaggccgcaaaggaggagagagaggtacagatagagcagacctttgatgtaaggtcagggtcaaaaatgctggggctaggctgcacaggtgtaaagcctggcctggtcacttacccacctagtatgaccttgaasaagtcacttagtgtctctaggtctcagcttcctcatccatagacgtggatgtgatagtaatagactctgcctcaaagggctgtaggcagagtaaataagctaatacatgtgaaatgcttggaacagtgcctagtaagtacatggcaagcacaaggcaagttagcttggatcctcacccagtgctgcctcacttaattcactggccctgtgtccctgtttaacaatctatacacaaaaagtaagtagaatggcctaaaaaggcaaactgcctcctcaaaccaacaggctaacagagacagtgagaatggcacttatgggcatgcaaagagccatcaacgttgatgggtatacagcagatataattatgcaatattgccattaggatgccagaaagaaaaagcatgaataaattgaaatgttaatgacttcaagtgttcaaggaaatattccatttattatggaaaacaaatgaaaggcaagttaacctgtcatttctcctactcagagttagttcatcatgacttcatgtacggtaggatcgaaacaatttatggaaaatactaacaaagaaattaagataatgtcaatgcattacatattgccactggctctgagtttctcttcctaagctatcatccccaaagctttgatagttgtttgcacaagacagtttcagcaagaactcttcaaaaggacccctacgcccaagttytgtcagagaagtgaagagtgtcatctggaggaaaggttcagtgctggagagagcattctgctcagtcataaagcctgttaaaggaaggttaagaaggaagaccaggagtagcacagatggattctacagttctattcatctgcatttccaggacatgttgactggaccaccaggcatccagtttcgacttgttgggtcttgaggcttgttttccttgtttgtaaaatggggataagaaaataagaagacgaacaagcaggtcatggtgagaattaaatgagataatagatgtagagtgttggatgcagttcctagcacacagtattcaggaaagagtrtcaatatcattaatattaataagatatgtaaaataatttatattattaatattatcccaagcacttgagagtttccctgaaagataccaagaattctgagcagggggctggttcacaactataatcccagcactttgggaggctgaggcaagcaaattgcttgagctcaggagttcaagaccagcctggccaacatgacgaaaccctgtctctacaaaaaatacaaaaattagccaggcatgatagtgtgcacctgtaatcccagctactcgggtggctgagcatgagaatcgcttgaacctgggaggcggaggatgcagtgagccgagatcattccactgccctccagccggggcgacaaagtgaggctctgtctcaaaaaaaaaaaaaaaaaaaaaamaattttaaggggggcttcaaagacacagcttcttgcctcctggaggcttataataagccttacccatgccaaaatataaagaacacagcaaagccacttaccatgtgactataaaaagatgcagcttttgcaatcttcatctaagagttaaatgagtctgtaaacagtaccttcctcaccaccagagaatgaaaaagcaactggtaggctagtctgctactcatttgaccattccctcttttatctttattttgaaagaagcagagaactatttggggctgaaaacatggtacatgtatcatgagctctatggcttaaggaggtaagctatcgccagggccaaaaatggttgtggatggttttgtgtggtggcagagctcacattggctgggcccattggaatatagcctccctgagggcagagttctgtgtgtttacttcagtgttgtagacctagaacacaggacagtagatatttactctcctggcatatggcagatacttcataaatatcaagggaatgaatggctgtgtcctctactctccgtagtgctatagtaaagggtgttgtatatggataaaaatagccatttctgcctctcagaaactctgactttgagaaagttacctgacctcactgagccttagtgactgatattgggcaagctacctaatgctccatctcagaagccttacccacaaaatggtgatgacaattatcatataaactctcttgcattgagagtttatacgataattgcatgaagtcatagatgaggaatgcttagcaaagtctcagggcctgttcagtacacagaaagttatggggtgaaaggattcactgatctgcagttgtggatgctcattggcgcattttacagaactggcattatgtggcctccagctccttgcaggacatctcatgggctgctcaaagtgtgcctggcctttctacagcttccctaagttcccagtgtctcactgcaatgaagagctagccacgtggagccagatttcagcaggcaaaaagagagccaactcttcagtttgggcaaattaaccatttcagaccataagacaaaattagtaccctcaaaaaagtcactaactaaataaaccacaagccttttattcattcagctaactcgtgttgggtaccagggaggtaatcagagatgaatgagacagggtctctgccttcagttgcctgagactcagttgaccacaattaaatcatgaggtacagaaggttactcgaggtgcctgtgggagaagatgttcactctctgcctgtcagcagcatctgacccactgagctttattggaccatctgtctccaactttcaaactggactcagagaagtccttgcattccactgattctatcaggtggcatagggataaggagccaggacaacaggaatattggacccttccacccgacttggtcaggggcagacccagttggctctgtttgcatctggactattgtataagatttcttttcaacaaaagagcatttgacaaataagaactttaacaacctctggtctaagacacaaccatgatgctttccaatctaaatcaaactctttcacacttttcaggagagtagaatcatcaccttattattgtcccaaagagaatgtaagctgtcataggcatggtgtgagggagcagaggcagtggggcagagagagaagggctaaattatatcttgggggagcaaactgccaagcaatccgtgagtgcctgatccccaaggggaagtgtaggtaacctggagagtcatttcccatcaggtgtcctggaggtctgccttctcatctcacccaaagggcctgagttacttctaggagtcagtcattggcaagaaaactaattgtaccccctaaaagtattaagcccatggacttcttaggaagaaagatagcattgcattcacatttaaaaccccaagtggaagtggtgggcatataaatggccatggtggcagatgacagacatatctcattcaagatctggcagaatctaactgactcaaagtcatttgaatggcatgcagcatctttcatttggtactgtgatggcctcctggactgctctctccatcacttgtcttcttcctctccaaacatgactgccttactagatgacaaatctgactgtgaagagtcacttaaaactcctcagtgacttcccaaagctttgtgagcagagttcatactccctagcttagcacacaagaccttcaggatagggcttctgcataccactttagtcacatcttctctactgatgcatttatgtgtttatttgtttattcaaccttactgaaaaattcataaaggaactcaccctgcagacacctgttcctatgacctcagtttggactgcccatcccctacttccttaagctggctggttttccactggctctttactaataacattaatggctgatatttgttgtgcacatacttcatgctggctctgtgcttaacatgaacacatgcattattttcttgaaccttataataatcttatgaggtaagcatcattaatatcaccattttacatagaaggcttaaagacatgaaacagctgcccatggtcatagggcaaataaatagcagagctggaatttgaatgcagtctgcagggctcaagagccaatgctcttaatccttcagttcattgtttcagatacagtggcccttctttctcagctctccttagccccctgtctgagtcagacctactgggcccactgggcatccctcttcctctgccttgccccatctcactgattggtttgtccatctcctttgtttgactctaggctccttaagaggagggccctgtctcaatycacatttgtatcattagcacttgtcattgtgtctggcatagagtgtatcttcagtacagattagttcaatgagaaacaaaaataagccctgtccatgggggtgtttaagagattgattctaaacgttattattgcaagaccaaaagtgccaggcacattaaaactataactagcaaattcagattttgagaagtcaatgagggccacattgttttattttcagccagagccagctctgggtactcaaagaggggctcaggcatcagcccccatcctgcctgtatcaccagacttcaggcacatcaaagttgagaaagctggagaaaattaatgccatgttgcaccagaaacagcatcaaaatatattattcagtggacagtggactcttaaatcatgccatatccatactgtaagccaaattcattctctctagatggcctataaattgcgtgaaaagatctgttgtcgttgctttccaaactaagttatgctaagtatttaatctcattttccattrtaaattatttgtgataataatgggccaagcatttaaattctacctaataatcttatttctggtcatacttagcacattaccaagtttacaactctctgttacccaccatttcttgagtattaattagcggggtaatgattcagagtgatcactgtcatggaactaaattaatatctcatccgcaatatgaaggacatctcaaaggtatcatgaatatcagagagttgatgctgccagaattattagctagcgaacattaataaagctgccagcctaacagggaaagttcttacttggcgacagtccaccgggtagaatcggaagcttactcacagaagacgggtgtggaatggcaatgccgcccatgtggtttatgttttatgaagtagacttaaaatatatggttgtgtttctcccagggtgagggtggggcttgagtgattcactgtggctctttgtcccatgaactgtgggcagctgcaggctcttggtgctccatgcgcctagacacacaatgctattccatgggcttccaaggtatacagctcttttcctcccataagaagatccaaggaccagaaatcaaggcagcagaataagggtggctcagggcacctccaggactgtgacagatgcttgggaaggactgctgcaggaatgttttcttctcaatgcctcatagtgtcaccaagcccccagagcaagccaattgcagaacaacctagcagcttcacagctattaattcaactctattctctctattcttcaaacatttcctgagtacctactatatgccaggtactgcaccaagaatagaaatgtgtttaaagagagtgtctaagagttctagagagaggcaaagacaccattctttcctcaggatatttgcagccttctgcatagtccagccccaaacccagtgggcagrgttaacctagatcacactataggagagaaaaagtaatttcttttcctcatccatcataggttctttgctgagactcctaggaaaaaaagacagattaacaagagaaaagcatacacatttatttaatataaattttacgtgacaccagagccttcagaaatgaagagccaaagaaacagggagacctccttatttttatgctaagcttgatgaggaagtggatagctgtgaagaagtaggattggacaaagcaggtgtgatctgatggtaataaaccagggtgggtgggaggaggtagcaaggtatgtttgttcagattcttttgacatttccttgtctttgaagataaggatgttcatttcctccggatatatggagggtacctctggaatgaaagtttatgacctgctttagacgagggcaaagaaatcttttatgaactgcatcagaggagaacagtgaagggaggtgaaagtgatctccctgcttctgttgtttcctcaaatgccaaggtaccatattttggagcaacatgtcctaaacctcgtcagtacccagaaatggaagtgtcttcccttgcttgttagggttatgaggtttttttcagttgtaaaacttagctttagaagagtcaaaaagtggaacattacaaacccctgttgccattagcaccgatgggcagaattgcacatgagcacaaagcctctgtttaacaccctgagcagctcgcaagcaccacacatggggctcctctgtagcaagagctcggaggaaagcggcaaggacaagctgctttcaaccacacactgttgatcccagggaaacctgggtgccattagtacagaaaccccacctgggggaaaggagtttttccaagacacagaacctcactcttaagagtacagagtcaactggagtcaactggctttggtccaaaccttggctgcgaaacttcagtttttctgtgcatgagtttcctcgtctgcagagtaggggtgctaatagtagctctctgctatagtttggatatgttttgtttgttcccaccaaatctcatgttgaaatttgatcctcagtgttggacgtggggcctagtggcaggtgtttgggtcatgggggcagatccctcatgaatagattagtgccctccctggggcggggcatgagtgagttctcactctatttgcccccaacagagctagttgttaaaaagagcctggcacctccccctttctcttcttcctctctcgccttgtgatttatgcacatgccagctccccttcactttctgctaggagtggaagcagcctggggctctccccagatgcccaaccttgaattttttgagacatcagaatcatgggccaaataagscttttttctttataaattacccagacttgggtattcttttctagcaacacaaaatggactgacactgtcttataggggtgttgtgaggactaaataagtgagtgtatgtggagtgctgagcactgtgttctgagctgaaatagtcaagtccagcagcttggatggacaataagtcaggttgtgtgctgaaagccaggcagtggactgtctccctgggtatcagatgctccctatcaaatgggagctgcaatacttgcctcagagggctgatgaggatgtaaaggagatcacatcagttaagcgcagaagctgagcaggtacttacaaaatcagttgtctcaaacttagctgcatattagaatctcaaggagctttccaccatttgaatcttctaaaaagctttgttgttatgatatgtattatttaaaaatatgtttatttttgtttyaaataattttagagttacagaaaggttgcaaaaataatactgagagttcatataacttttatccagcttcccctaatgcggatttgcattcctatggtccaattatcaaaagtaagaaattaacatgagtataatgctcagctaaactacaggcattattgagattttaccagtttctctactaatgtccttyatgtcctccaagaacgaatccaggttccctttgcatttatttatcaggtgtcctcagtctctaaatccatggccgttcctcaggctttccctgcatttcatgacacttttgatgaggactagtcacgtatttcatagaatgtccttcacttggggtttatctaatgttttcctgtgcttagattgaggttatgcattactgagaaggataccacagaagccataggcccttcccagaatctcataacaggawgtatgtgatgtccatacgtcttattactggcaatgttaaccttcatcacttggttaaggtaatgtctgctgggtttacctattgtaaagatagtatttttccctttgtcattaataaataacttgggagagatactttcaggttatgcaggtagcctatttctcctcatctttttccccattaatgttctgttcatttggtgcatcttgcctgcgacaattactgcaacgttctgaggatggtttcctagtccctcattttttctacattgtttattggaatttttctgtcttgaaatgctgtttcttctcctccatttatttgtttatttattcagttatttattgaaattatcatggactcatggatatttattttattttattggttttataatccaatactgacattgtttattttggttcaaacctaagacactttctaaaatacctgtgcctgagttcctctccaagtcatccgaagcagagtctatggggttggagcataggtatttccttaaagctccccaaccgcactaaatgttagttccctcactctccccacctgcttcctctaaaaagaaaaaaaaattcttcctcaaatcattctgcagggcttgttctcaaactggctgtcagagtgtgcatggcaggctgcagccacttggggaactggttctgtggttatctccattcctgcctccccagcccgcatatcctttccttcakctcacggggcccacaatgggaacttgagtaccagaattccttttacaactgcttcctcatgtggaaattccgctgaggtttattgtagttttcactgaggtcaggtgaaggaagaaaaaaactagggcagtctttagaaagtcaggtttgagaaaagacccaaggaagtatgaccttcagctaggagtgtctttctaaatggcatagtgaatttagtgaattccagctgatggcaggctcacagctggggtagatgttcctgcagtttccagcgctgccttctgagtcccagaaagcacttttctgctgcttggacagagttttaacatgtggaaacaactcgcttacatgaataacttatcttgacacctctgaaatcacagtaaccaaatatgtaaatttaattctctttttaggggatcaatatggagtcagataagttttttttccaaagagatggtcttcctgaataaggaaattgatcctgtagcatctttagctggtttccaattgccccctactcctaggtgccgaatcaatctyatgatatttttagaaacctaactgtttctttagtcagattgatgccaataaaatgtccaaaacttagatgaatcaaatttaaagtgatttgtgatggaataaaagcttaaccccaagcataccatggcaacatgaaattggcatggttcccccaaattatgccatatgaatatgggaagatatgtctcacaaattcttatttttttcttcatagtggtcagcttcaacctgaatttttgttagaaggcattttttgtgttaaaaacaccttctattaaaattttaatgggattccaatttctagggtaagtaaattaataaaatctgcaataactagtcaggaaaggatccagtgtttcactacagaacatagagataattccaagacgggcatattagagatgcaaagtgttaattcagcatagcatccaaaccaggataaggaatgtttagatgctgcatgacaaaaataaatctctcttcctggaagaactttaacctaagaggagaaacagctcaaaggtttattgttgtcagagccaaaaacatgacacccctcttgataaaagacttcgatccctgaccccagtagagttgctactctaaaagctatttgtgtattgatctcctctgaagaaaacgaataggtgtctggcaggatgagcatctttgggaaaccaagttattatacttagaggagagcccaggtgaccaaagtgggaaccctagggcatcaggctctgaaagatgatttgcaagatgctgggaagcctgggccttttctcttcttagtctctgcaacaaggccagttgctgagcatagctcaaattaggaaagtttgtctgccaagaaaccttgactaatcttaccattcattcttcaaaagacagaagaggtgggctagactggcctgttttagaaaccagtctgagaccaagactctttagtgcgtaaatatttattaaccctcaaacaagggcacctaccacccccacatgttaatcctrtgcacaccatcttgaagaaatgagccagtacttcctgtttgaggctgagacagagatatagaggcagaaaaacactcggagactctcaggccaccaaacaaggactgaggatgtagagtttctggactaaaagactgtagactttgagtacataggccctctgaagcatcaaaagaaaaatcgtggcctcttgtttgctgtcttcctttttctcccataggatcaaactaagatcatcaactttccaaactcagagaagaaatttgcgtttagctgctaattccatataaatttagaagtttgctatttagctgctaattccatataaatttctttcaacaacataatttttaaaattatttattaagcacctaccagggactgttccaggaataagacaaaacactgccctcatgaacacccaataaacaagtaaacagcaacaacaattccagacagcaattgatgctataaagaaaatgaattcaagtgagatgaagtgaggggagcaagtgtcaggtaaggcctctcagagaaggatattacttgagctgacacccaaaggtgaggagtgaactcagagagggtattccaggcaagtgaccaccatcaagtgcaaaggccctgaagtagggatgagctttgtagagttgaccagaaaggccagtatggtgggaacatactgggaatccacaaggctgggtggattaggagaagacttagaaggggagccacatcataatgcatcccagcagccatgctctctgtataactggaagcctctggaagcttagtggagtggggaatgggaatgacatattttgttttggtaatatctctgcagctgcttatggtaaatagactgtaagaagagtgaaaacaatactattgttgtgacttattaatatgtagggtctaaatctgaggagactgaaygttctgcagctcattttcaatctctttgatgaaaatgatgggcactgattttatttcacaacctcaaaacctctccacttccttattgtgtaatcagaaaaaccatttgttcaaactcatttaactagaaaatacaatttttatcagcttattaaagataacatcttacctcaatcagtcaaaggaaaaaaaatttttttgctttaatcagttatctcaatttcctcctacagggatcccaatcacccttcagtaccttatcattattatgaaccttttggacctgatgaatgtacaatgtacctctcccatgagcgaggacgcaagggcagtcatcaccgctttatcacagagaaacgagtctttaagaactgggcacggacattcaatattcacttttttcaaccagactggaaaccagaatcacttgctataaatcatcctgagaataaacctgtgttctaaggaatgagcatgccagactgtaatcccaggtattcactgcatcagacaccgagacactgaacttcctgagccaccagacaggaaagggtagcagaaaacagcttcactcctcaggaagtaccatggacagacgcctaccaggggtgacaaagcagtgcagttggattgtaaggaaaaattccggaattaatgcatcctaatgaatgttgtccccttcaatggtgttaccttaggagctgaacattcaattcagttacaccactatgactaaaaacagtttggatctcttagtattgcctttgaaactgcaacataagcaactcaacaatattagttgcattcctttatagacataccatgtcaaagacgtttttctatcaagttgtattctttcctgttctataacctttgtcatctgttagactctgtatgtgtgatttgtaaaaagcaggctgaaactatggacatgatttctgaagagcacatctccactgactttcataaagcaaatgtccaatatttatttattgagagttttttagtgcaatctgggccagtatttttatagattatgattatgtggtaatttatccttcctaactctttaatcctgaatgatggttggaaatggcctagaattaggttactctgttcacaatgctcattgttagcatgcaattggtatttgacttggaagtgttgtgttgtattttttgaacccctaggcttcaggaaaactgctcttttgtaaaaagaatagcgatgacattttctaatgtgcagaaatgttccaaaaggacaaaattgaaaaccaaaaactatgttattaaaacaaaaaaatgctaacaagagaaatttaaaggtagttttctttagtaataatttatgtaagtgtcctctcttgagccctagtttcctttttggcagaatgatgtcactgtaccagacaacctcttaggtttcatcccaaatctaaacttgtggcctcttcttgacccatttgaagactctgcacttggagtgatggggccccaacagtagcaggaactttattttggggagccttatctacattcatattacttatatcactcttgtggttaaaactacacttcttcctgtgtccacatgggctaaaatctaccccctgcttctctcgaagcatcaccatccgcctcttccccagcctctcaacacaaaaacacaggatacacacacacacacacamaaaagacatagctccaaggggttccctggctacaatagcaaacagctgcccttctgtgaggaaaagagactacaaggacatgccctatcattcaactcatttatgctatgaactgtttagactcactacaaatcttcttagattatattcattaccattccctggtctgaaggagtataaaggacttattttattcagagccaagataaattcatattatagatttttatttaaacaagtaatattgttcaaaaatagtctcttataaatatactagtgttttctttacacatgacttagaaggcattagtttctctaatgccaaatttgaaggcaccagcaaatattatgtatgaagactgacattgttttacagacatgacctggcttatgataaaagaagttttatcgcattaccacttcttttcccttttcttaattagtacactaactagtactattaattacacggagtattgttgttaaaatgcaaacacaatcagggtactcacataacataaacaaagttgatattgatgtgtatggcttgggctgttcaaagccagtaagattgaaatggccgtccaaaacatactggaatatgttctttaagttttctcatagtttttaaagggactatgaattttattccaacacattgtcttccacagcatggactctgaacacatcatactttatcaacatatgaaaaagtgtattaattttatacaatttacttataggccacctttataatcacttgaagacgttatgttgctcaaacataagtggctcctttggcaatttctatatttgtggaaatttggaaaggcatagtttcaacrtgcaagaatgtaattatattgcttcatctaataatatctcacatatctgtctatcttcagattttagattttctttattaaaaaaaccatcatggtagctccatctcgtttgtaacttctccctctcaaatactcagaagaatgaagaggccaaattcagaaaatcatggcttcactgggaaatgttttaaatctacatgtagctaggatatgtgatttcatattttttaaaaatgtggtgtaaataagtgtaaaamattaccacttgcaaagtggttttattacagcgttaaagaaaatgactagaattctgatagattgtgctgatgaacctggttgtgggcaattgaattcttgtcttcccactaccatttcatgactgtcgtctgaacactattcaacaccattaaatataaactctgatataaaagatgactacagaaccatgtttatagacctcggtgatttcagtatctgattgtgtttgatgcctaagtcatactcgttatgttacatgcctttttcctctctcccagctgtgtcatcagctccctcctagcttttaagaccacagtaatacaatgccacagctggtcgatccatggcttctgttatttcaacacaagaacatttggcagaggccattacaatagatagccattatgggcaaagatacgggaatttgcaaacaaaatcaatcacttcaaatggcccataaaaggaggaatctcagatttaatattctacrgtaaatattcacccaagaaagcatacattaaaagaacattaggaggtaaatattcagcatgctgcntggagacttagctgtgtgatttccattaccgttaatgggcatttggcaactaagtccctgtgctttgctaaccctggtgtgtactcctaagggctacacataaaacctgagcaattcagagacttctgaggtcatcagatttcagagtaagatcttttctttaaaaaaaaaaatagatgaaagcaaaacacaacgtattgtacctaaaagagaaatttgtgtggtctctcacaatccttaggttactaccagatttgtgtatcctttgttttctgaagttctctccattactgatctatttgaatgacatgagaatggagggaaataatctcattttgaaataaaaactcccctcaaaaattaaaattaccgacttagaagatgataaatgctaagtaaaagtagaaggagaaagttgaaattctattaggattaagacagtgttatttaaaggcacatgcacccatttagtacctgcctaaatatttgcccttgtgtaagagcaaactcatttcagaaatatatcctgaattccaccagggtgatggttcaaattgttaaataaacctactctgaaagaagggtccatgttcctattctctctctgcagtgttgggaggtgatgttaacactctacatgttttgtatctgacccaatcatttcttccattctcattgcttctctcttaaacctcattgtatctctttactgtcattttctcccaattgtcttcttttgtctacagtgtgctcctaaaccagcagtctttggtgctgttaaggtcttccttgtaggtttttaaactaaagatctatctgggaaacagatttggggtaggtcctgccagagtaatgaccatggtaggtgggaggaatatatctggctaccatacaaggtacttcagaagtaccattatggtttgcccagggccaagtggggagtgaagaagaggggtccccaagacacagacttcagtgctaaaaccagggaagtcctgggctccatgacagtggctcaccctatcagaaggccacgtcaaagagaactataataataagccctggggggcaggatgtgtgaaccaattgcctaggtgttagcacatgccagaaggtactttggaatggaaagaggtgagagtgtctcaaggtttaaaaatgagcaagtgtagcccctcttttgtagctcactcatcccaccttctcagggtgttgaaatgcaaatgcaaaaaggctgaaaccctgtttctttctactcagtgccctaatattatatactaccttgaattgtgcttcgtctttttatgcatgtgtcctgttagtctaattagattgtaagctccttgagggcagagactctttctcctttgtctctgcagcctatacctagtatagtgccttgcacacaataggtgctcaataaatgtctgttgttgatcatgacctcttaatgttgacccactggattagtaattgggtataaacacatccttctattttaaaagtacaagaaatgcaatatgttatgatacagtaaaattttaagtgagtttttatagggttagttcttaaacctataatgtttttaatcaacagagctgacctagatttcagtaggataatgttgctgaattcattacatttgctaatcctggctgtactaagcacacaggtgaagtaaagttcagcaagctttgtgttttcgctgttagtgaactgctcttagcacaaattaaatttaatattgacaaatgctatgccatctgcagaaaggcggaagaacagcttgggctctgacttctgtggttcaacgacaaaaggaaggctaaaatgagacaggttataacctgctttaaacttgacagctttctaaagctgctgggaatccaactggtggttattgaaggtctataaaaattaagtatacatttatcttgaaaatgaaatgaaacaaacaaaaaaacattttgtttccatgaagcagatccaaaatggtttcacctctaccagaatgtgaagggaaaggagagcccttgggaaaagctgtcctcaggcagagcatcgcaggctcctgaatcaccacctggccagaacccggtgttcagttacatcccagctacaggagagggcaacaggcaggcagtaaaggtgagtcagctgccacctttacttctacaaaggaccatatcattcccttcttgagcatgtggacactctagaattcctctttcatcatctactcttccacatacttatttaaatgtgtgatctcaatttcattttttaaagcacaggaaaagggctagaagatactaaactgagaagactgcttatttctaaatggagaggatcacagattttctagcattttcaaaatttatattataatcacaaaatgttatttcataaaattttaagaatgtctttgctcacagcataagttatctcaagagttagtgtctttagtcctgtaccatgtgactagctctttaatttcaaaaccaaatataggaaatccataagattgagtcaaaatttttataattatactctacctactgaatatcttctgtgttttgcacgtcttttgtgacatacatgttatttcaccaaaatcctattatcccattttgcagacaagcaaactgaaactaacagaagttgtgtgtctggccccctgggtgatgaagatgagaacagacacacagcatgtcttgtaccgagcattcttctatgtgcttcaggtatataaatgcatttagtcctcccaataaccccatgacataggttcttttatcattcccctttacagatgcaaaaattgaggtacaaggcacttcagtaacttacccaaggtcatgcctccattaagtgggaaaggcaggttagaagccaaagggtctgtctctggagtgtctgttctttgtcaccatgtacttcttggcagaaatttaatcctataggcaacaatttctattaggatattcattatataatattcgayacacaccaaataatgtgatgagtatgtatattatgaaggaaacataaaaagaacattatcactacttttgaagctacctgagtatttcttctattgccttgaatttttttatttaccattttcttgctttctgaatggttttattacatacagatgtatatataaatactatatcatttagttttgtatatttacaaacattataagcctgttaaaatgttgtatatagtcttctgaaacttgctttttcccaagatttatccatatcctttgcatatacaactccagtttatttgcactactgtataatgccatcatgtgaatataccataatttacttttatccattcttttagtaaatatttgggatttttgcttgttactaatatgtacaatgcttgtatgaacattcttagaaaattctagtacgtttgcaagaattttgtagagtgcatacctaggaatcaaattgctgagctgtagagtcaaacagttcacatgtgcacgatattgccaaatcgttttccaaagtggttggacattttatagttctaacagtagttgtccacatccttgccaacatttggtatttccagactgtaaatttttgaccaactggtggatgtaaattatatctcattatgrtctttacgggtatttcccttattttttatgtagtttagcattttttcctattgttaattctctatgagtgttacttcatctgtgaaaatggctattcatctttgttcactcttctcctgggttactttactttttgatttaaagaattcttagtatattcttgatactacttttgttgattctatgtgttataaacatctccttccaatttgtggcttgtcttttctttttctctgtggtgcgtttcaaggaacaaaagttttacattgtactgtttatgtcaatttcatgttttctatcttacatcattacagcttcttattccttatttaataactcttccactgttcttaatcattaactattttcctatatcttattctagaaatttcaaaggttttgtctttcacatggcagttagggatttatttgcttgtatgatgtgaggtagaactcacttttgtttttatatagataccaactgtcccagccagcacaatttactgaagaatttgtttttccctagtgatttgcaatcaaattttcatatatgtgggaatttatttctgctctctgtaatctgttcaattctgatcaaattgactatctctttacaataaaaatcatggtcttaattactataactttataataaatcttgatatcttgtggtaaaatttcttcctcaccttattctgccttcggggaatgtcttgcttattctggtttttttttttttttttttttagttataaatttttaccgaggtaaaattttcattcagtaagtacacaaatcttatgtttatagattaatgaaattctgtatgtctatgcacctgagtaaccactacgaaggtcaaaatgtggtatgcttccattatcctggaggctcactcatgtctcttccagtcaacctttccatccagagtaaccatcattctgacttgtatccatgtagatttgctctgcctgttttaaaatttcatacaaatggaatcatgtgtctcatatatatatatatatattttttttttttttttttttttttgagacagagtttcgctcttgttgcccaagctggagtacaatggcacgatctcacctcactgcaacctctgcctcccaggttcaagcgattctcctgcctcagccttccaagtagctgggattacaggtgtgcaccaccacacctggcaaactttttgtatttttagtagaaacggggtttaaccatgtaagcctggctggtcttgaactcctgacttcaggtgatccacccaccttggcctcccaaagtgctgggattacaggcatgagccaccacacccggcccatgtggtatatttttatatccaacttctcagtcaaaattatgtttgtaaggtttattcctgtcaatagttattctttcattgctgtgtagtatggcattgcactagaattactaattctaatattgatggtcttttgggttgctttcattttagggctactatgaatatagttgttatgaacattcctaaacatgaattttggtggactgtcttggtccatttggactgctataacaaagtgccatagactgagtggcttccaaacagcagaaatttatttctcacagttctgaaggtgagaaagtctgagattgggtgtcagcatcttcagattctgctaagagcacttttccacattgcagagtcatcttcgcattttatactcagctggcaaaaacatggcaagagagctctttgaggtctgctcagggattcttcaggcccagtccccattttaatttactccaacacactgattttcaaatgttaatacaaacttgcattagtagggaaaaaaaccacttagtcatgatgtagtatcatcctttctacttattatattttagcactgttttttaaaggatttttaaaaacgttttcacaagatagcatggtctgtaattttt

SEQ ID NO: 94144 - DNA, 403035 bp, Homo sapiens
  misc_feature (1)...(403035): n = A,T,C or G
cctcacttcacctcatcgtgcaggtgaatacaaaagggtgaatacaaaacaatattttgagagagaccacattcacataacttttattacactatacttttataactgttctaatttattgttagttactgttaatctcttactgtgcctaacttataagttaaactttatcataaatatgtgtgataggaaaaaacatggtatatatacatagggtttggtactatctgcggttacaggtgcccactgggggtcttggaacacatcctgtgcagatagggtggaaccaccgtaatcatttaatcaaataactcattccacatgaataaactatttgcttagctgtaacaagcaagaaattgggtgaacgtctaaaaagttaattctgctcatcatgagtttgaaactgacctgcaactcctacttgatgtgaagcatatcctggtaatctgctgggcccttctctcagccacagagtcaacgttgatgaatccgattctgcgtggtgaaagcggaagcccagggaagcagcaggggcaataaatcggctttggaggatgggaatgtgcagccatacagctgttctaccttctgatcgccattgctgtactgcagctaaatgcagaagaaaaaagtctaaataatttccaaagagacgagtggaataaattaaaactcacctcagggtttcgcctcctccaggaaaccatctttaagcaaaagaggtccccaaatgtcttgttcacatcgctggcactggaagtaccatgttttatagtaaccaccttgtttatatgatttttccatcagactgaattccttcagaataaagtcattacactgctgacctttatatccataccaccaaagacaatgcttggcacgtaacagatgttctgtagttttagagtggacaaataaaaggatttaaaccgaatcaaataccatttgaatgctgttccttttaacatccttaggtttaatcttaaagacaattatggacttctatttttttcttcctttaggagttctgttataatgtttttaatgtataaatttcaaggtagttaaactttgtttttaaataatgtatgctggttgtagaaattttgaaaataaaaaatatgaagaaatcaaacttcacattttactagcatataggaataaaattctaatttttccttattatagataatatcatggtgaacataattataggttttctatctttgccttctttaaattctctttactacttaagattgagccaggggaaaaagatgctaatatctatttgaaacttactaagttccaagcactttatatatattatctcattaagtgcacaaccatgaaaggtattactaccttaagtttatgggtgaagaaataaatacttcagatttagagtttttagaaaagcttttcagatcactttcttcatccatcatctcacttaatctttataataacgctataaagcgtgtgtgtgtgtctgtctttgggggttgattatatatcaaatagttaattaactttcccttctcttttccctagctctgcaggaagctcctctctttaaggacaatgttctctacctctttgaaagttgctgtgcctagcacagtgacaggcacatggggcctttaataaagacttcctgatttgagttagcatgcagtggaattatgggatcaggtccttctcaccttgctctctttgtctgatgacatcttttaaaaattgaggtaaagtacataaagtgaaatgtacaaatcttaagtgtacatttcatgcgatttgacatatgcatatgcccataacacactttaacattatagaacatttctatcactccatacatttcacatgtgctccttcccaggcaatccttccaatcaaattaaaaggctactttctaaaagcaatgctatttgcttgctgttttatatctacactctgtgtcttggagaatccactctcactgcttcagctgatacatacatgaggatggctgcccagccctgacctcactgaacactaaactttctgttctccagttgctcccagacatttcctgtcctgaaggttaccacttcagacttcacaaagtgtgttcaaaactgaatcttttgttgttgttgttgagacggagtcttgctctgtcaccaggatggagtgcaatggtgcaatctcggctcactgcaacctctgcttcctaggttcaagcgattctcctgtctcagcctcccaagtagctggaattacaggtgcgtgccaccatgcccagctaagttttgtatttttagtaaagacggggtttcatcatattggccaggatggtcttgatctcttgacctcgtgatctgcccgcctcggcctcccaaagtgctgggattataggcgtgacccaccgcgcctggccaaaactgaatcttacaccccaaactagcttcatttataagcttatttatttctggcaccaatgcttgaaaccttagaatcatttttaaattgctttcttcttttccctaataagctttattgctttttcttccctcacctcccattcccattgctaatatctatcctttaaagtccagctcatattccacatctttgaccagtctttcctaaccactgctcatgagctcaccattatgaatttaaagactactatgtctgtacaatttattagaacttattacatatgacctaatgatatctcttccattagctattttttccaatcctatttaatattccatgcatttgcaatcctccagggtaaccctacattatgcactggggctcaatttgtactaatgaaatgactggcttgcctaaagtcacatagctggtgagtggcatagcagggaccagaaccagtgctatttcattactgatgcagatatgttatgtgtgaagctaacaacatattgcctgtttatccctctaacttcagttgttggtaacaaaacatcaatagttcatgttctaaaagaatatgaatagttgacttcttattccaccaagaatatggacttcttagtccataaagactaagaatagcggacttcatgtgtaaatagtctctctttataggcactaccattcagttagttttgttcaattataacaacagaaccagcaggagttcttcaaggtagcatagtgcagtaagaaaggtgtagagccagggcaagtaaatttttctctctgtgcctcactactgttatctttaaaataggaataataatgctatctacctcaaagggttgttaggaggattaattactatttataaagatcctaaaacatctaccattaagtgcaacaaaatttgttttattgaaaaaatataacaagtatttggtacttaagtttacaaattagtttcatctttgatcaacgcatctatccagtaattagagctggcgttattcacaaaaagcaagctaagaagcaaatatttttggtggcaatttgcctaatgcctggctaagcacatggcagaacctggtacttaaacccagaatgtgcatctccaaatcgcacagctttctgctttgtcatgctgactggggtagtgctttgatcacctgtttggtcattgataagtatcagtgggtacaacacctgtgtctacccacacactggaagataaaacgattgattctcctattagtgacactgttgcagtataagcgggcttgtcagcaattactagcaagtaggagagaaaataatgtgaagaggtaagaagtctgggaatgaggatgagtaaacattgaaataactagctcaattatatttacagatatgcttcttgccatattgctcaataggataaagattattttgagtttccagtgtgagagatttttccatagttgaatttgcatgctatgccttcaattagattataaaaccctcagaggccgtttgaaaaactgctgcaccactaaatcgacttctttcaaagtgaaggctcctccatccaagctttcttatcattgggctcaaggttgaaagccagtaaaaagttttcttattgaagactgaaaccacccaccaccgtccctggttaatcataaaagaagcgttattctaaaaaactccagttctcgctgagacagctgttgacccaatttgtatacaaatgtgacactctgaacctctctggtttagtatttgatagcccaacagggtgactatattcaataaagattcaggctgggtgcagtggctcctgcctgtaatcccagcactttgaggggccaaggcgggagaatcagttgagcccgggagactgagaccagcctgggcaacacagtgagacaccgtttctagaaaaaatagaaaaaagccagatgcgcgcctgtagtcctagctacccaggaggctgaggtgggaggattgcttgagctcaggggttggaggctgcagtgaaccctgatcctaccactgcactctagcctgggagacagaatgataccctctctcaaaaaaaaaaaaaaaaaaaaaacaaactgtacatttaaaaataactaagagtaactggattatggttgaatgcttgtggtgatgagtatctcatttaccctgatgtaattattacacatttatacctctatcaaaatagctcatataccccataaacatacacacctactatggacccacaaaaattaaaaataaaaaagaaaagcctctttggtccactcagtccaccacccgtattagaatgtaagagtttttttccttgggaaaagtgtccgacagaaccaaggctcggtaaaggatactaataatgtaataatataatattaacaaacatctactgagctttaaatacgtggcaggcactgtgctgtgcactttatgtgcattatccaaattaactctcagtaattccaggagttcttatcaccggggtctgtggaagaggaaatggtggtttacggcaatttccgaatgtcgcacagtagaaagtggaccagcaaccagggttgcagatcccaaagtccgggatcttcaccatttcacccaaccgccttagagacctcccagcaaaaggtctaagcacgaatgctccagaaaacaggtccaggtcacgcgtgccttctccctttccctctgggctcgacagtggtgcacagagcgactagggagtgggggccgcggttatttcattagaaaagctctggagccccgggagcccttcgtcccaggcgcacttgccctgcaagcccttctggaaggcggcagcgtccaggcggtccagcgcatcgagccgcgccaggcgcaccgagatgcccccgaatctgtccagctcgccctgcagatcgcacgctccaactggcggattccgcacgtaaccctgtgcgcccgaggcccagcggtaacccgccgaaggcccggggccgtaggttcgggcaagcatcgcgcgccagcggccccagctcagcggctgccgcatctccacgccgcttaattcgtccgttgcccaaatgacccctccgcgctccagagcggagatcgcggccgtacattttagaagagtgccatcaataccctcagagttgagctggggttaccactctgcagagctatgccaaggagaccgcgaagtggtccaccagcccttctcagcaatttgccccgctccagttaagcggggaaaacctcctcccccaccgccactcacttattttgtttggtagtttaattcaacagacgttggtttagggatggggaagccgggaggagatgcaaaaacgtcctgtttttcaggaatttacaatctaagtggcagttccgttcctggaacctatcttctttcacagatgccgttacagctgtttcaaagactgctggttttgaaaacgctcagtccctcccaccacgctgtgcactgctgcgctccactcaggggattacggcgcaggggcggaccctcgctgacttctgccccggaagtttttctctcagttgaagcgcgcacattgagtcggcttttctactgcttcggctagggtaccttgtgaccatgtcttccaagaagaatagaaagcggttgaaccaaagcgcggaaaatggttcgtccttgccctctgctgcttcctcttstgcggaggcacgggctccttctgctggatcagacttcgcggcaacctccgggactctgacggtgaccaacttattagaaaagggtaaagaattccgggtgggagactagaggccgagggggcgcaacctgaggggcgggagactcagtgatactgacttggggtgcagagacttttgaaagttgggcgtggcatgggtctgagagcggcacagaagcgtgtaagacttctgtatgtaagaagcatgcaaacgtagccgcgcctgcactggagaagttaggctgaaatggtttatccgtgtccaaggtttctcttttgtaaattattttgaatttttaagttgcacttgaaacgctttgtctcatttaacattaacgacacatttaattgcaaaattgttcataactagcgaacatgggatacttatcctaaaaaactaaataaccaattcagtaaaaatgtggatcactctgcctttaggagtgatgatagcattttcttccagtactacgcaggttatgatatttaataactgctagtaactgcacactagtgttagcagtatatatagctcatctaatttctacagaagccgtgaccgatgggtatagtaatgacagttttatagagggaggaaasttaacgtgattccattcaggctacacaggtgctaagtggcagagccgatatttgagtccagatgtgtttgacttaaaagccattcctagatgacagctcctttgatttgggagaacgtatttatactgaaaagtcttataaattgaattaaaaattgaaaatttatatttgatgtgtaatagctttgaaaaatggaccagactagtggcaaaaacttttatgtctaatcagaccttaaagacaatttagagttcacatggtattttcactctgccttaggtatcagaggacaacttgttctgtcctgaaggttcaacttgtttttgaactagatccttcccattgacatgtaaacatgctcatttctcttccatcttaaatcagaacaaaagctccacattttcttcctgcaaccgtctctctrtccattgccaagcttcttraatggagtggtctctgccgcctcaccacttacatactctccctagcctattcctctttgacttccaccccatcattccatggaaactgttcctggtgtggtctccgagcatctccgtgttgataaaccttacgtgaccacagcaacttttggtattgttgaccattccctccttctcgaaacacttaacttcttatgtgttgtcaaacttgcctggttttcttcatctttgttgatgtttcatcatttttctttgcaggctcgtcctcttcccttgaccattaaatgttgaagttcgtcaattcttagtccaaaaccttttttttcctctcaataaatcctgtctccttggcaagttcatccagtgcccagagtttcccatctatagtctcttcagtgtcagatttatatttgtaaatcttttgtttttgcgccttgatgtggttgccttttagccaaatgcttctcaagctctctgtggtgaagactttaaaatttataataggtcacagatcrgcacttttctaaaatacagtaaaaatgattttctagaaaaataaggaaaaatttttattaaacagatgtgaaattactctgtaaatttcaataaaagcttctatatacttattctcctgttttgtacttgtcatgaagcagtaacaaatcgttgtgggtcatattttgaatagcactgtacaataactcttctcatgagtgtcccaaagatacttcaggactaacttcatgagcccgttatttcctccaacaaaataaacttcaactctgttcagtttttcccgctgcaaaattcagaaacctaagagtcatccatgactctcccccccatatctcacatacctagtccaccactaaatcatgtttattacctaaatattttacatattcctcttctgcatgccattcccactgtttctaccttaatttcagacaccatcatctctcacctggactgctacaacagccttttgactgattttccagcttccaattttgccccttattccttttccattctgcagccagaatgatcttgtaagatgaagatcttgtcatgacattgcttttcatccctttctgggctcccactgctgtcagagtaatgaccagcatcttgatgcagcctattgcactattgtcctgggtggtcttgaccttctttacatggcttccctatgtctccaccactctgcctatactctcctgaggatgcgccatacccccttctgcccaggaactttgtacatgctgtcctctttgctgagaattatctttttcttctcctcatttagttagttcctactcttctttcagacctgatcttaacatcacttcctttgagaaacattctcttatttgaaattaggtcagatcccacatggctctcctggcactctaagtcattttttcattgtattaatcttagtttattattttacagctatccactgattgtttaataactcactcatcctacaaggctataaactctgtgagaccaaggacttgtgaacaaaagtgcctagcatagtatctttcatatagtaggcacatagtacatatttgctgaatgaataaatgaagggtggatggttgtttgaaattatctttactatcttgttagttaatgtgatacttaaggtgctcaataaatgtgaaagtagttaatggggaaattagatgttgacatatttttaaagtattggaggagtgaggtgagaagggaactgtgtggacaacttgagtagacctatatagtgtaagcagagaacacgttggtgatgttttggaaaatgagaccagtggctgggaatttgaacatgattaccattgaaagacaaggtggagaataaatcctgggacatggagaatgtgctggatagggtggaaggagaagaagaaaactaaagtcttgggaaggactgagaacacttgtgtggtaattgtcaagagggaaagatagttcattgaggtttaggaagaaagaggcaggaactgaatattatgagatcatctaacagcagtatgctttactgttaatgaccagcaaacaatgtaagagaactaatgctcattggaaggttgaatttctgtccagcttcttgtattatgcagtatgtgttcatttcgttttatactcagtgctgttcatcttagctctgtgagatgctttgtttttctagatttgcacctcatataagaaggaaaagaaatgtgttggggagttgttttgtagtgacagaataatgtaaatcatatgggtaccttatggttttcctttccttgatttaatttcttttttattacagaatatctgttttctgattattaaggaaaacttaggtagagctctgtgattatggtatatatgtttacaataaattttataatgaagttgtgacatttttaaattctctaagtgtttcatagattttgtgctgaaaagaaaaccattgtatacttatttactacatttattcattttatggctatttattgtgcaactgctatatttaatgcactgtaagcattggagatacagagagaaataggacccaattcctgcttcaaagcagtatacaattaaggagaaagactaaaacaaatgaatattatggtaaatgctattaactggcagcacagagtgctggaggaattagaggagggacacctaactaaatatggagcttggtgggggtggggtggatagaaaggagtggagatgacagcacatcattttcagaggtgttgttaactggcctgaattctggaccccctttttcagccaaaagttgaaatcactagtggtgtgtgttcgtataaggaagacgacttctgttactmtctttacgtattcttggtaatacaaaagaaaaagatctggtgaccataatgtggggcagaagtagaaacataacttaatcctctagagccagatagatgtgccagttcccagttcaatcctttgaatactagtagctgactcaactttgaacttaaagctcagagactctcttttgcaattatgtttacttcttaatgaaattagagactcagaaaaaaagaaaccaatactcaccccataaaacatcttctttttagttaatacttaatatgttgccagtagaccctcaaaagcatttgattttaaatctgttttgttataacaaaagttggaacactagtttctccagggtatggtaagtacattcatgtggttatatggttagagtatttttatttactgcaaaagaaagcatgccttaacttctgttacaaagtagtacaaaaataattttcttttccttcatagtagatgacaaaattcctaaaacattccagaattcccttattcatcttggactcaacactatgaagtctgcaaatatatgtataggtcgaccagtgttgcttactagtttgaacggaaagcaagaggtaagagtctttttcatttccttagtttagaaatacaaactgaacattgcaaatccaagaatctaaactctgaaatgcttttgagtgccatggtagtcaaaggaaatgctcattggaacattttggatttcagatttgggatgcttagccagtaaacataaggcaaatattccaaaatggaaaattcaaaacgctcctggtcccaaacattttggataagggatactcaacctgtgtttgagatgtttctgattttaattttcaacacaagcaggaataaatgaaaaactgtattttaaaagacattaacatgtatattaactctgttcctttgctgtctatgactctgctgggcatagtagcccctaaaatgttatgtagagagaagtgttgcctccggcgatagtgacagtatttctccctgtcagttagttatatttctttataaaaatattattttgggggtaagaaggtcacctgttctgtatataaatattttactattctcccttgtttcagctgtttctccttgctgtcatttttcatacctgagattctaagcctggaacctttcctggatcatttttggcagcttggctttcttttctgctaccagccccttatctttcatggcttcctttgatgcttctctgatttgctggggatcctttggaaatactttgaaattttttgtctgctgatggcacccctcctattcttttcatttttctggcttatgctttaaaggtcctttactgtgtcttttagaagagaggactataaatgtgtgagcttaagctagaaattttcgctcctccctcttaacatttaaatctgataagacccaggttctgacaaagctcttgttctgtgtccctcactatttcctggatgtagtttaatttccaggctggattactttacaagttattttgccttaatatttttgtcattttctcattatcacctgttaatgcctttatcttttttcatatatttttcatatcttctaccgtcttcactgtgggatcattcttgatctttagaaaaagatgtaatatttattaaaaagtttatttttcatgagcccatgtagtatttaaattttttaaaaaatgcaatktatcttattgcaattggtatcagattgtaactctttttgggtaaagactstattttgcatatcttaagtgcttgactgtgcttagcattctaccttataaattgatggtattctatgaatatttattttctaacatttttatttcctctgtctggcaggtgtatacagcctggcctatggcaggatttcctggaggcaaggtcggcctgagtgaaatggcacagaaaaatgtgggtgtgaggcctggtgatgccatccaggtccagcctcttgtgggtgctgtgctacaggctgaggaaatggatgtggcactgaggtttggctcttttctttggtgactatctggatcaaagctgcccagtagaaatataagagtcacaaatgtaaaccacatatgtaattttgcattttcttgtaacattttaaaaagtagagagaaacaggtacaatgaattacaatagtatgttttatttaaccagtatatataaaaatgtattttaacatgtaattataaaaaattaccaataagggctgggcgcggtggcttatgcctgtaatctcagcactttgggaggccgaggtgagtggattacttgagctcaggagttcaagaccaacctgagcaacatggcaaaaccctgtctctacaaaaaatacaaaaaagaaaatttctgggcatggtggtgtgtacctgtagtcccaactatttgggaggctgagacaggaggattgcttgagcctgggaggtggagattgcagtgagctgggatcgcgccactgcactccagcctgggtgacagagtgagactgtgtctcaaagaaaaaaaaaagttaccaataagatattttgcatcctttttttcaagctaagtcttcaaaatcaatgtgtatgttacacttgtagcacatcacagtttggactagccccattttaaacatttgatagctacatgtgctgagtggctagtggccacttgtgttatattagacaacccaagctaaatgagtgctatataatttatagactaaggactttgattttccatgattagagtgtgccctgacattttaggtgagagtaattttcattgatgcatatttagcagtgtttttcaccttgacttgcagtgtaatcagggcttcttattttacagttgtaaagaaaagagtagattactgtgagtcaaacagaaacaagttttaattaagactatgcaagcaaagaacctgattgtatattttaacttgttgattattcgatttagtaaaacaaacsgtcattactatcagattttaaaataatccctcaccacagggtaattgtttgaatctacctatcaaggtagttaaggtatatcatccatcctcctggatattctattatctaataggatatcgacttggtttgcatatacaagtcttctcaaaaatcatttacaaaaagcatctttttatactttaatgtcaccttagtaatagtttgggggatgtgtttacattatatgtgagaattacaaaccattttctagtcatcagcttgattttaatatgttctcttttgctactattgtagattttagacttgagttttggcatattttttcctttataacaggagaatgttttcagagcttatagtaacagtttaatgaacaataaaaagcagaagggacaggagacaatatgttgagtaccggctgtatacagaagctttktatatattgcatgtatgtatacacacacacacakttacccttttctttttaaacagatgaaatagtctgaggagaacttgcctaatattttatgaggtagttaatagtactgttgagattaaactggattattcctcagactatgtcttaaaatggtgctacaggtagcagtaattcgttgactggaattagcatttatgatgacctacaaactagtcagacctcttgagcgcacagcagtcttaggtgagtaatgattgcttattagagaggactggatatgttttaaatgaaagctcaggttttaaaattttgttttaaaaaatcttatgttttaaaaaatcttatgtttaaaaaatcttaagtatagacaagaaagttaacttccagttgggaaaatcagtcattttagtctgcttaaatccttcagttgcaactgtaagattttattattaatagtaatgttagagctccttctagtggaaattattttatgtgcaactattatttttttaaaagcaaaattggtttgatatttttactgtttttacatgtatttgtaaataccttctattcagagtttaacaaaagcaatttaagtataacttggtttagagttccataaacaaaagtaaatgtaagcatttaaggagatacatgcaattttctcattagtttatacatatatttgattcatgaaatttccccctcattgtatttctctcttgttctctcttttatatgaatatatagttgattctcattatttgtggttagttatgttctattaaagttgccttgaacaccgttagcaaatactgaaccatttctcctagagggaaataygtatgtgtgtgtatatacatacatgcaacacacacaatatatgtagcgtatgtatatatataatatatatacatacacacacattttacatagattataaccttaaaactccaaagtaattctttctggtagattttattttctttattttacaaaacagaagaggagatttagaagtgttagaaatgttaagggacttgcctgaggtgctagtgctgggattcacactccctccaactgaccccaggcctggagcttcttcactacactgctgtgtcccctatcacttccattctctggtcatctctgaatgaaagctgaaacaaggcagagtgtcacctcatcctacatggtaacatgggtgttgggtcacccaaattttttgctgctcttccatgtcactaatgagcacaaatgctctgtgagtattgattttggggtacacataagtttttgggagttggtaaatttgcaaatacagcatccacaggtattgaggattgactatattgtattattactgataaaagtgattggaagccagacgcagtggctcacgcctgtaatcccagcactttgggaggctgaggtgggtggatcgcctgaacttaggagttcgagaccagcctgggaaacatggtgaaacaccgcctctacaaaaaatatatatgtataaaaattagctgagcgtggtggtgagcgcctgtgttcccagctactccagaggctgaggtgggaggatcacttgagcctgtgaggtggaggttgcagtgagctgagatcacaccaccgcactccagcctgggtgacagagcgagacctcatctcaaaaaaaaaaaaaagtgattggagaacaaggtattttttgaccagatgggcacacaggcacatgccaccacgtctggctagttttcttttgtattttttgtagagatgaatttttgccatgttgcccaggctggtcttgaactcctgagctcaagcggtccacccacctcagcctcccaaagtgctgggattacaggcatgagccaccatgctcagttccaatcacttacacttccccttgagctaaactgtcccccctccactggtcactgacagaactagacagctgtttgtctcccctcctgatatgggctgcttatgcacaagaggaggaggaaaaatgctcatgttctgagaactcctcaagagcagatttctttataaatgtatgatatttaggtgtgttcacttcctgcacttaagcaactctctggggtgacacagttatcattaggaaggaggggatctcatttttccttggtcatgccctttctccagaaaaaaaccttcattgtaaccattactcctctttttcctacttctgccttttcaagtaacatactgtataggacttaattttcttgaagaaataatttgtaagttatactgagagagtgaagtaagttattaattagagtctttctccaagctaggcaactttataaagggaattattagtttaggtcagcattttaaaaatgtttttgcctatgacaataaaaaatggatttttcatcagattctttgtatatacacatccatagataatagtgctcatatgtgtgcatgtgtgtatgtatgtgttagaagttaatgttttacaaagcagtatttaccctttctatattcagtgtaccctgcatttcttattctattaacaaagtgctgaatgaggctgactgaaatgatttcattacccttgtgttttgaagaacattgatttaggccactaaggcaccagattccaaatgatattttcatggctatatgtttctgaaaaatgcccatcatttcaaaattgtatacattatttattttaaggttgcaggtggattattcttttgantaagtctatattataacyatatacatgtaattttacatcacagtttagtttctggtgtacctaatgctgatttctgttcccttcttatccttttacagtgacaaagatatggaaattaatgaagaagaactgactggttgtatcctgagaaaactaggtgagacaaatattttaaattgttttcttaagttttaagctgcaaggcatcagcaaataaagtgtctttgagggcttatatatgcatagtagttttcttcaaaatagctttgagaatattcccctcaatgaatgaatatacttttaagatagggatgtgctacttttcctggttaattggcagttgagcagtggaaagaatatatgacttgtctgtgraaagagtcagtggtagaattgagacttttaacctttgcattcttgccctttccagtgacagatgctatcttggagtgttggtttgggtgtgccattttcatttagtttattattgaatatggaatgcctggctatttgttgatgtgattgatagaatctgagatctactgagtgtggaggatttcagagaatcatttccttctgtctccagatggtgttataggggaatattaggtcctcaattttttatgacaattattttattaatactctgtctttgatttagtcttttcagataatagatgaaatatattgctatttaaacattaaactggtaaaaaaaattatgctaacatgtatatttaatatactgttttctagatggcaagattgttttaccaggcaactttctgtattgtacattctatggacgaccgtacaagctgcaagtattgcgagtgaaaggggcagatggcatgatattgggagggcctcagagtgactctgacactgatgcccaaagaatggcctttgaacagtccagcatggaaaccagtagcctggagttatccttacagctaagccagttagatctggaggatacccagatcccaacatcaagaagtactccttataaaccaattgatgacagaattacaaataaagccagtgatgttttgctkgatgttacacagagccctggagatggcagtggacttatgctagaggaagtcacaggtcttaaatgtaattttgaatctgccagagaaggaaatgagcaacttactgaagaagagagactgctaaagttcagcataggagcaaagtgcaatactgatactttttattttatttcttcaacaacaagagtcaattttacagagattgataaaaattcaaaagagcaagacaaccaattcaaagtaacttatgacatgataggaggattaagtagccagctgaaagcaattagagaaataattgaattgcccctcaaacagcctgagcttttcaagagttatggtatgatgtcttcagtttattgcacccaaaaatgttaaattcaaattaaaagacagttgacacttatgtaatgattgctcatcctcttttcctgtttttattttctgagtagtaggtatggtagaagatttcagttgctttgggagatgccagttaaatgggccatttgctatgctttggtatttttaggttgtaatgtgaattagtgacagccttgtctcttctaatagcatatttccacaattacctgtattggatctagaataagtatcttgtcatgctgggtcatctgtaatgactgaagggataaaccattcaaatacattagataaaacttcttaggaaatgtaactgtgtacccatctctttgcactgaagcaggtaattacgggaatggcttgactcaggaaactcagggcttctgctgcattgttattgccaagatcctttgcatatatttgctgtgtctgatctctctgcttttttcctttctcataaatcttatatatacatacatgtatgtatatatatgtatgtgtaaaatgaacccttagattggcattttgctcatacttatgtaccttttatactagcaaacgtatgtactcttcaagatggttagttggaaaaaaactgggattggtggcttgtctacctgtgttgtctgtgcttggtttttcgatcattgatctgtgttgtgtgggatggggcgttgcaacaatgtgggtgtccagttttttttttttttaaccaacatgcttcctctgttctgtggtctacagagagagaaagtcattgctgggtatcagtgtttgggctagttagtacatctttctggagggggagaaaaaactcttgactctttttgtgacgcaaggtaaagttaaattttataactcatgtttgaacttgtatgacaacatttataagaaacctagtaatggtgaatctagtgttttctactttttcttccaggaattcctgcccctagaggagtgttactttatggtcctccaggtactggaaaaacaatgatcgccagggctgttgctaatgaagttggagcctatgtttctgtaattaatggtcctgaaattataagcaagtaagtacatgatttaatagagtaaacttactattaaatatatttctaaaatgtggtttttaaaaatgattgtgtagtattctgtgtgatattttgtacactgaaatattttgcttcttaataaaaattgtttggaaaattctttttgaaagtaattttaagtattatagaaatattgaaaatttaggttagcttttatagacaaagctttaaaaacaataagaaatggtctttaaatgtattttatttgttacagattctatggtgagactgaagcaaagttacgtcagatatttgctgaagccactctacggtactctttatttttaaatgttttggaattaataatcaaggctgtattagtcaaagtgagatactagcaccttatacaaagcataaacagtagtacaaaaattatagtgatagtggtagaagtagattatagatctaatgaaattctatttctatctaatctttaaaagtttgataaatattattaaattacataaagtagaagaattaagacatagtgtttgataagtcatgtgaccttgtttgagcatagaaatccatgactttctttaggtgcttaggtgtttctaatatgcttagcttttctagtagactgtattattgtatgtagctctttatactagaactttgttatgttatactttgcttcaaagggacaaatcttttgcccattaaataatgactctggctgggtgtggtggctcatgcctgtaataccatcactttgggaggccaaggcaggaggattacttgaccccaggagtttgagaccagcctgggcaacatagtgggaccctgtctgtttaaaaataaaaataattggctgggtgcggtggctcacgcctgtaatcccagcactttgggagaccgaggcaggcagatcacctgaggtcaggagtttgagaccagcctggctaacatagtgaaaccccgtctctactaaaaatacaaaaattagccaggtgtggtggcaagtgcttgtaatcccagctactcgggaggctgaggcaagagaatctcttgaacccaggaggtggaggttgcagtcagttgagatcgtgccattgcactccagcatgggggacaagagcgagactttgtctcgaaaaaataaaaataaaaataattagttgggcatggtagcacatgcctgtagtcccacctactaaggaagctgaggcaggaggatcactgagctgggagatcaaggctgtagtgagccatgatttcactgctgcactctagcctgggcaacacacaccccgtctcaaaaacaaacaaacaagcaaaatcaaaacagtggtagagacatagccatattatgagtgacgttacgtttgaccaagttatagaccaatatcctaatactcattacagtgtaacattgaaatctaaattccctgagctcaagtgatcctccccctgtagcctcccaagtagctggaactataggtgagcaccaccatgcccagctaatttttgtatttttttttctagcaacagggtcttgctatgttggccaggctggtcttgaactcctgggctcaagccattctcctgcctcagcctcccaaaatgctggctgtcttggtgtttaatatcataactactgctcttgaatcagaaaacccaccatttttgaagtttatttttttcccgcaatgatagtagatgaagtaagcagtttgtagtcctagtactgtactgaaaatttgaaaactagtggtacaccttattgtttagtatgcttttgttgttgttgtgttcatggcagttgagatttccttctgtgagagaattcacatctgtttatgggagaattgatcatcttgcaagtttttattttaatggtttaaaaataacagggcatttctagtttatgtcctttggtttcaaacctgctccaagggatagtatctctggcctcagcttctgaattgatccagtcataacaacttaatgggcattactggggagagttcttaagagactcttatcttttaagcagcatactctactcaattacccagccttttaatggagggcagatagaatagaatatgaagttagtgaaktagtattttgggctagaatgaatctaaggatttttagcttaacattataatatctttataatattaagtgaattctaaatttgatatgttgcatttcagttaaaaaaattaaaactaagtaaaacttaaaatcaaatatagatgagagatttcattttacttgtttgtttttagacacccatcaattatttttattgatgagctggatgcactttgtccgaaaagagagggggcccagaatgaagtggaaaaaagagttgtggcttcactcttaacactgatggatggcattggttcagtaagtatagcactagtattgattctgtgtagggttaattcttaatacttatgtgtagtggtaaaaactattgaatgtgtcagagtctttggatattttaggataaaggaaaaatattagccatagcaactaggggaaagatctgtaaaataatttgctttagtagattacttagtaactgctaggacaacatcataacctggcaggttttttctagcatataaaatactataccatgatggatttattttgtgataaatgctgttagctttaaaacttgaagcaaagatcagtaaggaagatttagcagttaaattttaggggattttattttatttttatttattattattgtttttgagattgagtcttgccctgtcatccaggctggagtgcagtggcgcagtctcagctaactgcaacctccaccttccaggttcaagcgattctcctgcctcagcctcctgagtagctgggactacaggcatgcaccatcacacctggctaatttttttttaaatcttcttagtagagatggggtttcaccatgttggccaggctggtctcgaactccttaccttgtcatctacccgccttggccttccaaagtgctgggattataggtgtgagccgctacatctggccttaggggtttttattaagaaatgtcatgagtaagtcttattacccatgtacaaatggactctttcaaggctttgtactagggaaatgaaagaaagtgagaataatgcgaaatgttttgtataacatttaaaaaaaaacttattcatattaccagattctctcataggggatatgttctttcttttttttttttttttttttttttttggagacagagtttcgctcttgttgcccaggctggagtgcaatggcacaatctcggctcaccgcaacctctgcctcccaggttcaagcaattctcctgcctcagcctcccgagtagctgggattacaggcatgtaccaccacgcctggctgattttgtatttttagtagagacggggtttctccatgttcaggctggtctcgagctcctgacctcaggtgatccgcccgcctcggcctcccaaagtgctgggattacaggcgtgagccaccgcgcccagccgggatatgttcttttattaataaaaactatatgctaattatggaaggaacattcataggactaataagagaataggcatgaacaaaaattttctaagactcctgacatccattaattagaaaaatacacttttcatgctggattatgaataagtaaagtttttagaatcataatatgttagaaccacaataaattttagaaattatgtagtatcaagcctcttttgcacattaaaaagctggtcatttagaatttttttttttttatactttaagttttagggtacatgtgcacaatgtgcaggttagttacatatgtatacatgtgccatgatggtgtgctgcacccattaactcgtcgtttagcattagttatatctcctaatgctatccctcgcccctcccccaactccacaacaggccccagagtgtgatggtccccttcctgtgtccatgtgttctcattgttcaattcccatctatgagtgagaacatgcagtgtttggttttttgtccttgcgatagtttgctgagaatgatgatttccagtttcatccatgtccctgtaaaggacatgaactcatcattttttatggctgcatagtattccatggtgtatatgtgccacattttcttaatccagtctgtcattgtgggacatttgggttggttccaagtctttgctattgtgaatagtgccgcaataaacatacgtgtgcatgtgtctttatagcagcatgatttatagtcctttgagtatatacccagtaatgggatggctgggtcaaatggtatttctagttctagatccctgaggaatcgccacactgacttccacaatggttgaactagtttacagtcccaccaacagtgtaaaagtgttcctatttctccacatcctctctagcacctgttgtttcctgactttttaatgattgccattctaactggtgtgagatggtatctcattgtggttttgatttgcatttctctgatggccagtgatgatgagcattttttcatgtgtcttttgactgcataaatgtcttcttctgagaagtgtctgttcatatcctttgcccactttttgatggggttgtttgtttttttcttgtaaatttgtttgagttcattgtagattctggatattagccctttgtcagatgagtaggttgcgaaaattttctcccattctgtagcttccctgttcactctgatggtagtttcttttgctgtgcagaagctccttagtttaattagatcccatttgtcaattttggcttttgttgccattgcttttggtgttttagacatgaagtccttacccatgcctatgtcctgaatggtaatgcctaggttttcttctagggtttttatggttttaggtctaacgtttaagtctttaatccatcttgaattaatttttgtataaggtgtaaggaagggatccagtttcagctttctacatatggctagccagttttcccagcaccatttattaaatagggaatcctttccccattgcttgtttttgtcaggtttgtccaaagatcagatagttgtagatatgtggcattatttctgagggctctgttctgttccattgatctatatctctgttttggtaccagtaccatgctgtttggttactgtagccttgtagtatagtttgaagtcaggtagcatgatgcctccagctttgttcttttggcttaggattgacttggtgatgcgggctcttttttggttccatatgaactttaaagtmgttttttccaattctgtgaagaaagtcattggtagcttgatggggatggcattgaatctataaattaccttgggcagtgtggccattttcacgatattgattcttcctacccatgagcatggaatgttcttccatttctttgtatcctcttttatttcattgagcagtagtttgtagttctccttgaagaggtccttcacgtcccttgtaagttggattcctaggtattttattctctttgaagcaattgtgaatgggagttcactcatgatttggctctctgtttgtctgttatcggtgtataagaatgcttgtgatttttgtacattgattttgtatcctgggactttgctgaagttgcttatcagcttaaggaagttttgggctgagacagtggggttttctagatatacagtcatgttgtctgcaaacagggacaatttgacttcctcttttcctaactgaataccctttatttccttctcctgcctcattgccctggccagaacttccaacactatattgaataggagtgttgagagagggcatccctgtcttgtgccagttttcaaagggaatgcttccagtttttgcccattcagtatgatactggctgtgggtttgtcatagatagctcttattattttgagatatgtcccatcaatacctaatttattgagagtttttagcatgaaggttgttgaattttgtcaaaggccttttctgcatctattgagataatcatgtggtttttgtctttggttctgtttatatgctggattacatttattgatttgcatatattgaaccagccttgcatcccagggatgaagcccgcttgatcatggtggannnnnnnnnnnnnnnnnnnnnnnnnnnnnnnnnnnnnnnnnnnnnnnnnnnnnnnnnnnnnnnnnnnnnnnnnnnnnnnnnnnnnnnnnnnnnnnnnnnnnnnnnnnnnnnnnnnnnnnnnnnnnnnnnnnnnnnnnnnnnnnnnnnnnnnnnnnnnnnnnnnnnnnnnnnnnnnnnnnnnnnnnnnnnnnnnnnnnnnnnnnnnnnnnnnnnnnntaaaattctcttttttggttgtgtctctgcccggctttggtatcaggatgatgctggcctcataaaatgagttagggaggattccctctttttctattgattggaatagtttcagaaggaacggtaccagttcctccttgtacctctggtagaattcggctgtgaatccatgtggtcctggactctttttggttggtaagctattgattattgccacaatttcagatcctgttattggtctattcagagattcaacttcttcctggtttagtcttgggagggtgtatgtgtcgaggaatgtatccatttcttctagattttctagtttatttgcgtagaggtgtttgtagtattctctgatggtagtttgtatttctgtgggatcggtgctgatatcccctttatcattttttattgcgtctatttgattcttctctctttttttctttattagtcttgctagcggtctatcaattttgttcatccttccaaaaaaccagctcctgggttcattaatgttttgaagggtttttttatgtctctatttccttcagttctgctctgatcttagttatttcttgccttctgctagcttttgaatgtgtttgctcttgcttttctagttcttttaattgtgttgttagggtgtcaattttggatctttcctgctttctcttgtgggcatttagtgctataaatttccctctacacactgctttgaatgtgtcccagagattctggtatgttgtgtctttgttctcgttggtttcaaagaacatctttatttctgccttcatttcgttatgtacccagtagtcattcaggagcaggttgttcagtttccatgtagttgagcagttttgagtgagtttcttaatcctgagttgtagtttgattgcactgtggtctgagagacagtttgttataatttctgttcttttacatttgctgaggagagctttacttccaactatgtggtcaattatggaataggtgtggtgtggtgctgaaaagaatgtatattctgttgatctggggtggagagttgtgtaggtgtctattaggtccacttgttgcagagctgagttcaattcctgggtatccttgttaactttctgtcttgttgatctgtctaatgttgacagtggggtgtgaaagtctcccattattattgtgtgggcgtctaagtctctttgtaggtcactcaggacttgctttatgaatctgggtgctcctgttttgggtgcatatatatttaggatagttagctcttcgtgttgaattgatccctttaccattatgtaatggccttctttgtctcttttgatctttgttggtttaaagtctgttttatcagagactaggattgcaagccctgcctttttttgttttccatttgcttggtagatctccctccatccttttattttgagcctatgtgtgtctctgcacgtgagatgggtttcctgaatacagcacactgatgggtcttgactctttatccagtttgccagtctgtgtcttttaattggagcatttagtccatttacatttaaagttaatatcgttatgtgtgaatttgatcctgtcattatgatgttagctggttattttgctcattagttgatgcagtttcttcctagtctcaatggtctttacatttttgcatgattttgcagcagctggtaccggttgttcttttccatgtttagtgtttccttcaggagctcttttagggcasgcctggtggtgacaaaatctctcagcatttgcttgtctgtaaagtattttatttctccttcacttatgaagcttagtttggctggatatgaaattctgggttgaaaattcttttctttaagaatgttgaatattggcccccactctcttctggcttgtagagtttctgccgagagatccgctgttagtctgatgggcttccctttgtgggtaacctgacctttctctctggctgctcttaacattttttccttcattttaactttggtgaatctgacaattatgtgtcttggaattgctcttctcraggagtatctttgtggcgttctctgtatttcctgaatctgaatgttggcctgcctcgctagattggggaagttctctttgataatatcctgcagagtgttttccaacttggttccattctccccgtcactttcaggtacaccaatcagacgtagatttggtcttttcacatagtcccatatttcttggaggctttgtttgtttctttttattcttttttctctaaacttcccttcttgcttcatttcattcatgtcatcttccatcactgataccctttcttccagttgatcgcatcggctcctgaggcttttgcattcttcacgtagttctcgagccttggctttcagctccatcagctcctttaagcacttctctgtattggttattctagttatacattcgcctaaatttttttcaaagttttcaacttctttgcctttggtttgaatttcctcccgtagctcggagtagtttgatcgtctgaagccttcctctctcaacttgtcaaagtcattctccgtccagctttgttctgttgctggtgaggaactgcgttcctttggaagaggagaggcgctctsctttttagagtttccagtttttctgctctgttttttccccatctttgtggttttatgtttgtttggtctttgatgatggtgatgtacaggtgggtttttggtgtggatgtcctttctgtttgttagttttccttctaacagacagggccctcagctgcaggtctgttagagtttgctagaggtccactccagaccctgtttgcctgggtatcaacagcggtgtctgcagaacagtggattttcatgaaccgcgaatgctgctgtctgatcgttcctctggaagttttgtctcagaggaatacccggccgtgtgaggtgtcagtctgcccctactgggggtgcctcccagttaggctgctcgggtgtcaggggtcagggacccacttgaggaggcagtctgcctgttctcagatctccagctgcgtgctgggagaaccacggctctcttcaaagctgtcagacagggacatttaagtctgcagaggttactgctgtctttttgtttgtctgtgccctgcccccagaggtggagcctacagaggcaggcaggcttccttgagctgtggtgggctccacccagttcaagcttccgggctgcggctgctttgtttactgaagcaagcctgggcaatggcgggcgcccctcccccagcctcactgccgccttgcagtttgatctcagactgctgtgctagcamtcagcgagactccgtgggcgtaggaccctccgagccaggtgcgggatataatctcctggtgcaccgtttcctaagcccatcggaaaagcgcggtattagggtgggagtgacccgatattccaggtgctgtctgtcacccctttccttgaccagcaaagggaactccctgaccccttgcacttcccgagtgaggcaatgcctcaccctgcttcggctcgcacacggtgcgctgcacccactgtcctgcacccactttctggcactccctagtgagatgaacctggtacctcagatggaaatacagaaatcacctgtcttctgtgttgctcacgctgggagctgtagaccggagctgttcctgttcggccatcttggctcctccccgaactttttgttttttactgtctagtggcagaaagtaaatatgtgaaaataatataaaggtttggcactaagtcacttatatactaacgtgttagtaattttaagagtctgtaagagaagggttgtcacctggtggaggctgcctgactaactggttctcagtcttggaacagtacctaggagtgattttcatgtcccaggttgattctcaggttataaagttgaagaattcagtgttattagtaggctggagatgatagagttgtgaggacagactgacccatgataataacacttacaagagaatcatgtataaaatagtgtcctagtttgtccatttacagtaagagatgtgactgttaagcagaccaaatgtttgtgtttatggatgaccatattttcaccttgatggcaaatatagagagctgtcttataattacaagggttcttggtaggtaggaaatcagatgaaaggcttagtgttggagaatcttaattatttcaatctgctgtctctttctctgccactgggataagcctgttgtggattagtattcttgcctttgggcaaggaatggaaacatgtgatactgatgttttagtctgaatatttttaagggtctgtttttgtacttctaaacttataattcatagattcgctgtagtccatgcattgtctgttggcacattcagtataattgattaggtttgagctttttttaaatttttttttttaacataaattgcattccagttatgcttgtctctgggtcatctgaatagaatattggataatttctacaggtggctgatcatgatcatagttctttattatttggttttcctaatttcattttcagagagtaaaaatacctatatattcaaatgtggctgatacttggatattggttatattgttgactcttattttcaggaatttaaaaatgtatccatattaaaaaaactagtctataagcgaagactttttagataactttctaatagaatcttgttctatttgagtattatatgtgtcagaatcctgactttcaagtaggggaaaaggactgtttaaaacaattaaaacaattatatggtacatattatatatatgttattttttatgagaatgatacagttaagatgtgagaagtaagagagatgtcatagtagatggagaggtgagtattgtaaaactttctacaggaggaagcatttaggctgaacactgaaaaatgtataataaaagtaataaatgtataataaaaatgtattactaataaaagtaattgataggtaatgaaagcgtaagaaataggacttagtatcctggacagttagatgtttcatccttgtctatacagccagtgtgtgcctctcacttttttttttctaactttcagaaaaataaatttattttcattttattttgttaggaagtaagtgaaggacaagtgttggttcttggggccacaaatcgccctcatgccttggatgctgctctccgaagacctgggcgatttgataaagagattgagattggagttcccaatgctcaggaccggctagatattctccagaaactgcttcgaagggtaccccatttgctcactgaggctgagctgctgcagctggcaaatagtgctcatggatacgttggagcagacttgaaagtcttgtgtaatgaagcaggtgagtgtggtttgctatggtgagtctctattgatgcacttatctccagtttacttacatacaaataatttatattttacagatttcttaatggaagtagctttgtttctaattataaaatgtgtaatttttatttgaaaaaatttttattggaaaaacctagatgattcagaagactataaaaaaaaataaaaatcactcaatcctacctctaaaggataaccaccattatagtgtatacagtcagccctccatatccttgggctcagcatctgaggagtcaaccaactgtggtctgaaaatattcaggaaaaaaaagttaaaacagtaaaaaataataaaaacttaaaaaatatagtatcacaactacagttgacccttgaactatgagggcttgaactgcatgggtccacttatatatgaatatttttcaataaatatattggaaaattttttggagatttgcaacaatttgaaaaagcttgctttttctttagcttactttattgtaagaatacagcatataatacatataaaaaatatggttaatcagctgtktatattattggcaaggcttcaggtcaacaataggctattagtagttagtttttgggggagtcagaagttatgcatagttttttgactgcacagggattggtgtccctgacccccaagttgttgaggggtcaactgtatttacatagcatttacatgggatcaggtaaaagtaatctagagattatttaaattatacgggaggatgtgtgtagtctatatgcaagtactatgccattaacgggcttgagcagtccttagattttggtatcttaggggtcctggaacaaatactccatagatactaagggatgactatatcctactagacttctccagagtatacacacacacacacacacacacacacacacacacacacacacacacacacacggacatgtaatcagatccattggtggcggtattgatgatgacaatatttattgatatattgtgctgtgctgtggaaatcagggagaagtgtaaactggagaatcacaattttccttaaaattgagtgtcatgctggacccctattaacttcagtgggatggtaccaagtttgagaggccaaagaagggacccagagccaataaatgaaacttagggcttatttggcagaacttacttacagggcggcccagtggtgatgggctggacaggagaactgcaatcacttgcaaaaagcatgcagcttgtatagcattttcacttagcatcctccccccagcaacttccacatggcaacctcctttcttaagttattgctttcaggtgcatctgccatatactccgcaccagcatacccttgcgtggccctcacattcttatgcctttctgtcatgagatccctggggccaggtatgtggaggagcattgcagccagatgctgcagtagcaatataaactacaataacaaaaaagaataacaaatataataacaatcatactgtatagaaagtttttcaagggcttaggagttgattaaaacacgtggttatagggttttaagacttagattctgtagtggaaatatgggtatttaaggcctgcatggcctgggttagatcgtgagagtcatcaggaatacatacacaacaggttttaattaatccataggttccgcccttgtgggggcagttaagatgtccagggccatgcaattttacaaagaagggtgcatgacacactatctctgtctcactgctgtcatccactctagcccatcattgtgtacagcctacctacagtggggagtgacattaacttgctcctttaccaggcggaaaatatgccatctcatgttgttggtggtgggaaacttgctgcatgaggtgctgttgtcgctgaaggggaataggtgaaggtcactataccaagtatcgaagtggccccaggtactcatgttaactgccttggtgtggcatggcaggcccacagcggaggagagggggagctctccgcagacccagcagtctgttttcttctggagagagataaccatctgcacccagtcagcaaagaggtttgcggcacaccatctatgggcaaaaggtgagttgtttagtgggtacaagaaaggacaagtcctggccatttaacaagacatggggagttgtgtcattctgagagagcaccacccctggcagcagcctgatgcctggtttacaataccaaatggactggctcccctctgtaatgtgttgcaggaggccagaggaagacagtggaggtatagtgtttcatgagaggatgttcatccccttgcacaagggaggactaggattcattattttagaattacagtggagagtatggtatgaaataggtgtgacatatatatcctgttctaggcccttcccccatggagcagaaaaactgaaccatcgggctggtttgccatttcccagaaccacgtaatgatgtgctccccagtaggttggtcctgtggcaagggccatagcagattactttgtgtcccaggttgggggcaaaggtctgctgtcccttaccctgtctacctgtatcctgatggtcgtatcacatccttgtgttagaagagtatacatgatggggtgatgagaatgtgcatatttattcagtttgtgcacggctgctggtaagcagcgtgtccacagagccaactcctataggagttgtttcaacagtccattcaatttgttcagtcagccccactgctgtagggttgtacggcaggtgaaaatgccagtggatatccagggcctctgcctattcttgtactttatatctggtaaagtacgagccctagtcattgttaattttttttttttttttgagatggagtttcgctcttgttgcccagactggagcgcaatggcgcgatctcggctcactgcaacctccgcctcctgagttcaagcaattctcctgcctcagcctcctgagtagctgggattacaggtgtgtaccaccacacctggctaattttttgtatttttagtagagacaggtttcactatgttgggcaggctggtctcaaactcctgacctcaggtgatccacccgcctcagcctcccaaagtggtgggattacaggcgtgagccactgtgtctggcccattgtcactattgatggagacgctgtaggctgcacacatctgttctggtccttttatggtggcatgcttgctgggttatgctcgttgtagccctgtgcaggtttctgcacaagttaaggcatagtggcagccatccaataggggcaaagatcctatgtagtctacctgccaccattgtgctgggctctggccctgggtgatctttctggtatcaggtggcaagggcctggggtgttcctgtgcatgggtaagacattgctgacagatgtgtactgtgtctttgtatcatagtggcaggctccaattctttgctatggcccaaagggtaagttgtcccctatgtcctgtcttcttttgtaaccagttgaccacatcgtctgtggggactcccttgaggagacgaatgcaggttaatttgtctgcctgttgatttccaggttggtgtagatgcagtgtggggatccacatggtagatcattttatgcatcccccagatgcaatggggaatgtccttctacatgtcagggcaccaaaggaggtgacctgctactgtctagtcctgtgcttcccattgtagtagccacatggtgagtccctttacattggattaggtaaaagtaatctagagattatttaaattatatgggaggatgtacataggctacatgcaaatactgtgccattttatataagaggcttgagctgtccttagattttggtatcttaggggtcctggaaccgataccccatagatactaagggatgactgtatcctatcagacttttccaaagtacacacacacacacacacacacacacacacamgcacgcacacacatgtaatcagatgcattgttggcagtattgatgaagacaatatttattgatatatcgtgctgtggaaatcagggagaaatgtgtactggagaatcacaattttccttaaggaatgtcatgccggatgcctgttaacttcagacagcccacctgtgagtacacaggactgctgggtctggcttatagaggaggaccatcctggcagcttgcagctcagctcattggctgctatgtccttggcctgtatcatcaatccagatcctgtcagtggatggctggatggctatgcctgctcaagtgcaaggattgcctcgtgacaagctgtttgtgtaccaggcctggtcagtcattgggcggtcagacattgggccctgtctatcctgtatgaaggagagcatctgtggaggctcagcagcctccctaaaagactatgtgacagttgttacatagatgacagggccaagcactgaatggagctctgagctcaaggggctattaatgtgctcctttgttgcaggtatgtaagccatttggccacagtctgtgtctgggcattcccagacttcagtttctggaagataccctttagccaacctgctttggggtactggctgcatactagcatcaggaccccttttgtaatgtcctctacttgttgtaaggcataatgtatagcacagagttgttgttccatcacactgtatctaactgcaccctttttccgtagctgggaccagaatcctaaaggcgcatatgtatgtctctgcctttgccacgggcctcacccaaacccctcaaggtaactggctacatctagttcacaggctgtctctgcacctgaactcacaaggcttgtatttatttcactgtgacttcagctggttcaaaggcctcatccttcttcgtggattagtctcagtgggcccccttcttgactaaacagtataggggtctaaggagttgggccaaatgaggaataaaatgatgcccataccctaggagtcctaagaagatttatagctgctttggtgtcacacgatgtgagtaggcctgcaccctatccataatggcagactcaagtatttggctgataagcctggactctggatttttgtctgtgtttatagctcatcctgtttgccagatgaggcagcaaggtgtgagggcgcagtttgaaagctggaaaaagactcagaagttagcacgatatcatcactgtaatggaaaatgtgtaccccttccaggacctccatggctatataaatatccctggggcaagatggtaaaagtctattgttcttcccaggtgaatgcaaattggtcttgactctctgcggcaatggggatgctgaagaaggcattggttaaatcaataacagagtggtagtggtatgtgtccagtgcctctcccrccctctttagaagggaggtgatattgggaacatgtgcatacrttggggggactgccttacttaattcccagtaatctagtgtcattgtccatgtcccatcaggcttccacatgggccgtacatggctgttgtatgggctgtgcactggccttgtaatgcctccytgggctaactccttaacaatccctgtggtttcattatgtccccccagcaggcagtattgcctcagtgctactacttgctgtgtggggttggcaactatactggtgtccatttcgcattccccttggtcacatgcttcaccactctcagtcagaactccccagcagttgtttggagggtcaagcctgataagatatccattctcaagatgtattccaagatgggagctatacatactaaatagggttttggtggcagtctctcaacttgtaatactcagacagttcaacctttctgatccccatccataaccatcttttgccattttagccccttggaaccaacgaatgtcaccatatatgaaagtgcatttggctctagtatccactagggcacgcacagtgtgtttattcttaggcgaccaatatatagttagttctacatgtggcctctggtccccaggtaccctggccaccattactcttatcagggttctggggccttggctttcatccagtctaacagggttgacacttgctatccctctgcaggaagggtggcgggctgaacctgaggctccttagtgaagcactcttctggtgtgagcttctgccacagtctgaccagaacagcattaggctgtttatctgttttcatagtagctgttcctgccactaccaggttgtgccacatttgttggtcagtcaccctgatgggccccttggccgtctcctttcctttggcgcccttgtctttcatcccagcagcacgtaccctttgcctatgcagtttctccatttctcataagttggtggctgcttgggccacctgagacactggctgtcctactagggggctctgggtagacactagcacaccataccattggttgagtgcagactaagatggtgtctttcatgttggcagtgaaaagctctttgttggaccttggtgatgttcagcatagatagcatgtttcatccctaatttccagatgatgtcctgcaattcctccatagtctgccatcacaaaggagatatggggatactgccctcatctggccacgcttcattgcagcccacaaccacccagctaaggaggggcatggcctgatcctcattgttggcaccatagaggtgctgcctcagggctgggtggcatgcgatgtatgccattccactcatcttgagtctggagagtataacaccctccatccccgtgtcccatagacagagaagccacctctcaatcaactgtctctcttcctgaacccaccttctgcccagctccactagttccatagtggtgtagtgctgcattgtggtatgctaccatctttcaggcagagacaagttttgtgggtctactccctgcaggcaccattggtctgactttatcttggtagagagaacaggacctctatgggcttatcccagtcctcactctgctcctcactagagctctccactgggtccctggacttaggaagatttagtcatatagtcctaacttggcatgggagctggcgacccttcaaacaggctacctgacaagctgggatttccattttgtcatcctgtttctgcaggtaggacagtagggtctctgatgttttaggttgagctagtctggcatctctttctactcatagttcttcctataacagacaacccctggcctgtgctgggagctcagcctcagtggctgctgggagcacagtcaagaatggccagccattgtggctgccacagctcaggcatctaacttttgcttagttagatccacccccctgcaacagctcttccagacccttcggtgtttttggggtgttctgtactcatacattgggtcccatccatcaaggatagtggcttttgggcaccacataaatgtgatggtcagcccgggacccccccttggatttcccctttcctgatcttacggtctcggtgctcatgaaatttttctccaccttcctgctgggttcaccagttgtggtactgagtccgtgttaacttctgtaaggatggcaccaggttcaagaggcaaaagagacctggagctagcaaacaagacatagggttttattagggagaactaacatacagggacagtccagtggtggtggactagacaggagaacctcaactgcttgcaaaaagcatgcagcttatatagcacttttatttggcaccctccgtgcagcagccttcacgtggcaaccctcctttcttaagttattgctctcaggtgcatttgccatacacccactcccaccgtaatggcattaatccattcctgaggattaatgttgttacggtctcatggcctaatcgcctcccagtggtcctacctcttaatacmataaaaatatcaattaaatttcaacatgagttgtggaagggacattcaaaccattgcagttattttagagctttagttcagaaatacaaatgcaataacttttacctccaaatcattgactcatagttgtctaatttagtaggctttgaagaccctgcctttagtctttttgaccttttatctggactgatatatgtagggaaagaggctcaagaaggaaaaacagttaggaaaagaaaacttggaagagatatttaggaatctttgaatatcttactgttggtggagaaaatcgtttttctttcattttatttgatcattaccacaatttctaggttataggaatcacagttgggagagactgcaggttatgtagactatcaaggcaaatacaaacattcttttggtacattttgctctaggactgggtctcactctgtctagtttctgtgaagctgcttctagcgtcacagggattagtgggcctggtcgtagaaatggattacctagggatcaaaaagcagaagtatcagtagatagctttgcttctttcattgcataaggtggtaatgaagagtctggattgctgtgtaggtgttgctctgtaggacttgccatgttcagcatgccttactagagactttttgactttctaatacattttatgcactctagaaggctctggaatttttgctgtccagaaatacactgtctgatgaaggaaagagatttgtaaacaactacaaatataatgataaactactcataaaaatgtaaaaatgtagtgacttctgtgaggaaagcaaatactgtggttaaatagaaaaaatgacatctaagaagaagcttagagtaggagttctacagtgagaaagtgagaaaaggaaaacattatttgattgaatcctcctaccaaccctgtgatagaagtatcagacagactcaagaaaggcctcagagcgagtatccagcagagctgggatttaaagccaaggtcatcttacttcaacttcatgctcttaattaaaactaataaaaggtggatcttgtttagaggggtataagactttataatttaattttagcgtatgatactaaggagagcatcagttgataaagtagaaaatatgcaggtgttgaactgatctattttcccctaatctagcaatgaatcagattatgaagagtagttttatttatgtatttatttattttgagatggagtcttgctctgtcgcccaggctggagtgcagtggcgtgatctcggctcactgcaagctccgcctatgaggagtagtttttaaaaagattagtgttctaattacagaatccagtagggaaaatatgtttggttttgtgtatactgtcccaaatactagtgtatgttgtattatgtagtatcattttcttaactttatatagcagaataaaatttgaaaacagtatgctggaatttttgcaagagaattttctaatgaggcagggtggtatagtgtagaataggttttgagagttggacagacttgcttttaaaatcaggcttgtgatcttagacaggttctatgccttatctgagcctcagttttctccatttgtaaattgaggagattggagtagatgatattttagtgtcataatgcattatgacattccctggacgtaagggagaacaagaaaaaaatggaagaaaaagaaggataggaagaattagaaaaaggaaagggagaaagaaggtaaagaaaaagccctaagcctcttcaggcctcatcggctattttcagtgctcttctcttttgtatctgtgtgaatgacttacacttatgtagttagggttttcccatggtgttcttagaaacagtgctataaagcagactaatgttggttgtgaagtgcactgcattttctcattggaacagttttataatttctgactaaagacagagtaaattaccagtttgattagtagtgtgacttagaaagctgaaacaattgggaaactataagcatttgaagtagtaggactatgttccaagtgctatagaataggcataagtgtatcccacttatcgaacataacagcagcattcctgtttactatgatgtgtgcattgagcatagggaaaaacattcattctgcatggtagatttgaactactctcttagctttaaataaaaagaattggacatttggtgttgcattccacctcaggttacagcagttattagggaataatttgagttgctctcagtcctttgaaataactgcctacacaagtttgaactcacatctgttttttgttgttgttgttgttgttaaacatgataagtttccttgggcaggtgcaagcagtcacaatcattacactgatcttagaattacccagaaagttagaataattgtttttttaaagagtcatggtaatatcttaatatttggaggcaatattaatgacttctggtatattataggtgctcaataagtatttgattagttgaagaataatttgagaaatatgtgtgaaatctaggagacataattattaccctatacacccttgataaaggaatagtgtttattaattttagagttgagcttagttttgtttgtaaacaccttgggaatcatctctttttttccactctttgttgccttcagaaatctctgctttgcgctgaggaaagaactctgaagtggttattcctgcctttataagtagcaatgagcaagttatatgttctgtgtaatcttcaaaaatgtaggacagtgaggctgctttaaataactggttttagtccatttttgccttcccactgacagatttccaagctttggctctgatacggcctttaactacatttgtttaaaacaagtgcttttcaggaggtgttttcattgttcaccagttgtgctatgtttaaatggagtgcttgtaaatggccactggcatatatgggtagttaaggcatcttgaccagattcgtgagtttgacactaagagactccatctccagatgtatttctgggtatgtaggttaaatctatctctttctattatttattcttccccacggaattcaggtttgtttcacatgtttttaattcaggaccaatcacttagagcaaagagtcttaaacattattatatgagaatcacctgtagaatttactaaactmggttactgaatccccctgacaagagtttctgattcagtaggtctgagctggtgcctgagaatgctaacaagttcccaggtgatgctaatgctggtgctaatgcggctgatctggagaccacactttgagagctattgacctatagggcattagttcctaaacctcattatgcatcaggctcacctgggaaactacacattcactcatgctcacagtcacattcccactcataattaagtgtttaagggagttaggaagctggaggcaggatctataatgttttccaagtgattttgaagcagccagtcttgcccttgtctgtgattggacatttgattcgctgatttaggcaagtggttctccaacctatgtaagaagcatttgtagagctcgtgaaaacacagttctggggtctatcctgctgattcctstaggtccagaaggtccaagtggggccccagatttgcatttctaacaagcttgcaggtatgtcattgctgctggtccaagaactgtactttgagaatcactgatctagggcaaccaactacccagtttttggagattctctaactgatttaaataactggattaaatttagggattgaaattctttgaccgtctctaatagtgttgttgcgtttcctcccagaagttttttgtgatagtaatgtgctcttccaaactatcatttaactttgccactcaagagaaaatgaatgtcttaagtttttcagttatgtataatggttccgaataaaactttaaaagtggcaaataattctgaaaaaaagtcacaagtaaaacagttaattaacaattcagaatacaagtaagagtacagacatgtgtatttcctagttaagattgtggacctgcatgtttgtgctttttatatgttgtgtctctgatgattttccctcttctggactgccgcatagtgaaggaagctctgtactttttaacaaaagttgtgcacgtatgtctagtaatggcatgaattgaagtgattcagaatttcttagaacatagtgagctatgcttcctgattgtttctgtaatctaaaggttattgtttgtaggatatgaatacaaaacctctgtagtgtttgtgtagattgtacatgccttttcagaggatagaaggtttacaatccatactttgtgagagtgataatgcgtcttttacagtgtgcttactctcaacatctctaatcttttattccaggttactaagtattttccatatcttttaactttgttcccataatgaatatgaaaattggaagcactacaataggaagtgttgctttcaacccttagatctcacattatctgagcagataacaacgtttggtgtttgtgattgggtgtgaagcttattttcaaaagttatattttctttataattaattttttagctagagtgtggtttgatatgtcgtgacttgtccaaagagctaatgttttgtagttcacctttttaaagcaaagagcagctgcattttgaaatgttttatctcaaatgggcaagttgtttacaagctagactctaacacatcctgacatttagtgtctgtgtttgtattcctgctgggattaggctgcctttctaattaattagttgcatagccttttattaattccctcaaaatttataatgttttaaattaacaacatagataagcatactgcattttttgggaaaacatgaaatrttaattatgtagcagtgacataagtttcgtaaactctgttgaatgttagaagatgcttacaacaatgttttccaaatatagggatttattataaacttatccttctaaggctgcctgtgccatttcaggagagtgaatataaatagatcttgatttcttcaagaagtggacttagtcattttgtttatggtgaaaggaagtatttgctttgcgtctctaagaattgtctttagcatccttgttaattacacatcatttcaacatgttcttaccaaattctcaggccttgataaggtagcataacagaacaggaagaattaaaactcatatttaaataattattttgttattacagcacttaaatctgtctagtagcaatacygaatctaataattgtaactttttctgagatggaaaattttatctcttgtccagtgttctgagatatttttagctcatttgtccctccacccccaactagcttactttaacagggatttatggagcatctgctatgtatgtaatagtccaactcttatgaaaggttctgtttctaatattttttactattttttcaattctgtcaacgttgttttctaagttagaattaaaatattgatactgtagaaatttgatattttaaaataaagtccagggaaataatgggacttattgcaaagcttatggtgagctctacattcagatgctatcattatactttatcagctgataaacattgagcaagctrttcaacctcttgggttttayatcctcaccagctaagtagggataacactatatggttttaagagttcttatgaggtttagtaatatagcctggcagcagtggtgatggtttatataggcccttgataagtgtcacttaatttctccttttcttctttagcctctggaaaattgatatttaaacattttctaaaaattgtattttacgtatatttatgcatttctctggtagaagcttgtttggattttggcaatttttctgatatgaagtgttcttgattatcctagtataaaagatagggaamtctggcagaatcctttgctttgctaaagtagtgattttcactgaatctgaatcagtaaaaatcttgccygtcagtaagaatatgcagactagagatatggcttgtttttgggtagcctccttgacagattttctttctttttgagacggagtcttacgctttttgcccaggccggagtgcagtggcgcagtcttggctcactgcaacctctgcctcctgggttcaaatgattctccttcctcagactcctgmgtagctgggattacaggcatgcactacaacgcctggctaatttttgtatttttaatagagacggggttccaccatgttgaccagtttggtcctgaattcctgacctcaagtgatctgctcacttcagcctcccaaagtgctgggattacaagcatgaaccactgttctggctgacagattttcttgctgaactttgggtcatcccagatgtgagttcgctgtaggcgtgtcatagagcaacagtagtaggaatacaagttaaattgatgtatatgtcatgataatcagtccaattcagtggtccccaacctttctggcaccagggaccggttttgtggaagacagtttttccatggacctggggtgagagggtggggatgatatccggatgaaactgttccacctcagatcatcaggcattagattctcataaggagcagacaacctatttccctcacgtgcacaattcacagtggagttcacactcctaggagaattaatgctactgctgatctgataggaggcggagctcaggtagtaatgcttgctcgcctgctgcccacctcctgctgtgaagcccagttcctaataggctagtaccagcccatgggccattggttggggacccctgctctaattaatgcattttacaagggacgtattattgtagctagataaataagcagtaattttgcagcatatttcataaggcaatgaattttctcctctgttttataattctaaaatgtagttatagaatgttatatttgtgatattgggatttgtcctactgtgtaaatattatggatattatatagagatggaattatttttatcagtgaagtgggtattttagtattacttttgctactcatttgagatgactggaactgaatggtttgtttcagaaaaagaggtggtagttttgattctgtttaagctctaaatgacatatactatttactttgctagtagaagattttctgggttgttttgccaagactataaaaatataaaacttgaggaaaggttttctttctaattaaaacaatcacaaaaataaaaccaggctatctaaataaaagttatttctgagagttattcttgattcttttttctcttactctttttttatctaatcctgtcagctctgttttcatacttattcagaatttgacctcttaaaaaaattaactactttcactgctataccacagttcacaccatcatcagctcttgtctggactattgaaataccttcttcctgcctactgtttctttttcacctctcatctatctttattttttacattgtctaacttggaagactttgaattataggttttgaagatgaggacaggtctaggttagagatatggacttgggagttgttagtagttaacatggtgaagctgtagaaagaatgaaatcactaacagaaggtgagtagagttccttcactcattgagccaggtactgcactagatggtggggctacctcaatgaataagatagacttgggctctctcctcatgaaactaagactcacagggaaatggaacagtatataagataagtacaatacagtgtgttgggtgttatgtgaatgatcagggtgcattcagaatgctaatacagtagaaaggtcttgggaaatactgtcattcaaaggttgggttgttaaaaaatatttggtataggaaactgaggagtggctagagagatgggaagagaacccaaagaagtggtgactcagatgaaatgaggtaagcactcagtgaggaaataatgggtattggttcacactcattgagtacttggattatgtcaaccactgtttgaagcaccttgtatgtactracacatttcttcctcacagcagctctctgaggttctctttattttgtagttgaggaaacttatgtcagattaaggaaatttcccaagatcacacaggtaataaatagtggaactaggatcaacagtgttgatcacagtagagaccacagttacataaagtgcttagttccctacttgggaggtcatgggagtgtggaagagagacattctagtggtgtcttgtgcctagctgctggattgcaataaattgaagggtgattgattgagagttgaagaagcagatatagtgattgtcaatttcttttttagttttgttgatgtattattattaatatttagagtttttatgctttccataaaagagggataaatatagttagtcctccctccttgtcatccctccctgtctccagtaaaaaccaaatctaactatatttctttattattttcctggttactcttctcttacctgggccctgacttagtctacccagctgtgaatcttcagcttctcttggcatacaaattgtactctaatcaccttttttcaaataacaaaaacaaaaacaaaactcagtattttagtaaggttgttaagccaggtaggtaaataatgaaatatgaaaaatttgaaaatggaaactgtatttagggcagtttgaaacctaggactggtgaagtgaattaatcttgatgttttacaactataggttggtgcaaaagtaattgcggctgggcatagtggctcacacctgtaatcccagcacttcgggaggctgaggcgggtggaccacttgaggtcaggagttcgagaccagtgtggccaacatggtgaaaccccgtctctactaaaaatgcaaaaattagccgggtgtggtggcacatgcctgtagtcccagctgcttgggaggctgaggcacaagaattgcttgaacccaggaggaggaagttgcagtcagccaaaatcatggcactgcacttcagcctgggcaacagagcaagactgtctcaaaaaaaaaaaaaaaagtaattgcaaaaactgcaactagaatagaataatcgactactctttcagagataatttagtacattcccttatttcacagatgaggagagactatgtgatacatttaaactcaagcagttagtgagaaataagccttggctcaaggttcagatctggagacaaatgtgccttccacagtgccattacctttaaaagcaacttttgaaagtgatagagggtttggaatagactggctcctttgatcagtttaagttacagcagtcacttataatataaataaggtgagaactacaataacctttaaggatattctatttgattttttaaaaatttatttattaatgggcagtgagaaatgaaactttcctagtggtacagcaagtgatacttagcaccttgtctatacttaatacagagttgagggagaataaagactccaaataaaacaaattttttagagttctgatattttgaggaaagtacattttaaaaaaaggagacttagatttttgttatacttgctttgttttcatatatgtgagtatatcattagcaaattttatgctcaacttttagaatttaaatatgagatccagatgtccaagttttatgttaccttttcatataattaagtttctgtaggcaggtagtaattctaaaagggattgttaacttctctgatcagtttaattttattgttagtttctaatgaaggagcttaattgtgatctcaaaaataacatataacttagcaagcactgagtataaaattgtaggattttataaacatggggacaagatgatgtttgttgtttgcatctggagcagatggttttgaagagcatgggtttagaataattgctcttgtccagaattggttatattgaaatattgatgtagagcttgaggtggagcaagtcatatacaagtcatacgttggaaacagtgtgttgacatttggctctctaaagcattttgccttttcttcccttcaaggtatcttgttttccagtcttaaaaattttaagagcactggaaaataaaataatgaaaagaagatgatacattttttgttgaattagccacacctcttttttatttcaaaattgtgtttcttaacatagcagtattgcttctgcatttgcttacatttttaaaaaattaactccaaagttagtgagaagaggaaatgttgatggcttactttcaaccatattccttgatgtacatgtgtccatttgttcttctagttaattgtcttcaggtttctaaaaatatatgtatttttaaaaatttaatctttcattatgggttccagtatggccttattagaaatggtgatggccaataatttaaacttagcatcatagaattttaagttatttaaatttgaataattagacaaaatacattttaatcttttcatttaataaatgaggtaactgatggccaaaagggctaagtcttatttaaagttgtgcctgagctagttaatggcagacctagagccatggaggattggttgcattagtattatagctccaaggatctttaatttctgtaagctcttgataatatatttaacatttaattcatacaaattctgtttttcaacttacatgttattttcaagaatagcatttgttgtgtaaaataggatacgtttatatagagtccagaatcaatacttcagagtgggaaagaatctgaaggcctgtggcaggggtctccaggatctctyacgtttttatagcttttgcaaatcagtaaacttacctattgttcttttctcctttctaacaatscaccatactttatatcctcacatacctacaaacgaagtaatagagttggatgtaggtttatttaaacatgttctttcatatgtataagactgaactctggagacttaggattttatcttttattattctatagggcctcctaatctctaaagygctatgctcattcttgtctctatttatatgctgttccccctgcttggaatagtcggctgcctctttggccccaattcccattttatcaggttaacatcgattcacttttcagggctaattacttgaacttagatatatgtttcagtttttcatttgtgaaataaaggaatgtactaaatgatttctgtgagagtcattaggtaaactaatccttcctgaaactgagttcgatgttcctgacgtgtttttgtgccactttgttctttccatgtcacagtacttggcatagtttataataactacgcgttatgatgtatctctcctattagactgttagctgtgagagattgatttgccttcttgtgtaccctcatatgtaagagctcagtacaattgtttaatgaagtaattatgtctaggaggttcttgttgaatattttgagtgaatagatgagttaatattgaaaagagtgcccatgaaagagtaactcctgtggtcaatgaatatatcttctcagtggctttatgatataataatactttaattgctttcctttaacatgaattgtaactgaattggcaagaaatacaagaacaggggttccattactgagaactatttttaaaaaatattttcaaaaccagttcggtgcagtggctcacacctgcaatcctagcactttgggaggccaggccaggagaataatttgaggccaggagtttgagaccagcctgggcaatgtagcaagactctgtctctaagagaaataaaattagccggtggtggtagtgtgtgtctgtagtcctagctacttgggaggctgaagtgggaggattgcttgagtctaggagttgaggctgcagtcagctatgattgtaccactgcactccagcctgggtaatagagcaagaccttgtctcttaaaaaaaaaatcagagtaacggcatgtaaaaaatgctgttctctctcctcaagttttgtttttcttctttagtcaccctgcctttcataccaaccatattcgtttgtataaaatattctggcaaatcaaaactctttgtgaatactttaaatcatataatctatattttgtattctagtatattttgcacactagtcagcttataaatatgtcctgcaatgattctgagcctgatcaggatttctgtatagaaaattcccaaaactgtttttattatttttttaaagaggtagggtcttgcagtattgccgagactggtcttaaactcgtggcctcaagtgatcctcccaccttggcctcctgaagtgctgggattataggtgtgagtcactgcattcagccccaaaaccttttttatggatttattttcctagatcatcatgtttttaattattctgattagaaagtactctaaataaagatattttcctgttttagtaataaaatattaaggaataaacttcattgtatatgtacatatggatacttagaactgagttttttcattttattaaaatttttttaaattaatagactttttttagagcagttttaggtttacagaagaataaagcagaaagtacagataatttccatgtaacttcccttttttccagcttctcccattattactgtcttgagttagtgtggtacctttgttataattgatgagctaatattgatacaatgatatttcattttaaactgcagtttataatttctaaaactaccatccctcaatgttatttaaaccagctctgtgttgttgctttatttatagtttttttttacttgcgccacactttttacatacttttttaaaataaacttctttctcaatgtattgcatgtatacataagagagcataagctaaaatatccatgtgttttccaaagtgaacacacttgtgtaaccaccactcagatcaagatacagagcattactagcttcctggtacctctctcagaccctttcccagccctacatgctcacctcaacccaaaaggcaaccactctcctggcttcgaatgccatagatcagttttgcctgttttgccttctcttctttcacttgttttatggtttgggagcttcatcattttattctgcatagcaggagttcatttttattgctgaattygattgtttaagtattatgagtaatgccatgaacattcttgcacatgccttttgctgcacaaatgtatgcatttctgtctattatttgtctaagagtggaattattgggttataggattcttgttactaaatactgccaaaacgtttttgtagtgattttaccaatttacctttctacctgttgtgcgtgaaaattccagtttcttctcgtgggtgctgacatggagtttatagcagtatttcattgtggttttagttccctgatgactgagtctgagtactttttatatttgaattgaccatttagatgtctttctttgtgatgtgcctgtcaagtatctattcaatttttctgtagggttactttttaaaaatatattgatttgtggaagttattaatatagcttagttgtgagacctttgttagatatatgtattttaaatatcttctactctgtggcttacatttttattctctgtagtatctttttgaggaacagaaagtttataattatatatttattataatatatattgatataaaggatccagttcatcagtcttttycttcgtggctggtgatttttgtagctagcttaagaaatctyggtcaaatctactgttaggtatattttctcttaccttcttgatgcttttattgtttttcctttcatgttgctatctttaattgcttcactttttttcatatagatgtgttataccagttattgaaatgaccatcaatttctgccttgcttctgtgttacctttgttgtacataaatcaagggtttgtgttcattttagattctctgctctgcctcaatggtcttttatccttgtccacaatactgaaatgtcttcaatactttcagccttataaaaagtcataatttctggagggtaagtgatatttttttaaaaaaatggtcatcaaaattttcttgactattgttggcactttgcattcccatagaagttttaaaatcaatgtgtcgggttcttccttctccccacmcagtaaactggcttgcattttgattggaattattaagtctttcaatcaatttggagagatttgggaagttaataccttgtaatccatgaacttcttagattccttcattttattttagattttccttaatttccctccaggtagtttggtagttttatgtgaaaagtcttgcatactgttaattagatttattcttaggtactttggttttttgaatgcacttatgaatggcattttgtaaagtttcacttgtaattattttatgttagtatagtcacggactgcataacgatgttttagtcaaggatgaatggtatatactacagtggctctgtaagattataatggacctgaaaaattcctatcatccagtgacatcataaccattgtaaagtagtagtgtaattagtattattatttttaaatttggtgtagcctaagtggatagtgtttacagtagagtatagtaatgtcctgggccttcacatttgctcagcacatactcactgacttacccagagcaacttccagtcctataagcctcattcatggtaagtgcccacacaggtataacattttttaatcttttatactatatttttactgtaccttttctttttctatgtttagatacacaaatacttaccattgtgttatagttacctatggtactgagtatagtaacatgccttacaggtttgtagccttgctgtatagtaggccataccatctagattttcataagtagactctttgatgtttgcacaatgataaratcacataaagacacatctctcagaatgtatccctgtcattaagcaatgcatggctgtatctagaaaaagtaaaaaaaaaatttttttttttttttgagacggaatctcactttgtcacccaggctggagtgcagtggcacgatctttgtaaatcttttatactgtatttttactgtaccttttctttttctatgtttaggtatacaaataccattgtgttacggttacctacagtattgagtatagtaacttgctgcacaggtttgtagcttagaagcaataggctataccatatagcctagatgtatagtaggccataccatctagatttgtataagtatactctataatgtttgcacaatgacaaaatcgcataaagacacatctcttagaacgtatccctgtcattaagcaacgcatgtctgtatctagaagaagtaaaaaaaaatttttttttgagacggagtcttgctttgtcacccaggctggagtgcagtggcactatctcagctcactgcaacctctgcctcccgggttcaagcaattcttgtgcctcagcctcccaagtagcttagtagrgacagggtttcactatgttggcaaggctggtcatgaactcctgacctcaagtgatccacttgctttggcctcccaatagaaaaagtaattttttttgtattgactgtgtctacctaccttgccaaatgcacttattaattttaatagtgtgggccaggcacagtggcttatacctataactccagcacattgggaggccaaggtgggaggatcccttaagcccaggagcttgagacgagcctgggcaacatagtgggacaccatctctacagaaaatttacagaatagctgagcgtggtggtatgcacctgtagtcccagctacttgtgaggctgaggtaggaggattacttgagtgtgggaggttgaggctataatgagctgagattgcaccactacactccagactgggtgacagagtgagaccctgtctcaaaaaaaccacaaaaaacaaaattttagtagtgtgtatgtaagttcttttgagttttttatctatcaattatgttatagttttctatgtatacatttcaaataatgagttttaaattttattttgttcaactctacacctattctttgtcttccttgacttactatactacataggacctctgacagtatttaatagaagtggtaacaatagtaatccttatctcattcttgatttaatagaaagtttacaaactgttacttaatattaagaattttttttgttgtatgcgtgataaggaggtttgtatctattcctagcttttaaaaaaatataattaatgatattttatcacatttctacatttattgagatagtcatatgaactctttattctattaatgggaagaatgatgttgattgatttttaaatgttacatgaatctggcattcctgtaatagagccaagttgtcacaattttgtaattctttttaatgtattgatcttttggctgatgttttgtttaagatatttgcacctatgttcatgagagattgacctgtaattttttttccttgtaatgtccctttaagatttgaggagcaagattatgctacccttgtgaatcaagttgggaattattttttctctggaacaattttttaaaaattaatgtcatattcatccttaagtatttggtgacatttatcagtgaagccatctgtacttagaattttctctgtaggaaaggttttaattatagatttaatttctttaatatctattgaaatattcaaattgtatagtttgtttgtatattagttttggtaaatttttttcccctagaaacttgttcattttatctacatttcaaattatttggcataaagttattcctactatcctcttatctttttaatggcagtaggttttgtaatgatgtctgctttttcattcctagtattggaaatgtgtctcttctctcattttcagacaaccaacctttggctttactggttactttttttaattgtgcatttgttttcttcattatttccctccttcttttttcttttaggtttaatttcttctttttctaatttcttaagatgaatgcctcactgactgtcagtctttttttttttttatctacattaagcctaccagtgtccccttcagtactgcagtagcagcatcctacagattttcatattatatttgtattattattcagttgaaaaaattcagttttcattgtgattttttttgagccatgagttatttagaaatgaattaactgattttcaaatatttgtgtatttcttagcatttttttgttactgattttgttattcattctcctgaggtcagagaactatactttatgatttcaatccttgagttacatggagagttgctttgtgtcctagcatagggtcagttttggtagatattccaggtatgctggaaaacagagttattttattattttgatgttgttttttaatatataccaattaggataagtgagttaactttgtttttcgtatcttctggtatcttctatatattctttttaaaaattttggctaataagggaagtatgttaaaacctgcaggcaaggtctgtttctccatttagttctgtttacttttgttttatgtattttgaattttgttatcaggcatgtattaatttagaattttgtatattcttggtgaattgacccttttattaccccgagtgtctggtgatgcctcttacttaatgcctatttgatagtagatataggtgcrctgttatccttccatgtatatttcattctgtgtatatttgcatagtattccttttattcttttactttcaacctttgtatattcttatatttcagatacatcacttgtatgcagggtaaattggggttttatttttttaatccatctgctgttgtcattgtttaaattcaagtacttaatacatttatatttagggtaatatcttaaaatacttaggtttaatgtasttccttatttgccccacttgtatgttttttttcctgttttttttttcattcttttggaataggcaagtatttttattatttcatcctcttcccattgtctttttagttaaacattttaacttggcctttagtgaatatcctatgtttgtctccttggcttattaggggctagtatgcattgcaaacattgcaacagatgtttacttattatttgggtacattaagttgtgctatgtttattacaraatcagtctttgtactttacttttttggagacagggtctcacctgtcacccaagtttagtgactgagtgcagcagcatgatgatggctcactgcggtcttgacttcctgggctcaaacagtcattgcgtgtagctaggactataggcacatgccacgaagcctggctaatttttgaaatttttttagagatgaagacacacagtgttgcccaggctagtctcggactcctggatgcaagctctccgcccgtctcagcctcccaaagtgttgggattacaagtgtgagccaccgtgcccaacttgtactttactattttttaacttttgaaaaattccatgtttctcttgcctttgttttcctcctgtgagttactattttctttctatgttcagaggagtggagattttatccagcttaaattctgtagtttgtattagaaataatagagattttgttattttataaatatgtttatattataatattaaatatacttttaaaaaccacatattgcctgtgttttctagaccccttccttaaatgaaaataatgtatcatttagtgtcagattttatgtttgcatgatattaaaaaaaagtggcaggaaaattactagaccattttccctgtttcagtttttctgtctcagtagggtgatgtatctggtccaaattagaaatattggcaagtattgccagatactatctggcattgaagtattttgattacatccatttatgttagatattttaggaacagcttaaattttcccaggccacaaggtactgtttgatacaacatggcactgcatagatactcctcaacttatgatggggttatgtcctgaaaaaactagtgagtcaaaatatgtgtgtggctgacttggaactgtagcttgctgtggctgcccagcgttgcaagaaaattactgaattcatattgcttttgtaccattgtaaagtggaaaactcttttttttttgagacggagttttgctattattgcccaggctggagtgcaatggtgcgatctcggctcaccgcagcctctgcctcctgggttcaagcgattctcctgcctcagcctcccaagcagctaggattacaggcatgcaccaccacacccggctaattttgtatttttagtagagacgtggtttctccatgttggtcaggctggtctcgaactcttgatctcaggtgatccgcttgccttggcctccyaaagtggtgggattacaggcatgagccaccacacctggccataaagttgaaaagtcttaagttgaatcctaagtcagggactgtctttatcactgaatattttttaatgcttctgctccatttaactaatgaggatgtcgagtagtaaatcgacccaatttatcatcgtcttagtccagtttctgctgctataacaaaataccacatacttggtaatttacaaagaacagaaatttatttctcacagttctggaggctggaaagtccaagatcaaggtgctggcaggtttgggctcagtctctttgcatccaagatggtgccttgaatgccatattctctaaaggrgaggaacgttgtgtcctcacatagcagaagggtaagaaaaagggcaagcctttcttatagctgtattaatccattcatgaggctggagacacctctcattaggcctcacctcccatcagtgtgtcattagggattaagttttaacatgagttttggaggagacaaaaacattcataccatagcaaacataaacatgtcaagaattgtaaagggtctgagattttactctacttttactctattctaacaaattttgtgagtggctgcagaagagtcaaaggaaagaatattgcagcaacataattagctagagtagcagcatttgcaccagttcctgagcctcagttttcacggagtgatacagagggctacctgacacctgagcctttataggcttgcatcacagtaggggagccttgaattgtagaacctgaatcttttataatggacagtaagcatgtctatcctttgctttggagagagacactttcttttcctgcataccaacatcctttaaaagatagtcttgaacagaggcagtcagtgattttactctcaagcagaagtgcaagagatgtgaagaaccatctttcagcattttggaaggcagataaagcaagtgggtatttgtaagatgtcctaaagaagtgacttgctgtctttaggaagcaggggatctatttttggwgtatgtttgtactattcactgctttttcttggtagagaaagatactcaaccctctgttttgtggagttttgtatcttctttttattaatgcttctgtttatatataaaagttcaaataagtgaaaacaaaatgatggagtggtatcattttaatttagtaaaaatgtattgaggtatagtgttttgaacaagaaaggttaaaaaatcatgggagctagctggtgttccaggataactttagatattcagactggatttctgagagatctctgagattaaactccttcaaagtggaattttattaaacactcttaacacaaagagcatatagtgacttactgtcttctagactaaaggtcgtcacagatcaaagggctctaaatctcacagcctgatggagaggacattcactcttgtcaatgtttaaatttcaagcaaatagcaaagacaaagaacttagtatctaacttctcaagtcagcatggtatctttgaatttattttggatctctctaaatttgactttgttgactatcttcctggctgctttagtaccttttattctacgtcatcctagtttttctttcccttttaaaacatcgtttctttttatgctattcaattgatgggctttcctaagattgagccttctacacttattcctccatccctgacccctcactagcctccccttttagatctctcccttgctataatatcaaatcttacatgtatgcacatcactctgaagtttgcttcactcttgtatttcaaaatcacatttccaactgccacctgaatgtttgcttgcaggtgttttcccagtaccttaaaactttgtaattctagtttgaatgtatttaccaaaagggcaggggcaaaagcatgttttaattttaatattttactcttttaaaagaagttccccaaacaaattattttgataaatctttttggctttttttatggatgttgttttgtaaattctattttatatttgtaaataatgctttctcatattaagtatttgtcatattttcattgccaaaactaagtgcttggatttttacatttattcttcacattcttccacctctcttccaacctctcatcccctcccctacaaggacaaaatgttttaaatgctgtaatcttgcatggggtttgggttttttaatatttttattggtgataattctgtcacaggatccttagggtgtcacttttccagccagaaacctctgtggccggtggcacctctgcccgagttatatcctcgggcccactgggcttgttctgcccacttggtccagcaggctgtacttggcttgtgctattgacctggatcctacacctgccaagggtgagccaggcgcagagcagtgaagggggtgtgagtgagcccgaggtccggccactgcacacagccaggcatgctggctgcagtggagtggacagccccaggtgcaggcacaggcaccggctctgtgtgaggatgtggctggaccaggcataccacaagtgttttccaccgtgggcaccaggtaacgtggtggtacctggaagcttggagatgttggaaacagcagagccccaaagagagtgtcacagctctggtatcacagctctgatcacagcccttgcatctgggctccccagagggccacagctcctcttcttctcattgcccaaaatgtggtgaccagtgggcgtgtttcagtcctgtttgtgttacagctctttcagtcctgccatttggaaggtyctgagttcttgtscagcctttaggaagaatgaggtatgtggacagctggagggtgagcaaggcagagaggagcttcattgagcaagagaacagctctcaggagacctgaagtgggtaggtccttctgccatcaggtcgtcctgatgagcgtccagctctcagcagagaggatacctggagggggtagctgctgtccacaggcaggccatcctcacaaatgtctagctttccgcagagaggacacctggagtgggtagctcctttctgcaggtaggtcatcctgatgagtgtcctgctgtcagtggagaggagacccagagtgggtagcttctttctgtaggcaggttgtcccagtgcatgtccagctctcagtggagaggagaccagaatgggtagctcctatctggcatcccagctagtgtccagttctcagcggagaggagacccagagtgagtagctcctgtcctcaagctggtcagcctgatgagtgtccagctctcagcagagaggagacctggagtgggtggctcctttctgcaggcaggttgccccaacgagtgtctacttctcagcggagaggagacccggagtgggtagctcctttccataggcagggtgtcccagtgaatgtcctgctcttagtggtgaggagacccagggtgggtagctccttctcacagctggtagtcctgacatcccagtgagtctggctgagtcgggtttttatgggcttcagaagggaggaagtgcatgctgattggtccatgggtggccatgggcaggcccagaaaaagcaccataagttcttggtctcagctgcagactctacccagctctgacagcctgccctccatgcttcaggctgtccctggcttaaaggtggggcttcaccagggactcactcctttctgcccaggagcctctctgcctcctgctgccatcaatcatgtcgtccatggtgctggggctgttcatgctgaggggcgcttgcaggactgcgccaagacaccctcagcctccctcacatactcattggcacccaaagtctggaggggaccaaggtggaagggagctggactgtcagtgccaccttgagcacatgaacacctaggtgggtcatgacagtggcttggctcagccttaactttggtctgaaatcagagcaggcaaaaagtttttctgggactggggagaggccaggcagtagaagcaggcacttcggagcctgttggggcagggggtgcttcctgggttctcgagagtggagggatacctgggtccacagccatggctgggcagctgcagctgtgcctgggtgagtggggctcacaccccaccaacttggaaaagagcagggctcctgcctgttcccagctcccactggcttcgtggagtatgcagccctggccacgcctcccccactgcagccagtgtcttcactgttgccactccagatgggccaccggagccatcaattcagtctgtatttatgaaggaaaagacaaatcttgtgttactttcctctctttataggtctctgtgccttgcggagaatcctgaaaaaacagcctaacctccctgatgtcaaggtggctggactggtgaagattactctgaaggatttcttgcaggcaatgaatgatatcagacccagtgccatgagggaaatagcaattgatgtcccaaatgtaagtcatttatgtcccacactagctacactgtttgaattaaactctgaaaaaaatttagagttcagggagactgacttcctaggctaaactttaaaaaaatatttttcttaattgaaagttttattgagatagctgtaaattcagtgcagttatacgaagtaatgtagggagattctgtgtatcctatacccagtttcctccagtggcaacattttgcaaaactgaagtacaggctgggtgcagtggctcatggctgcaatcccagcactttgggaggctgaggtgggcggatcacttgagcccaggagtttgagaccagcctggttaacatggtaaaaccccatctctacaaaaagtacaaattagttgagtgtggtggtgtacacctgtagtcccagctacagctgaggtgggaggatcatctgagccctggggaatgttgaggctgcagtgagccatggttgtgccactgcacttcagcctgggtgacagagcgagaccctgtctcaaaaacaaaaaacaaaacacccaaaaaactatattacaatactaaaaccaggatacccctattgatacaatccattgatcttactcatattttttcagttttacttgtgtgtatgtgtttatttagttttatacaattttatctcatgaaaaggtttgcgtattcatcacagatactaagtaattccatcaccacaaagatccctcatgttgtcttttataatcacacccacctcattcctcccctcatttctaaatttttatttcagaacctttatataaatggaatcatactgtatacaaccttttggaattagcttttttcacatatgagtaagatcttttgtctttctgtgtaccttaacttatttcagtaggcataatgttccccagattcatccatgttattataaatgacagtattttcttctttttataaggccaaataatattccattatgccacatttctttgtaccattataccacattttctttctctgttcatctgttgagggacacttagattgattccctatcttggatgttgtgaataatgctgtagtgaacatgagagtgcagatatcgctttgagatacttcatttccttttgatatgtacccagtagtaggattgctgaatcttttggtaacttaatattttgaggaaccaccataccatttttccataatgtctgtaccactttacattcccaccaacagtgtacaagggtttctttttctccatatccttggcaacacttatctttcatctttttggtaatggccttcctaacagatgtgaggtgatatctcattatagttttgatttgtattaccctgatgattagtggtattgaacatattttcatataccagttagccatttgtacgtcttcttttaacaaatgttactcagatcctttgcccatttttaatcagattgtttgtttttttttgcttttgagttgtttgagtttcttaatatatattttagtattttggatagcagccccttacctcatatatggttcacacatattttctcccattccataggttgtctctttactctgtttcctttgctgtgcagaactttctggtttgatgcagtcctgtttgtcagtttttgtttttcttgcctctgcttttggagtgtatccaaaaattcattgccctggacccatgccataaggcttttccttatgttttcttctagtagttttacagttctagatattatgtttaaatatttaatccattttgaactgattttttgtatgtggtgtgagaagactggccagtttcatgtgtggacatacagtttatcatatggatatcatgtggatatacagttttcctgacaccattttttaaagagattgtgctttcgtcattgcgtgttcttcggtacctttgtagatcaattgactgtacatgcgtggatttatttctgggctctctatttgtttcatttatttatatgtctgtttttatgccagtatattgctgtcttgattatcatagctttgtagtatattttgaaatcagatagtgtgatgcctacagcttttttttttttttttgcttgagattactttgactatatggtgacttttatgtttccttatgaattttagggttgcttttcatattttagagaaaaatgccattggaattttggtagtggttacattaaatctgtagacaattttgggtagtatgaatattttaatagtgttaatttttaaaattcatgaacattagacattattctatgtatttgtgtcttctatttcatcagtattttatagttttcagtgtacaggtctttcaccgtcttggttaagttttttcggtatatttaaaaaatactattgtaaatgggattttctttttttaattttttggatagttgttagagtatagaaatgctactgacttttgttgtcgattttgtatcctgccaatttactgaattcatttattggttttaatcttttttttttggtggaatatttagggtttcctttatataagattatgtcatctgcaaacagacaatttttttcttctttttcaattcggatgctttttatttctttttcttgcctaatttccctggctatgactttcagtactatattaaatagaagttgcgagagtgagcattttgtcttgctcttcatcgtagaggaaaagtttttagcttttcattgttgggtatgatgttagccgtgagcttgtcatacatatagcgttatgatgttgagatacattctgtctaatgtattgagagtgtttatcatgaaaggatgttgaattttgtcaaatgctttttctgtatctattgatatgattttatgatttttattcttcgtccttttaaggtggcgtatcatgtttattgatttgcatatgttgaaccagcagccttgcatcctagggatgaatctcattggatcatggtgtatgatccttttaatgtgctattgaatttggtttgcaaatattttgttgagaatatttccatctatgttcaccaaggatattggcctgtaattttctattcttacagcattcttgtatcacattaatgctggcctcataaagtgagtttggaagtgttccttcctcttcagtttattggaagttttgtgaattctactaagaatttaaagaagtgatgctaatgcttgagaagcataacttctcgggtcttggagttttctttgttagggagctttttgattattggtttattcccctcactcattattggcctgttcagattttctttatgattcatttttggtaggttgtatgtttctgggaatttctttctttcttcttggttggccaaattgttgccatgtaattgttcatattagtctcttatgattgtatttttgtggtatcaattgtagtgtctcctgtttcatttctcagtttatttactttaatcttcttcttttttttttttttttttttttgagacggagtctcgctctgttacccaggctggagtgcaatggcaccatcttggctcackgcaacctccgcctcctgggttcaagtgattctcctgcctcaacctcctgagtagctgggattacaggcacccgccacaacgcccagctaatttttgtatttttagtagagacggggtttcaccatgttggtcaggctggtctcaaactcctgacctcatgatccgcccacctcagcctcccaaagtgctaggattacaggtgtgagcaccrcgcccagcctactttaatcttctttcttttttttatagtagtctaggcaaagatttgtcaattttgcttatcttttgaaaaaacaactaatgttgatctttttatattcttacattgatcttttaaattatttttctagtctccatttcatttatttctgctctgatctttagtatttccttccttctgctaactctgaacttattttgttctttttctatttctttgttgtgtaaaattaggttgttcatttgagatatttcttttttcttaatataggtatttattgctataaactttcctcatagaactacttttgctgtatcaaagttttggtatgttgtgtttctatttccatttgtcttaagacttttttttatttttcttttgatttcatctttgacccattgattgttcaggagtatgttgtttaatttccagatatttgtggattttccaatttttttttcctgttattcttttctggtttgtatgattatggacagaaaagatacgtgatatgattttagtcttcttaaactttttagacttgttttgtggtctaagatatgatctatccttcagaatgtgtcatgtgcacttgaaaagaatatgtatttgagagccccatagatggttcacatcacaggactctgtacrgacaacccccagtaccaacccagagctgggtagacttgctgggtggctagacctagaagacagacaacaatcactgcagttaggctcacaggaagacacatccataggaaaagtggggagagtactacatcaacggaatatcccatgggacaaagggattcgaacaacaaccttcagccctagaccttcttctgacagagcctacccaatgagaaagagccagaaaaccaaccctggtaacatgccaaaacaaggctcttcaacacccctcaaaaatcacactagggatgtgtttccatttgtgtcgtgtatttctttcagttgtgttttgtagttttccttgtagaggtctttcgactccttggttaggtgtattcctaagtatttttttttgcagctattgtaaaagggttgagttattgatttgatactctgcttggttgctgttggtgtatagaaagctactgatttgtatacattagtcttgtatctggaaactttgctgaatgctttcaacagttctaggagctttactcctaaggaggagtccttagggttttcaaggtaaatgatcatatcgtcagcagtgacagtttttcctctttactgatttggatgcctttcatttctttctattgtctgattgctctggctaggacttccaatactatgatgaagaggagtggtgagagtgagcatccttgtcttgttccagttctcagaggaatgttttcaacttttcccccattcagtattacattggctgtgggtttgtcatagatggcttttattacattaaggtatgtcccatgtataccagttttgctgacagttttaatcataaagggatgctgaattttgttgagtactttttctgcatctgttgagatgattgtgtgattgtgtttttaattctgtttatgtggtgtatcacatttattgacttgcatatgttaaaccatccctgcatccctggtatgaaacccacttgatcatkgtggattatctttttagtatgttgttggatttggttagctagtagttttttaagtaaggattttagcatcagtgttcatcaaggatattggtctgtagttttctttttttggttatatccttttctggttttggtagtagggtgatgctggcttcataaaatgacttagggagggttccttctttctctgtcttgtggagtagtgtcaaaaggattgaaggattggtaccagttcttctttgaatgtctagtagaattccgctgtgaatccatctagtcttggacttctttttgttggaaaattttttttttcttttttttttttttgagacggagtagttttgctcttgttgaccagactggagtgcaatggtgcaatctcggctcatcgcaacctctgcctctcagattcaagcgattctcctccctcagcctcccaagtagctgggtgggattataagcatgtgccatcacgcctggctaatttcgtatttttagtagagatggggtttctccatgttggtcaggcttgtctctaactcttgacctcaagtgatccaccggcctcggcctctgaatgtgctgggattataggtgtgagccaccgtgcctggctggtaatttttaaattaccatttcaatctcactggttgttattggtctgttcagggtactaattcttcctgatttaagctaggagggttgtatttttccaggaatttattcatctcttctaggttttctaatttatgtgcatacaggtgttcatagtagccttgaatgatcttttgtatttcagtggtatcagttgtaatatctcctgttttgtttcttagtgaggttatttagattttctctcttcttttcttggttaatctttctaattgtctattttatcttttcaaagaatcagctttttgtttcatttatcttttgtatttttttttttcaattttatttctttctgctctgatcttggtaatttcctttcttctgcttggtttggggttcggtttgttcttgtttctctaattccttgaggtgtgaccttagaatgtcagtttgtgctctttcagaccttccaatgtaggtgctttgggctatgaactttcctcttagcactgcctttgctgtatcccagaggttttgatagactgtatcattattgtcattcagttcgaagaattttttaattttcatcttgattttgtttttgacccagcgctcattcaggagcaggttatttaattttcatgtatttgcatggttctgaaggttccttttggagtcggtttccaattttgtcccatggtggtctgagagagtgcttgatataatttcaattttcttaaatttattgaggctcgttttatggcctatcacgtggtctgttttggagaaagttccatgtgctgttgaatagaaggtgtattctgcaattgttggatgaaatgttctgtgtatatcagttaagtccatttgttccaaggtatagttgaaatccatggtttctttgttgactttccgtcttgatgacctgtctagtgctgtcagtggagtactgaagtcccgtactattattgtgttgctgtctatctcatttcttaggtctcttagtaattgttttatacatttgggaactccaatgttaggtgcatattattctaagtgaagtaactcaggaatggaaaaacaaacatcatatgttctcactgatatgtgggagctaaggtatgaggacacaaagtcataagaatataatggacttcagggacttggcgggaagaatgggaggggggtgagggataaaagactacaaataaggtgcagtgtacactgctcgggtgatgactgcaccaaaatgtcacaaatcaccactaaggaacttactcatgtaaccaaataccacctgtacccccaataacttgtggaaaaattaaaaatactaataattaaaaaaagagaaaataacgtgtattctgcggccattggttgtagtgttctgtatatgtctgttaggtccatttagtctatagtgctcttcaagtctgctgtttccttattgattttctatcttgatgatttgccattgttgaaagtgggttattgaagtctcttactgttcctgtatagctgtatgttactcccttcggttcttttaaaattttctttatgtatttagatgctccagtgttcagtgcatatatatttacaatcactatatccagttaatgaattgactcttatcattatatgatgaccttgtctttttttgacagtttttgacttagtctattttgtctaatataagtatagccacccctgctctattttgattgctatttgcatgaaaattgctatgaaatagcatgattgctatttatgcaaatagcaatcaaaatagagctgaagactctattttgaaagtcttcagactctttaagaacacatatagaatactttcacttcagctttaacaatgcatatagaatactttaaattaaaatctttaaattagagtctcttatgggtagcataattttkaatcttgttgtttaatccattcagccactctgtcttttgactggagaatttaatgttccatttgaagtaattattgataggtaagggcttactagagctattttattgttttctgttttgtagtacctttgttcctttcttcttctcttgctgtcttcctttgtgatgtgattttttttttttagtgatattctttgattcttttctctttatcctttgtgtatctattacatgatttttctttgtgattactctgaggcttacataaaacaccttctagttgaaacagtctattttaagctgttaataacttaacattggtcccacacacagactctactctttaatttctcctgcccccatattttatgttactgatgtcacgttttgcatcttttatatgttgtgtatcccctaacaaattattgtggctattgctatttgtaatttttttttaacttttacacttgtagctaaaaatgatttatgtgctagtactatactattacagtattctgggtttgtattcttacctttacagggggttttgtactttcatatgctttcatattagttagcatcctttcattttaacttgatgaactggctctagtggtgctgaatacccacatttttatttggttatgtctttattgctctcttattttttaaggccagccttttctggtatagtattctttgttggcagttttttttttccctttttcttttagcactttcaatatatcatcttactctctcctggcccgcaatggattgtctgagaaatctggtcgtagtctgatgatggtttccttatttgtaatgagttgcttttttcttgctgctttcaaaatttgttgacttttgagaatatgattataacatatcttggtgaagctctctttgttttaatctatttggagttctttaggctttatggatttagatttgaatccataaagcctaaagaactccaaatacactaaaacaaattatattcatttccctctccagatttgggaaattttctgtcattctttcttttttttttttttttgagacagaatctcactctgtcaccaggctggagggtagtagtgtgatcttggctcactgcaacctctgactccctggttcaagggattctcctgcctcagcctcctgagtagctggcattacaggcacacgccaccacaccaagctaatttctgtatttttagtagagacggagtttcatatgtggccaggatggtcttgatttcctgacctcgtgatccacccgcctcagcctcctaaagtgctggggttacaggcctgagccaccgtgcccagcccattatttctttaagtaaattttctgcccctttctctgcttcttctgggtctgttgtaatgtgtacactggttcgcttaatgttgcgttctaagtccctgttaggcttttttcactcttcattcttttttctttttgtttttgtgacaagataatttcagaagatctgtgtttgagtttgctgattcttctgttgtattgtctgctgttgaagttttccattgaatatttaattcactcattgaattcttcagttccagaatttctgtttggttcttttttatactctctatctctttcttgaattcttcatttttttcatgcattgttttcctggattcatgttatttgaattctcttgtagctaagatgattattttttatacttatctggcagtttatgtatcatcagtcgtttagtgtctgctactggtgcttaattttgttcctttggtgtcctgtttctctaattattagtgatttttgtggacttgtgttattgtctgtgcatgtgaaaaagtaaacaacacttcttgtctttacagattggtttctgtagggaaagcccttcactagtcagcttgtctagtagttcttggtaggctgtcttgctgctggagtccttgggtatcttggtttgttgtctgggtcagcaggtggatggtcttggtgtctaggtccaaggagggcagtcttagtgctgggatggggctggagcctgaggccacagggacagttctggagcctctgtccactggggctgacctggagcctgtgtctatgggggtgatcctgaaggctgagttcatggatgccacctggcactgaggtgggccttgaattcaggaccatagtggtgggtctagagcctgagaccagcctgggtctacagwggctggttcggaatttggggctgcaggtccaagcctggctcttgtgtaggcctagagcctaagtctgcagggatccatcctgggctgtgggggctgaycttgggctgggatagggcaagtactggaatctgtggggagagctggatgcttatgtcatccttcttccatgtggacagtatttctctccacattgtgctgccagaggttgggggtgggatgaagcatttagtgagaaactttacttcctagattcttcaatgcatgttttcttatttatttattattttttgagacgaaatctctctttgttgcccaggctagagtgcagtggtgcgacacggctcactgcagcttcagtctcctgagtttagttgatcctcccacctcagtcacctgaatagctaggactacaggtgtacgccaccacacccagctaattttttgttttactttattttttgtagacgtgggttttctctgtgttgcccagagtagtcatgaattcctaggctcaagcagtcttctcacctgggcatcccaaattgccgggattacagatgtgagctactgtgcctggcctgtttccttatttttgttctccacccaggtactctaatctctcacttggattccttagctgttgtgaaggtattttcaagtgtgggcaattgttcaagctgatatttctgtgaggaaagagcagtagaaaactcctattctgccacctttccatcatcagtttcatcacagttgtactctttcttgcaaaaactctaccattagaattatttgaaaacttagagccttgttagagagtctggcctagttgyatcctttacctcactgtgtataggcgtttcagtatccatagttctcttggtcattaactaatgtttttaaattgttagctaaaaataaaacaaaaaacaaaacaaaggaaactaaaatgatattagataaatgaagtagacaatgtggaatgataaggatttgttttcaattttttttttttaaagaggcaggagctctctctgtcttccaggctggagtgcaatggtgcagtcctagctcacttcactgtagcgtcaaatttctctgctcaaacgatcctcctgactcagccttctgagcagttggaatagcaggcacatgccattgcaccttattaaattttttattttttgtagagacgaggtcttgctttgttgcgcagactggtctggaactcgtggcttcaaatgatcctcctgcctcagcctcccaaagtgctaaaattgccggcgcaagccaccatgctggacctgttttcccttttaaaagtgactatattcctcgaacaatgtgttttgtggtcatataagttttgggattgttggtttaaataaaaccaatagtttcttttctgctggactcctcagagtcttttaatatgcaaatatttatcattatgaagtgatcaaaaggatttcttatggaaacttagttgccatggcttggggagcagcgactttttgtattttgcaatgtgaatgcaataaatgaccacaagttctttccatcactgtgtgtttgcccttttgtgtgcagttttgtactcctatgataaaagaaatggaatcagtttttgcaggctttaagtctgtgcctggccctgttactttctttggccagtgtgatgtcagcaatcatgatgcacacaggcttgaaagtgcttgaggcttgccttcccttgctgctcttttaaatcctaccttatctatattaagaaatatttactagcttcctggaggatgagagaccctgtggaacagaatgagcccccttagctgagaatccttctacccagctgtcctgccaattaccagacatgtgacatcatgctggactatcctgtcccaattgaagtttgtccacacccagttaactctcagaactgtcagaaataatatatgtctgttgttttaagtcgctaatttttggggtaattaactatcaaaagctaaaggatgcatatacttgttaactttttatataatgcagttgttttgyaaatttaggctgagaaacagtgctctatgggtaggaatattctctaaggacttattggtagcttaggttacttagtgtggttttgaattctttttgagacattttcaaatttactattgaattttaacttaatttccaaaaatttctatagcagaacatgctcatttaatgtaaataatttgacaaatggaattatgtaataatggatgattgatgttgggctagtagaaactttctctagaatcgatgttataaaaccttggctgattattatgagtttttttttatctgcaatatttatctgtattttattgcatactgttgcataaaataatgggtcaggtagatgcccagtcatcaaatgccacatgtcagaatttcaggtgatagttacaaactacatcaatcaaaaacactttctagtttaaaacaatttggaactacagaacatacagtaacattttgaatttaaaattactgccaatggggaatgtgtttaaacagcatccactcttggaattgctaaactgatttattcatcataggaactggtactacaactgcatatttaattgctctaatgaaagattttttttctttattttcctgtaatacagtatttacaatccatggacttgtgccattttccatttggcactttattatttggcctaaggccatggtgtgctgtgatgttactcatgagctctggagtgattaacactggtgaaagtactttcttatactgcattttatgcttgcttcagataataaaaattttcctgagaagtcaacatttctgtaattagattcctaaaaattcagtttcctgatttctggcaattacatctacaaaaatttctccagattatttctgcagatggttaatacttattttggtatagaaaacctgtttcaaatggctagttaattatcaacatttaaaaaatagtatagtgggcatttagcatgttttcagaaaagattttagtgcataaagttaaaatttccaaatcacacttgcctagttatatttaagtttgcaagaaaggtgctaggatggaaatattgccagtgaaaatataaatgttaatacattactaattttaggagaccacaagtgttagccacttacttaaatgtaatgtttccttcttttggagcttctgaatggtgattacagtgacattaaggtcaaatgygttttctttacagcatgaatccttacaatctaggaatatgctaatattcattgtgaaattccaattttcttatccagagataacagctgttaacattttgttatagttcctgtaagatttgtgtgtgtgtgtgtgtgtgtgtgtgtgtgtgtgtgtatgtgtgtgtgtgtgtatgtatattagagatggagtctcactctgtcgcctatgctggagtgcagcagcacgatctcagcttactgcagccttcacctaccaggttcaagtgattctcctgcctcagcctcccaagtagcttagagtacaggcacgtgccaccatgcctggctgatttttgtgctttttttttttagtagagatgaggttttaccatgttggccaggctggtctcgaactcctgacctcaggtgatctactctcttcagtctcctggagtactgggattacgggtgtgaaccacagcgcctagccgtctttgtatattttaatgtagttaatcttaagatatatgtagttttatattctgcttttttcacttaaaattatgtagtaaacattttacattagaatttgttggcaaaactttttaaatgactacaccaaagacttttatrtggataaactgtaattggtygatccttctttagtctcaaatatttaggcttttgtctatttttccataccattgttataaagatatttgtgtgtaaatctttgcatttatgatttttagaaataaaagtataagactaaaatgtattatttttaaagcttgtgacaaatatcaagcttttgttttcagaaaggttattctaatttatgatatatgacaaaaatttaaaattataacaaccttaagcaggaactcaattttcactttggttattttctttttacttttcactagagtttatttttttaacttttggaaagatctttattgtcagaaattgatattgaataatctttagataaatacagattttaaaaagaaaatgaaaaataattattaattatatatcttctcctttctataaaagtgttaaatttttagataaaagggtatagctgggccattacttttaatgtattttacagtacatgacagcaggttcttaccttttatttatatccttagtacttagcatatgaatagcacatagtagatacccaatcaatatttgttgagtgagtgaatgaataactgtaattttcatgaataaaccccatattaaatgataaatttcagatatatgtgaaaatgaatttctcatctttcttctttaccaaagtacaatagtctattattaacctcatgaagcacctttagattttccatattttataaagcagctgatttcttctatgatttttaatccatgttcagtgaatttaacatttttagaataaaaatgcctataatagtactgtgctatctactctggaaagatataaagaagtcctttatgttttctgcagaaacattttgctgcttttatctactattaaaaattcttattttagtaaggtaaacaaaaaatagtgcttttaatatttgtattcatatattatcrttgtgataagtttctctatgtacaccataacaattttcagtgataagtggcattcttaaccaaatatatacaaatggagtatcatcaagtttaattcttttatgcatctaaacctgcctctcctcacctccatgctttctctgtttcattttatgtagcattttaggttgttccttattatttggaagtaattcatctttatactttttgatcttgcctttggattctagttttcagaatttggacatttggttcacaatgagctaatgtataaaccattagagaggtagtactccattttcttgtgaacgcagttttgtaaagtgaactgcagccagagcctcaggactaattgtataacccaaaccccttagtaaactccgatccaggttaaacttagaggtcgttggctatcaaattgagtgtataccacatatcattagttaaataaacatttatttactcccattttaaaatgtagcagttttcttaattatatgaataatcaactgtctctttcactaattatatatttaaaatttactactatattttcacctggcaccttttcagatgagcctagaacatcagaatgtgacagtcagttgagtttcataggatgagctcattagcagtacatttctggtgcaaaggtttgagtgaagtagtttaattgrctataattatatttcattcttcatatccccttaggataattagaagaaattcattttagtttttattctttaaatacagtactgcattttatattttatttttttacaggctcaaagattgagggtttctatgatgctttattaaataaaagattgctttttttggaataaatagtataacctgtggaaatgctattaattccatattggttcttggcagggcttttaaatttggtttcttttgatttgcttcttgttgtctagacagaaaagtgtcttctatcactcccaagatcccagtctttcttgccagcttctcttgtgcatttttatagttttaagtaatagcaattgaacaggaaagcacatttgggaaagtagattactttttaccaggaaatagtgccagaatcaagattgtagttttaatctccttaaatatttcagaaggttaactctttcatttcacttttctttttataccttacttttgttgggcttttataaaggaggaaaaatgggagagatagcaaaagttactggaaggatcatcaatttctatcctcagctctgatcctgattaacttttggtgaaatcaaatagccttcctctcagactctaaatggaaaatttaatttgcaatttctgatggttatcttgttctgtatttagaaataatgttgaagttgtgatagaggcattatgctacgcttctttgtatatttgatcagtgctctttaaatacttcatgagtgtttgctacagttacatattttcagacagagtaaaggagataataattcgcataaagactagtacccactagtagggttaacgtggttcttttgtggtaccacacttcatcactttactatatacagatatgaagtaattgtatactcatttatctcgccctttagttcattggtcccattacttcatagtgtgatctttccaaaataaattactaatatagcttaaaatctatcagcctaactgcctattgatcatctctagtatgaaatctgtgctcattagcctccttttccacttgcatctcactttatgctctagtcttgttgaaccacttcatatttttgcacatgctgtcctcccatctgcctgaaaagttattttatgacctctcagttaccaaagatcctgtaatgtgtacacctcatgccttccatacacatggactccaaatacacatatatgctttgtggacataattgtgtcttgtgtacctttgtatccctagtgcttggcaaataaaaacaactaacttaattttagttgaatggctgagtggatattttgtgaagcagtttatggtagttcctattttttcagaaatagttcttttgcctttacatatgtattagtcaagattctcaagagaaacaaccaatgggatggatggatggatagatgggtggatggatggatgggtaggtaggtaaagaggtagctaggtagatagctaggtaggtaggcagatagatagatagatagatagatagatagatagatagatagatagatagataggagaggagatttattaggggaattggctcacacaattatggacgctgagaagtccctcataggctgcctgcaagctggagatgtagggaagcctgtagaaggtagtgtgactcagtccaagtcccagggtctcataatcaaggaagccagtggtgtaattctcagtgagactgaaggcctgagaacccagggggctgctggtataagtcccagagtccaaaggctggagaacgtagagtcccaatatccaaggacaggtaaagaagggtattctagttccaggaaaaagagcaaattttgcctttttactgccttttaattttgtctggactcttagctgattggatggtgcctgcccacattgagggctgatctttcctaatgagtccattgactcacaccattctctggaaacatcctcacagatacacccagaaataatgctttactagctattacatatccctttattcagtcaagttgacacctaaaattagccatcacaccaaatgtttttgttgggtaacagctttatttagatgtaattcacataccaaacaatttattcatttaaagggtacaattccatggtctttagtatatctatggaatcaagtaaccatctccacagtcaatttttaaagattttcaccacctaaaaagaaaccctgtgccctgtacttactacctcccaacctgcccatctcacttagataatcactttgatttgcctgttctgtacattttctataaatggaatcataaaatatgtggctctttgtgactggattattttatttagcataggttttccaggttcatgcatgttgcagcatgtatcagtatttaattttttttaactgccagatcatattccattgtgttgatatagcccatttgatttatcagttcatcagttgatggacaattgggttgtttctactttttggctattatgataatcctgctgtgaacattcatgtacaagttttcgtgtgaatacttgcttttaattctttaaggtacatatctggaagtggaattgctgagtcatatggtaactttgtgttttaaccttttgagggtcttctagatattttccaaagtatctgtaccattttacattcttaccagtaatatatagagagttcccattttttccacttctttgctaacacttgttattatttatctttttgattatagctatcctagtgggtgtaaagtattatctcattgtggttttgactttcatttcctaaatgactaatgatgttgagcatcttttcatttgcttattgaccatttctattgcatctgctttagggaaatgtctagtcagatcctttcccattcttaattcggtgatttgtctttgtattattgagttgtgacagttctttatgtattctagatatgattcctttatcagatatgttatttgcacatttatttttccagttagttgtctctttcactttcttgatagggtcctttgaagcacaaaagtttaaaaaaaatttttgattaagtccagtatctttttgttgttgttgttgaatgtacctttggtgtcacatttgaagaactgttgtcaaatccaagggctttaaggtttactctgttttttcttctaagagttttataattttaactcttacatttagatctttgattcatttttttaaattttattattattatactttaagttttaggatacatgtgcacaatgtgcaggttagttaaatatgtatacatgtgccatgctggtgtgctgcacccattaactcgtcatttagcattaggtatatctcctaatgctatccctcccccctctccccaccccacaacagtccccagagtgtgatgtttcccttcctgtgtccatgtgttctcattattcaattcccacctatgagtgagaacatgcggtgtttggttttttctccttgtgatagtttactgagaatgatgatttccagtttcatccatgtccttaaaaaggacatgaactcatcattttttatggctgcatagtattccatggtgtatatgtgccatattttcttaatcctgtctatcattgttggacatttgggttggttccaagtctttgctattgtgaatagtgccgcaataaacatatgtgtgcatgtgtctttatagcagcatgatttatagtcctttgggtgtatacccagtaatgggatggttgggtcaaatggtatttctagttctagatccctgaggaattgccacactgacttccacaatggttgaactggtttatagtcccaccaacagtgtaaaagtgttcctatttctccacatcctctccagcacctgttgtttcctgactttttaatgatcgccattctaactggtgtgagatggtatctcattgtggttttgatttgcatttctctgatggccagtgatggtgagcattttttcatgtgtcttttggctgcataaatgtcttcttttgagaagtgtctgttcatatcctttgcccacttgttgatggggttgtttgtttttttcttgtaaatttgtttgagttcattgtagattctggatattagccctttgtcagatgagtaggttgtgaaaattttctcccattttgtaggttgcctgctcactctgctggtaatttcttttgctgtgcagaagttctttggtttaattagatcccatttgtcaattttggcttttgttgccattgcttttggtgttttagacatgaagtccttgcccatgcctatgtcctgcatggtaatgcctaggttttcttctagggtttttatggttttaggtatagcgtttaagtctttaatccatcttgaattaatttttgtataaggtgtaaggaagggatccagtttcagctttctacatatggctagccagtttttccagcaccatttattaaatagggaatcctttccccattgcttgtttttctcaggtttgtcaaagatcagatagttgtagatatgtggcattatttctgagggctctgttctgttccattgatctatatctctgttttggtaccagcaccatgctgtttggttactgtagccttgtagtattgtttgaagtcaggtagcatgatgcctccagctttgttcttttggcttaggattgacttggcgatgcgggctcttttttggttccatatgaactttaaagtagttttctccaattctgtgaagaaagtcattggtagcttgatggggatggcattgaatctataaattaccttgggcagtatggccattttcacgatattgattcttcctacccatgagcatggaatgttcttccatttctttgtatctttatttccttgagcagtggtttgtagttctccttgaagaggtccttcacgtcccttgtaagttggattcctaggtattttattctctttgaagcaattgtgaatgggagttcactcatgatttggctctctgtttgtctgttatcggtgtataagaatgcttgtgatttttgtacattgattttgtatcctgggactttgctgaagttgcttatcagcttaaggaagttttgggctgagacagtggggttttctagatatacaatcatgttgtctgcaaacagggacaatttgacttcctcttttcctaactgaataccctttatttccttctcctgcctaattgccctgggcagaacttccaacactatgttgaataggagtgttgagagagggcatccctgtcttgtgccagttttcaaagggaatgcttccagtttttgtccattcagtatgatactggctgtgggtttgtcatagatagctcttattattttgagatacgtcccatcaatacctaatttattgagagtttttagcatgaaggttgctgaattttgtcaaaggccttttctgcatctattgagataatcatgtggtttttgtcwttggttctgtttatatgctggattacatttattgatttgcatatattgaaccagccttgcatcccagggatgaagcccacttgatcatggtggataagctttttgatgtgctgctggattcggtttgccagtattttattgaggatttttgcatcaatgttcatcaaggagattggtctaaaattctcttttttggttgtgtctctgcccggctttggtatcaggatgatgctggcctcataaaatgagttagggaggattccctctttttctattgattggaatagtttcagaaggaatggtaccagttcctccttgtacctctggtagaattcggctgtgaatccatctggtcctggactctttttggttggtaagctattgattattgccacaatttcagatcctgttattggtctattcagagattcaacttcttcctggtttagtcttgggagggtgtatgtgtcgaggaatttatccatttcttctagattttctagtttatttgcgtagaggtgtttgtagtattctctgatggtagtttgtatttctgtgggatcggtgctgatatcccctttatcattttttattgcgtctatttgattcttctctctttttttctttattagtcttgctagcggtttatcaattttgttcatccttccaaaaaccagctcctggattcattaatgttttgaagggttttttgtgtgtctatttccttcagttctgctctgatcttagttatttcttgccttctgctagcttttgaatgtgtttgctgttgcttttctagttcttctaattgtgatgttagggtgtcaattttggatctttcctgctttctcttgtgggcatttagtgctataaatttccctctacacactgctttgaatgtgtcccagagattctggtatgttgtgtctttgttctcgttggtttcaaagaacatctttatttctgccttcatttcgttatgtacccagtagtcattcaggagcaggttgttcagtttccatgtagttgagcagttttgagtgagtttcttaatcctgagttgtagtttgattgcactgtggtctgagagacagtttgttataatttctgttcttttacatttgctgaggagagctttacttccaactatgtggtcaattttggaataggtatggtgtggtgctgagaagaatgtatattctgttgatttggggtggagagttctgtagatgtctattaggtctgcttggtgcagagctgagttcaattcctgggtatccttgttaactttctgtcttgttgatctgtctaatgttgacagtggggtgttaaagtctcccattattactgtgtgggtgtctaagtctctttgtaggtcactcaggacttgctttatgaatctgggtgctcttgtaatgggttcatatatatttaggatagttagctcttcttgttgaattgatccctttaccattatgtaatggccttctttgtctcttttgatctttgttggtttaaagtctgttttatcagagactaggattgcaagccctgcctttttttgttttccatttgcttggtagatcttcctccatccttttattttgagcctgtgtgtgtctctgcatgtgagatgggtttcctgaatacagcacactgatgggtcttgactctttatccaatttgccagtctgtgtcttttaattggagcatttagtccatttacatttaaagttaatatcgttatgtgtgaatttgatcctgtcattatgatgttagctggttattttgctcattagttgatgcagtttcttcctagtctcaatggtctttacattttggcatgattttgcagcggctggtaccggttgtgcctttccatgtttagtgcttccttcaggagctcttttagggcaggcctggtggtgacaaaatctctcagcatttgcttgtctgtaaagtgttttatttctccttcacttatgaagcttagtttggctggatatgaaattctgggttgaaaattcttttctttaagaatgttgaatattggcctccactctcttctggcttgtagagtttctgccgagagatccgctgttagtctgatgggcttccctttgtgggtaacctgacctttctctctggctgcccttaacattttttccttcattttaactttggtgaatctgacaattatgtgtcttggagttgctcttctcgaggagtatctttgttttgttgtctgtatttcctgaatctgaatgttgtcctgccttgctggattggggaagttctcctggataatatcctgcagagtgttttccaacttggtttcattctccccatcactttcaggtacaccaatcagatgcagatttggtcttttcacatagtcccatatttcttggaggctttgttcatttctttttattcttttttctctaaacttcccttcttgcttcatttcattcatctcatcttccatcactgataccctttcttccagttgatcgcatcggctcctgaggcttctgcattcttcacgtagttctcgagccttggctttcagcttcatcagctcctttaagcacttctctatattggttattctagttatacattcgtctaaagttttttcaaagttttcaacttctttgcctttggtttgaatttcctcctgtagctcggagtagtttgatcatttgaagccttcttctctcaactcgtcaaagtcattctccgtccagctttgttctgttgctggtgaggagctgcgttcctttggaggaggagaggcgctctgctttttagagtttccagtttttctgctctgttttttccccatctttgtggttttatgtttgtttggtctttgatgatggtgatgtacaggtgggtttttggtgtggatgtcctttctgtttgttagttttccttctaacagacaggaccctcagctgcaggtctgttggagtttgctagaggtccactccagaccctgtttgcctgggtatcagcagcgctgtctgcagaaccgcgcattttcatgatctgcaaatgctgctgtctgatcatccctctggaagttttgtctcagaggagtacccggccgtgtgaggtgtcagtctgcccctactggggggtgccttccagttggggtgctcggtggtcaggggtcagggacccacttgaggaggcagtctgcctgttctcagatctccagctgcgtgctgggaaaaccactgctgtcctgaaagctgtcagacagggacatttaagtctgcagaggttactgctgtctttttgtttgtctgtgccctgcccccaaaggtggagcctacagaggcaggcaggcctccttgagctgtggtgggctccacccagttcaagcttcttggctgttttgtttacctaagcgagcctgagcaatggcaggcaccccttccccagcctcgctgccgccttgcagtttgatctcagactgctgtgctaggaatcagcgagactccgtgggcgtaggaccctctgagccaggtgcaggatgtaatctcctggtgcgccgtttcctaagcccgttggaaaagggcagtgttcaggtgggagtggcccaattttccaggtgccctctgttacccctttccttgaccaggaaagggaactccctgatcccttgcgcttcccgagtgaggaaatgcctcggcctgcttcggccggcacacggtgcactgcacccactgtcctgcgcccactgtctggcactccctagtgagatgaacccggtacctcagatgtaaatgcagaaatccctcatcttctgcgttgctcacgctgggagctgtagaccggagctgttcctattcagccatcttggctcctccccactattttgaatgttttctrtgttatcttttgagataatctagtgtttcttagtctgtcaatatgaattatattaattgattttcaatgtttgaatcagtcttgtagtcctggaatgaactccactggaatgtagtattccttttgcacattgctgaatactgtctactaatattttgttgaggatttttgcatatatgttcatgagaaatattgttctgtagttttcttagaatgtttttgtctgcttttgttatcaggataatgttggcacggtgaaatgagttgggaagtattctctttagtttttatttgttggaagaaattgtgtagaattagtattatttttcccttatatgttctccattgaaatcatctgggtctggaattttcattatttggaaggcttatgtaaattttaatatttttactaaatctaggactattcagattatctgttttttttctcaagtgaattttggtagtttatattttttcaagaattctgtttcacctaagttgttgaatttatggccaaagagtcattcatagtatttccttatatttttaatatctgttggatcagtggtatgtccggtctttcatttttgatattggtaatgtgtgtttactttctcttttccttggctagaggtctgtcatttgtattgatcttttcaaattgcctttctttcttctttttttttctgagacagagtctcactctgttggccaggctggagtgcaatggcatgatcacagctcactgtgacctctgcctcctgggttcaagccattttcatgcctcagccacttgagtagctgggattacaggcatgcaccatcacgcctggctaatttttgtatttttagtagggaagggtttttgccatgttagctggctaggctgttctcaaattcctggcctcaagtgatctgcccacctcagcctttcaaagtgctggaattacaggtgtgagccactgcgcccagccttgttttattggttttctgttttctattttatttatttctactctaatctttgttatttctttccttctgtttgctttatgctaaatttcttcttcttcctctagtttcttaaggtgggatgtgtggttactgattttagatctttcttcttttctaatctaggcattcaaagccataaacattcattaagcactgctttagcggcatsacacatatttgatatagtgtattttcatttccatttagttcagyatattttagaatttcccttggtacatctttaaattatcacagtctacctttaagtgttattataccatgtgtacagtataagaaccttagaacaatatatttctattgttcccctcctggcctttgtgctattgttgtcatatgtttacttttgcatatattgtaaacttcaaaacatactgtcatcagttttgcactaaacagagtattttcttttgaagagtttaaatattaaggaaaagtgatatttatatgtactcaatgtagtcaccatttccagttctctttagtcttttgtgtagattcaagtttctatctggtatcatgttccttactcttgaagtgcttactttaacatttcctataatgcaggtgtcctggtcatgaacttcttcagtttttttttttttaatatctgaaaacgtattttgtttttattttagaaagctattttaactgaataaataattctaggttgacattcctccctccttgtgttctttaatggttttgctccactgtcttctgtcttgtattttttttgaaaagaaatctgctttcttcattttctttgtcttgtctatataacatgtcccccggccccacctcattgcttttaacattttatcattggttttaagcaatttggttatcatgtgccttggtagttttcttcatgtttcttgtgctttcggtttattcatcttgtatatttgagcttacagtgttagtcaaatttgaaaaaaaaaatttcttcaaatatttagtgtttgctctttcctctctcactggagactcaaattacacacatatatatggagattgtgtcttcttttttactttttttgtttggtttttggtaatctctatctagtgctgcacctaccagttcatagcctttttccccttttgaaatggctaatctgctgttaattccattcagtgccttttaatattgtggacattgtagttttcttctctagaagtttgatttttatcttcttaaaatgttatacttttctacttactgttttcaatgtttcctttatttgcacaaaggtaatgcatttataacttctaatgtccttgtctactaatcctatcatctgtgtactttttggatcagtttcaatttattggtttttctctttctccttacgggtatattttcctgtttctttgcatgcttgttattttttttgtttccatttgcaaagttattttcttttactctcttttttttttctttcttctctttttgtaaaaggaaaccatggtcttgggggctagagcggagttttgcatgcctggtaatttctgattgaattctagacattgtaaattttaccttgttgggaggtgggttttttaaatattcataagaattttagtatttataaaaatatttttgagtgtaattttgaggtgtggttaagtgttttggtaacagtttgatcctttttagtcttgtgtttaaattttctgaggtgagactaaggcagtgttttgaatagggttgatttttccactctattgaggtagggccctttttagtactctacctaatgccctatgaattatgagtttccactctggctattcggaggaggcactattcctggccctttgtgagctttgagtattatttgctccattctttttaggtgcttttctttggtcttgtgtgttttcttcacgtgtgaatatttggcagccacttttccgtcacacacagggttttctctttgtttgaatccccactccctctgtctctgtacaggggagctgttttattcttctttcttgcctattaaattctccatgcctatatnnnnnnnnnnnnnnnnnnnnnnnnnnnnnnnnnnnnnnnnnnnnnnnnnnnnnnnnnnnnnnnnnnnnnnncttctgcaaattttaaaggttttctccctgggaactttatttattatctccagtactctaccctgcaaactgtagccactttgactttcccatactcctagctctgtcttctcaactcagggagtttgtaggttctgcctaaggtttccattgctgtgacctgtgaactttttccagtcaataagttgggagcaatcatagggctcatcttattggtttcccttttctcaagggtcattgtctttgattcagatgttcagtgtcctgaaagttgatgctttatatattttgtttacttcttttagtttagtttttttgttttgttttttccagacatgtcttagtccatttagtattgctatagaatttagtattgctatagaggaatgcctcaggctggataatttataaagaaaagaggtttatttggctcatggttctgcaggctgtacgagaagcatggcaccagcatctctttctgctgaggcctatagtaagctttcacttgtgtagaaggtgaaggggagcttacatgtagagatcacacggcaagatgagcagcaagagagagatgccaggctcttttcagtcaccagttcttatgggaactaagagtgaaaacttactcactcctggagaatggcaccaagccattcatgagggatctgctgccacaatccagacagctctyacctaggccctacctccaatattggggatcaaatttcagtgagatttggcaggaccaaacaaaccatatccaaactatagcaagacagaaaggtaaataaatgttaccttttttactttatgatcagaaacaaaggtccttatttatccatttttgaaagtcccatatttaatgatttacagccatgccacagcataggacatattcacatgtcccgtgttaaaattgctgtctgaatttcatgtactctttagagaactgctttgcagttttaagtatacatttttaggaaaaaaaagcttattaagaatgaaatttcttctcgttttgatcctacagaaagaggaatgctctaaggtaaaatggggcatgatgctaaaatgggaaaagtagggtagattgatgaaacttaatctgaaaactagcagcagatgtttgagaactccatcataggcctgaaataaatttaaggataagtttaaaggtttggtataaagttttctttaatgtcctgggttgaatgtagatggagagtggggggaggtgtgagttctggagaactgttaatttgtttgtaattttattacctatctgtctgtgcatctgtcttcattggggtccccaagaccactctcaggcttgatgattcactagaaggactcactggacttggaagctgttacactcatggttatgatttgttaacactgaaaggatacagataaaaataagcaaagggaaaaggtgcatgggtaacgtccagaagaaaccaggtacacacttctagatgtccttttccagtggagtcacatgggaacacacttaattctcccagcaactatgtgtgacaacaggtgtgaagtcactaccaaacagagaagttcacttgagccttagtgtccagaattttactggaggttagtcacgttggtatactacagtgctggcgtgactgacctcagctatccagattccagtacttcccagggcaaaarcaagcattcaccataaatcacactgtcagtataaacttatctggtcagattggtacagcatggcccaaggtacatacatactgggatattgtgcctgatacttgtttttatatgcaccagtacatacctctctagtttactaactccatactttatttggattgaattagtttttcctctaatgtcctttgtctgtttgaggatcccttgtagattttcacattacatgtggtcatcatgtttctaggtttctctgggctgtgacaatttcttttcttatttttgatggccttgacgattttaaggtgtactggtcaggtcttttgtagaatgcttctcaatttgagtttggttgatgttttcttacggtttgactgggattgacggttttgggaggaaaaccagacatgaagttccaattttcatcacagtctaactaaggtataatatatattttgaacctttaattatctaatttaaaaatctcctggcccttcagaaatacttaatcagattttaggccattatggtgcttatatgccagatttgttctcagtggcttttcttatctgataacttttaattaataggcagccttctttgcagtggtgtcaagatcactgtgcacaacttcatatctttctggagacaacagggaaaggaagccagaagggagaacagtaattggtcaagttgcagattagggaagctaaaattggtctcttttactagattagaatctggagtaaaactccagtctggcccttcagcataacttttccattattcacatatgcctctcttccttctacaagccaaattaaaatttagtattagggactccaaatggtacaaactcattcattctctttaattgcctaactcctactcattcttcatattgttgcttaaatgtcagaccttttaggaagctatacttgacttagaggaccctcaaggcctgtcatgggctcttgtagtattccgtataattttttgtctagtccttaatttaagtattagtgtatgttttaatgtattttttttcccagactgtaagctccacaatgtagagaccgtgtcagttttattcatttttgtattcttagagccaggccaagcattcaaaacagccatgcagtaatatgaatatatctgaatcaatgagtgaatacataaataattgagaaaatgaatggatattagatattaaaacctttaccaactctacttatagcagcctgactctagttaaccataaatacacacttgtaacgcatgggccccacacttaccctaagttataaaaatggtacaattaggtaatttctaccctaagacagtcagtttttgctcagcratctaaccacgtaggcttgcttacttctgagacttgcttgacctatctcattgaactcgctctgtgcctgagatacatgtccaatttctcaaggcaagttcttcttccagaattgtcttgtgacatactttgagccaattccctagttggttctgtaccagtaaactcatacccccagctattacatgtagcacattcaacattcagggacaaactttgatgtaagttaaactttttttttcttttctaaatattgcccattaagactgtgttttaaggattgttttctaatactttcttcactctttatcagaggtttgtcctcctaccttttgccttcaaaccaaaacatcagtaacagtcctctttccccaacatctttgttctctggccagcattgattattcttccccatgggggagcttactttctagtctatacctcaggacacagaatctgaactgcttttaaagtttgcttatatgagtttgctgagctttctgacccagagatatcttctgtctttgcctcgcatttaataaacatttggaacatcccttcagccagtcttggcagagtaggctttttatttccatgtatacaaaaactttattatcagctaaccatcaaaggaaatcagagaaaatggtttgaacttatgacccaactatttggacagattagggctaggaaatgtaatgcaaggcatgtatgtatagactttgtacacttttacatattggtttcactcgcgtccctgtgaagagaccaccaaacaaagactagggagggaccgacgtgttaaagaatgcctggacgtcaggcacctcagaccgtttgcccattttatgacaagaattatctagatcttgtaggatggaaaaatcgaaagtgccattttctggctatttggaaccactgtcaagtttatattggggtcaagcggtgttggagaagaaaataaaatgcttagattttagatcaggtgtgagctgaagaggttttaaggtcttgagaacacaggctaagggagaagaaggaggaatggagggtggaaggttgcctatagtgaaggagcaagtccagagaaaagagagggtagagacagagtgaaggggtggggggtgcttgcccccctggaaagtggagagaaaagagagggtagagacacagagagaaggggtgtggggtgcttgcttcccaggaaagtggagaaggggtgggtagagacatggagagaaggggtgggggttgcttgccccccaggaaagtggagaaggggtgggtagagacatggagagaaggggtgaggggtgcttgccccccaggaaagtggagaaggggtgtggggtgcttgccccccaggaaagtggagagaaggaagggtagagacatggagagaagcggtggggatgcttgccccccaggaaagtggagaaggggtgggtagagacatggagagaaggggtggggggcacttgtcccccaggaaagtggagaaagggtgggaggtgcttgccccccaggaaagtggaaaaggggtagagacacagagagaaggggtgggggtgcttgtcccccaggaaagtggagaaggggtatggggtgcttgccccccaggaaagtggagagaaggaagggtagagacacggagagaaggggtgggggatgcttgccccccaggaaagtggagaaggggtggggagagacacagagagaaggggtgggtgagcagccaaagcaggtgtccccacaattgacttgccaccaagggaatgtgggtgaatgaccaaggcaggcstccctgcggtgatcagacaccaatgaaatgtgggtgaataatcaggcaggcatccccgcagtgattaaacaccgagggaagactgtcttctcaagtctgtgaccggcgctggagttttcggtccacggataaaacgcatctcctttgtctctaccagaaaaggaaaggaactgaaattaagacaagggcgagactgaagtgtggcaccaagattgaaaggagaaagagattgagggttagtgagagaggttggagaagagagtaaagaggccgcttaccgactttaaaattggtgagatgttccttgggctggttagtctgaggaccagaggtcgtaggtggatctttctcatggagcaaagagcaggagaatagcggactgatctcccaaggcaggcccccctatccgagtcacggcaccaaatttcactcgtgtctgtgtgaagacaccaccaaacaggctttgtgtgagcaacaaggctgtttatttcacctgggtgtcggcgggctgagtccgaaaagagagtcagcaaagggagataggggtggggccgttttataggatttgggtaggtaaaggaaaattatagtcaaagggggttgttctctggctggcaggggtcagggggtcacagggtgctcagtgggggagcttttgagccaggatgaaccaggagaaggaatttcacaaggtaatgtcatcagttaaggcaggaacaggccattttcacttcttttgtgattcttcagttacttcaggccatctagatgtatatataggtgcaggtcacaggggatatgatggcttagcttgggcttagaggcctgacaattggtaacctttttcacctgaccacatgtatgggtttaatactaactctccaacttttttctttatttttattttattttactttaagttctaggatacgtgtacagaatgtgcaggttctcagcaaactaacacaggaacagaaaaccaaacactgcatgttctcactcataagtgggagttgaacaatgagaacacatggacacagggagggaaacatcacacaccagggcctgtcggggttggggggcaagggaagggagagcattaggacaaatacctaatgcatgtggggcttaaaacctagatgatgggttggtaggtgcagcaaatctccaacttttttctatattgcccatcttaacctcctaccagcttgtccctctgtcacttttaccccttctgttgttttacttgtaagataatacaagataaatatatgtctgcctattaatttatttctttaccaagcaccaaacatatgtaatatagaaggtactatgttaggaaggtcctagtcatacacacatatagaaaaaatagtttagttattaattactcatgcctcaaattatcaagaaaagtaatcaaaactcatttaaacatttttactattaaaaatgatttcttctagttttgggtcatttggttatgtagtattccatatgattgacttaaaattcacttaagaagcttgttaaacatatacttagctcctgggcttaggggtcaatcagtagaatcccctctgtcttccctctgtttttagtttccttgtttttagtttctatattttccatattcctttatctttcccagttctgctatgccatggtaagaattgcaggagttactaagcagttttcttaaatattcaaagcatttgctggtgattatagggaagttattcaaggaatttggtaaattagaaaaagcaaaatattttcatgatgtatgaagaattttgtaggcgagttttatgctgttgtcatatctgagtcttaatttttgttacttttttaagtttccattttttatgagttttttttcttatacttgttcatctgacaaaagtaggtagttttttaaaagctcattgtgtaaatggttaaccatttttaaggtgaattaagacatacatttttgtaatctaagggaagttacttggataatttattatatttataaggtttgacttcatgcatagccagatctgaggacagtgctaagtgtgattgtaatgtaattatattttagaaattgagctaagattttaatataaccattaaactgattattgaaatctatacagtttgaaaaaaaattacctttaagttgataatatttttcatgtttttttcagatacctatattttttaaacttgactaattcccatcttaatgtctttacttattaaatatgacatctatgaacatctggccctcttagctattatatgtttagtgaggttctcaatgttatttactaaagagcaacaaatcccaacaaatcaagagcaattagtggcccagttttggtgtatagtttcttatattctttctaatctagttttttagctttctgtactcccatctgtgaaattgttagatgttttcaacctaagcttgcttatggaaaatggaaataaaacagaaagaggggaaaggctgggagaaaagagaagcaaagacctctttgaayactcagcccttcccactcaccctgtgcatagcacttcacatttttacttgwctgcacaatctgtctgcttttcattggttttcagagtcctcgagtgatttttgtattttgtctgacatttttctttctttttttttttttttttaattgatcattcttgggtgtttctcacagagggggatttggcagggtcataggacaatagtggagggagggtcagcagataaacaagtgaacaaaggtctctggttttcctatgcagaggaccctgcggccttccgcagtgtttgtgtccctgggtacttgagattagggagtggtgatgactcttaacgagcatgctgccttcaagcatctgtttaacaaagcacatcttgcaccaccattattccatttaaccctgagtggacacagcacatgtttcagagagcacagggttgggggtagggtcaccgatcaacaggatcacaaggcagaagaatttttcttagtacagaacaaaatgaaaagtctcccgtgtctacctctttctacacagacatggcaaccatccgatttctcaatcctttccccgcctttctcccctttctattccacaaaaccgccattgtcatcatggcccgttatcaatgagctgttgggtacacnnnnnnnnnnnnnnnnnnnnnnnnnnnnnnnnnnnnnnnnnnnnnnnnnnnnnnnnnnnnnnnnnnnnnnnnnnnnnnnnnnnnnnnnnnnnnnnnnnnnnnnnnnnnnnnnnnnnnnnnnnnnnnnnnnnnnnnnnnnnnnnnnnnnnnnnnnnnnnnnnnnnnnnnnnnnnnnnnnnnnnnnnnnnnnnnnnnnnnnnnnnnnnnnnnnnnnnnnnnnnnnnnnnnnnnnnnnnnnnnnnnnnnnnnnnnnnnnnnnnnnnnnnnnnnnnnnnnnnnnnnnnnnnnnnnnnnnnnnnnnnnnnnnnnnnnnnnnnnnnnnnnnnnnnnnnnnnnnnnnnnnnnnnnnnnnnnnnnnnnnnnnnnnnnnnnnnnnnnnnnnnnnnnnnnnnnnnnnnnnnnnnnnnnnnnnnnnnnnnnnnnnnnnnnnnnnnnnnnnnnntgccccccacctcctatatatatggggcggctggccgggcgaggggctgacccccccacctccctcccggacggggcggctggccgggcagggggctgatccccccacctccctcccggacggggcggctggccgggcagaggggctgacccccacctccctcccggatggggtggctgccgggcagagacgcccctcacttcccagacggggtggctgccgggtggaggggctcctcacttctcatatggggcggttgccaggcggagggtctcctcacttctcagacagggcggctgggcagagacgctcctcacctcccagacggggtcgcggccgggtagaggtgctcctcacatcccagacggggtggcggggcagaggcgctccccacatcttagacgatgggcggctgggcagagacgctcctcacttcctagatgggatggcggccgggtagaggtgctcctcacttcctagatgggatggcggccgggcagagacgctcctcactttccagactgggtagccaggcagaggggctcctcacgtcccagacgatgggcggccaggcagagacgctcctcacttcccagacggggtggcggccgggcagaggctgcaatcttggcactttgggaggccaaggcaggcggctgggaggtgaaggttgtagcgagctgagatcacgccactgcactccagcctgggcaccattgagcactgagtgaaccagactccgtctgcaatcccggcacctcgggacgccgaggctggcggatcactcgcagttcggagctggagaccagcccggccaacacagcgnnnnnnnnnnnnnnnnnnnnnnnnnnnnnnnnnnnnnnnnnnnnnnnnnnnnnnnnnnnnnnnnnnnnnnnnnnnnnnnnnnnnnnnnnnnnnnnnnnnnnggagagggagagggagagcgagagcgagagcgagagcgagagcgagagctgacatttttctttttaatcaacgggagagagtctatagttgccttatggcaccatagtgaaactggaacttttgacttctttttttttttttttctttaaatcttcatagaatgtgtctttacagcatgggaaatttttttttttttttttttttgcttttcactatatacagctaatggcttttacttattttcatttagatctaagaacacattttaacagttactgcttcctaatcttgctttatctgtattaaagaagcatttggaaatttataattgttcttgaccttggaggttggttttctcaaccttttttttcctgcaatatgtagtatctttagtaatttggtacacttatgatttctaaacaaaatatgtgtcttttgaacattgttgaaaagttagtgtatgaccccacaaagaatttggaacaggtgccagcccaattgtgactgcctgacttcttgtccttacactgggagttgttagcatgaaaaaacaaaatgtcatggcattttctctaaaataatactttgaaaagaatttttgtccctggtggtaaaaaacttggcacccagcaagcaagaggatcttgactcatagatgtataaaaacattgtcagtgcccctggagctacggaattcctctctcatagtaatttttctaatgtctgtagctcagttcattaatttttattttgctgccttggaatttgtccataaaagtatttttttttctatttatttttaacctgatcatcaagttccttggcttctatgggtgtacagtttgaatttttgttgttgttgttttattttgttttggggtgtttggctaggaagaactaactataggatgtttgtcagggacatgtkccttgggaaatttatctcactgctctgtgcttgtttgacagctgttcttgcacttctgactttaattcaaaaagttataaagccatatgtgagcagctgttcactgttttcattagggcaaaataagatcggatgcaaatattatcaggaatgatttaggttatattgtaaaaataatttagactatattgtaggaataattttacggtagttatgatatattgtaagttattaaaaagaaggttctagaattaaaaacaattttaagcataaagtactatttgttgaaagatgagaggtgttgaaagatgatatactgtctgaaggtaggatagtgaaacagctagcttttgaattcctcttctagttctaggattttatgatttcatggtagtgtttatccttctctacagactaacttttcccatgacttcctatgctttagaactcttctgtgtaataataagctttttttttttgagacagagtctcgctgtgtcacccaggctagagtgtagtggcatgctcttggctcactgcaacctctgcctcccaggttcaagcgagtctcctgcctcagcctcttgagtagctgggattactggcatgcaccaccacgcccagctaatttttttttttttttgtatttttagtagagatggggtttcaccatgttggccaggctttttaagctgattcatatttatttgtgaattattatcatagccatagaaagagttatcatttttttggctttcaggtactaaaatcaaaatgcaaaattggtttgcctttagtttaaagtgatcagaacaaaaaaaaatkaagataatttaatggcttatctttttcagtagtcctccagaatayaaactttataatcatctctcagacatttaaataaagtatctagtatttattaaatatttaccacatgccaggcaaagtacaattaatttaacatatgctctcctgtttaattctcacagtgatcctgagaccttagggtttattatccccatattatagaagaggaaaaagtttagagagttgaagtaaattacccaaagtcacatagtaagtactgggtctgagatttgaacccaagaccattttttttttttaccaagttctaaattttagaagatatttactatatcaaaaaagtatgaagttaaaaagaatcagaatgtaaaattgtgaatatgttaaaccatacatacacatgcacacatgtgtgtttgcatttggagaggctagaaggtcctacaccaaaatattaacaaggattacttttaggtattggcatacagataattcttacatccttctttataatttcttgtaggctatacttcttatatctgctattctcataatcaacaaggtgggaattgctgctatttttatattctaaaaacttgacatcttacatgtatgcaattttcaaatctgtcttcactgtcttatttgagaattataaagctgtttttcagtagcttttgtattaatttgtgtaaagacagatattttatatatttagagactctcttttaggatacttttcttatttctctttctagatttcagattttttggacattattgcactcatctttgtgcccctacagtctctaggacaaatcctgcacatagaagacatttcttaaaattgattgaatttatttcagtagtaaattttagccacagtacaatagttggaaagaataaacgaattacagttgtaataataaaggaaacttaggttaagaaaatttcctagatttgttaatcagtcatttctctaactttgtcacctagttctactaggtgaatgggtggttccctgacaacgttgggcacccatcaaggctttttttgtttagttttgtttttgtttttggctgaaccttttaactccccatctgcgtcatgcttttctttttttcttgaccacagcttctaggatcttagtctgcttccttgtcctcatgcttttatatatacatacaaacacaaacacacacacacacatgcacacagacacacacacgagtatgtcaaatgataaaagtaatgcagtttcactgtagaaaattttcgtaataccaaaaattattatggataatatagaaattgcttgtattcctatcactttaaaaataacaatttttgaaaatacatatatgtgtatgtggttttttttttttttctgagacggactttcactcttggcgttcaggctggagttcaatggcgcgatctcggctcagtgtaacctccgcctccctggttcaagtgattcccttgcctcagcctcccgagtagcggagtttccaggtgccggccactatgcctggctaatttttgtatttttagtagaggcggggtttcaccacgttggccaggctggtcttgaactcctgacctgtgtgtgtgttttaattgggattataatgtattaaaatctttatattctgcttttttattacataaattttcagaaaatataaaatatcttctaaaatttatttaatttctatatgattgtccattctttaagtattctataattcatttaatagttgtttgatgtttagcattgaggttgtttctaggttattttctgtcatacagagtgttgtgccatgaatctttgaagaagaaatctttttgtatttcctgaactgttttgggaggatagtctaggaagtaatattactaggtaaaatgtatgaacttctaaaatatgttgccaagtacatttaataaacattacgatttttttcttctaccagtgtgtgacagtgttgactcattgtctatcactggccttgagaagtccatattttactcttcgctaattttataagctgaaaacagcttttcactattttaatttggatgttttggctttgattagtagagagttgagctttttacccccatagtttgattttgcatttcttttttgtatcatccatttcctcttatattccatacttgtaacggtacctttcccaagctagttatttaagctttttttaaaaaaaaattttaatgatttttgaaatggactctttgagctttttttttttctttttttaccttttccctttttaagatttttattcttacctattaggaagacaacaaggtatatctaattacatgacaaacagtcttcaccaagaagccagaatcttaaatttatagctcactgttgccatctgagatataaatagaacttcagttactgtgtgttgctttccattaagtctacttccttgctcttcttaaaccccactactccttctttaatgatagcccttctacgaacacatggatcttaatagactataagaatcacttgattgatgtgtttcatttacattttagagaacttccataataaataaaagctctctcagtgtgtctcacagagagattatcccacaaagaaatgttcctctttgagcattttcttatatttcttcctgtcttcaaaataagtcagatcatttaatttattttaatcttttctgttaaatgccagtagtacaaagtctccatatagtcagcagtcctaaacagcccaggagaggggacctctataataatggaatgccagtaaccaaaacagcatggtacgggtaccaaaacagagatatagatcannnnnnnnnnnnnnnnnnnnnnnnnnnnnnnnnnnnnnnnnnnnnnnnnnnnnnnnnnnnnnnnnnnnnnnnnnnnnnnnnnnnnnnnnnnnnnnnnnnnnnnnnnnnnnnnnnnnnnnnnnnnnnnnnnnnnnnnnnnnnnnnnnnnnnnnnnnnnnnnnnnnnnnnnnnnnnnnnnnnnnnnnnnnnnnnnnnnnnnnnnnnnnnnnnnnnnnnnnnnnnnnnnnnnnnnnnnnnnnnnnnnnnnnnnnnnnnnnnnnnnnnnnnnnnnnnnnnnnnnnnnnnnnnnnnnnnnnnnnnnnnnnnnnnnnnnnnnnnnnnnnnnnnnnnnnnnnnnnnnnnnnnnnnnnnnnnnnnnnnnnnnnnnnnnnnnnnnnnnnnnnnnnnnnnnnnnnnnnnnnnnnnnnnnnnnnnnnnnnnnnnnnnnnnnnnnnnnnnnnnnnnnnnnnnnnnnnnnnnnnnnnnnnnnnnnnnnnnnnnnnnnnnnnnnnnnnnnnnnnnnnnnnnnnnnnnnnnnnnnnnnnnnnnnnnnnnnnnnnnnnnnnnnnnnnnnnnnnnnnnnnnnnnnnnnnnnnnnnnnnnnnnnnnnnnnnnnnnnnnnnnnnnnnnnnnnnnnnnnnnnnnnnnnnnnnnnnnnnnnnnnnnnnnnnnnnnnnnnnnnnnnnnnnnnnnnnnnnnnnnnnnnnnnnnnnnnnnnnnnnnnnnnnnnnnnnnnnnnnnnnnnnnnnnnnnnnnnnnnnnnnnnnnnnnnnnnnnnnnnnnnnnnnnnnnnnnnnnnnnnnnnnnnnnnnnnnnnnnnnnnnnnnnnnnnnnnnnnnnnnnnnnnnnnnnnnnnnnnnnnnnnnnnnnnnnnnnnnnnnnnnnnnnnnnnnnnnnnnnnnnnnnnnnnnnnnnnnnnnnnnnnnnnnnnnnnnnnnnnnnnnnnnnnnnnnnnnnnnnnnnnnnnnnnnnnnnnnnnnnnnnnnnnnnnnnnnnnnnnnnnnnnnnnnnnnnnnnnnnnnnnnnnnnnnnnnnnnnnnnnnnnnnnnnnnnnnnnnnnnnnnnnnnnnnnnnnnnnnnnnnnnnnnnnnnnnnnnnnnnnnnnnnnnnnnnnnnnnnnnnnnnnnnnnnnnnnnnnnnnnnnnnnnnnnnnnnnnnnnnnnnnnnnnnnnnnnnnnnnnnnnnnnnnnnnnnnnnnnnnnnnnnnnnnnnnnnnnnnnnnnnnnnnnnnnnnnnnnnnnnnnnnnnnnnnnnnnnnnnnnnnnnnnnnnnnnnnnnnnnnnnnnnnnnnnnnnnnnnnnnnnnnnnnnnnnnnnnnnnnnnnnnnnnnnnnnnnnnnnnnnnnnnnnnnnnnnnnnnnnnnnnnnnnnnnnnnnnnnnnnnnnnnnnnnnnnnnnnnnnnnnnnnnnnnacgagaaagaactctctccaccagttagtaatgaaatgcagaagtgaaactgagtatcctatacctataatatttccttctaactctttctttgccattgtcactaggagagttggcatgcaaaaacatcttgagagttgcacattttaataaattatttaccttttccacacaggccttgatagtcatataaattcagtcttgctcagagttgtccaatcttctggcttctcttgtccacattggaagaattatcgtctcgggccacacataaaatatactaacacgggctccgagcaagatggcagcctccgagccggttaggctacagcttcaatatgattacccactgccagctaccctgcactgtacggccttcctggcttctggttgacttgaacaggcgccgagttgtcacagatctcattagtctcatccgccagcgatttggcttccgttctgggggccctccgaggcctctacctggagcagggkttcctgccccccaccgagagcgcatgcctgatgagagacaatgactgcctcagagttaaattagaagagagaggagttgctgagaattctgtagtcatcagtaatggtgacagtactcatttatcacttagaaaagcaatgaagtgggcatttaagttagaggaggatgaagaaactaacccagattacaactattcaaagaagcattggaagaagcaagagtacaataacaataatgagaaggtcttggatctagaacgaaaagcggtcacagatcagactataagcaaaaaaaaaaaaaaagaaacaaaagaaaaaataaagcaacctgtggcacaacgggtgatgataacgaacagaccccccaaaaaaaatcaccaaagaaaaaggagaaatgtgaatatgaaaaaaaggccaggaatcccaagtcacctaaagtacaggcagtaaaagactgggccaattagagatgtagttctccaaaaggctctgctagaaacagccttgttaaaaccaaaaggaaaggtggtgtaagcgtttgctcaaacgagagtcccagttcctcctcggagtctgagtcttgtcatgaatcaatcatgatggtcccagcaaagtcactttggaggccagaaattcctcagagaaattaccaactaagtaatcaaaggaaggaccctctaccaaaagtacaactgcagacaaactggctacaaaatctggctttagccttaacccccagcaagggcaagacctctggaacatcatcttctagttcagattctggttcagagtcagaggtgaatgcttgatgtcatcgagcaccctggagtgtgctgtggatttctaaaagacagtaggcctttttgcaggaagaggttgtccaggccctgggctgtcatcacagactgcaggtgctactggatggaagcgttctgggttaaatggtggcagacaggctcctggtccttctcccagtgtgtctctccccagtttagaaagaggatggggtagaggagagaaccttttttcttggaagggagctaggggacggggaatgcgggggagaggtcgaggacaagggcatcctgtttcctgtgttgtaaatagaagcactgacaaccagagacaacagcaattaaataaagtggtaacaaattcatctactgttttccagaatccggtagagacacactagaaggactgtatggtctgttaccgctgttaacagctgcccctcaagttggagaaaagattgcatttaatctttggaactaacatccagttacactcttctgttgtctctgattacaaggaaaaatattaagccacaatccagagacacagcaagtagatacagaaattctttcatccttacctgccttgagagaacctgggaaatttgatttggtttatcacattgaaaatggaaccgaggtagtggagtatgctgtgatgcaggagagcaagatcactgtattttggggagagttgattgatccaagactgattattgaatctccgattaacacatcaagtacagaacctgtctgaatatgaccgctccatcttatagtttatgaatgtcttgtttgtgaaagtgactataacttgaacttttttttttaagaggatttgaaagttgtatgggtttttttgttatcttcactttactgcataggaaacaatctacctcatcatttaaaatgacatgggtgtcggttttgtagacctttggtttttttgtcaggttcaatttcagttaacaaaatgtaaaacatgacattccctgcaaacgttgttgtataccaatacgtatggtttcttctcttttttaaaagtttttgaccatcaagcagcagttgtcagtaggagtttataataccaagaatgtgctgcatatcttgtctcattaagttttaagtaacatttaaaamtattaaagcatgttacttgacctaattttatagcatttgagttgtcccattaaatggagcatctcgtaaatttcaagtattttatacttggcaatggttaagagttaaaaggtagttggatttgtcacagacaatgagttaaggaatcctttcacgtttttcccaactttaaaattaaggattctcagggccctgtgtagagcagtaaaaataagacctcgtgtatgtgtakgtgtgtgtgtgtgtgtgtgtgtatgtgtgtctgtctgtctgtctggaggagaattgattggtgttccacttgggtgagagggttggctgtgagcctcagaccaggaaatgtgtcatcttgccaagcacctggctgagtgtgctggagtgaggatttgaacagaaacttccttttctgttattattcactacaaagcttaagtggccaaatatatactgtgaaaattggtttcttttaacaaaagatcagatccctccttcagctgtacacatttttaaataaaatcatatagaactaaaaaaaaatactaacacgaacgataggtgatgagctaaaaaaaattgcaaaaaaatctcataatattttaacagactttaccaatttgtgttggactgaaggttggccaagcttggtttagcttaagttatatggattatttgtacaacagaattgagttgatttctgcggtattttgaagagtgaaagtggttttttaaatttgtactgtacttatgttataaagcaatatgagtaatatactttatgtgtgagaccttacgtgctctaagaaatacttttgttaaggatttatatttatggtggagtattcgttacaacatggggtctatacatacttgtaaagaaattaaggatagagaatgcatcactcagaccccaatctttccattcatatagattgattagtcatcacatagtccatatttttctactatattcaagtcccagttgacaccttatgcatcatattccttagttcccaaacatgttcccttatttcttttcatgtaacttttaattactcatttgtccgagtctgaatcctgaatattacccttgataccattttgtttcaccacccctctccaaatgtagctttaagtttttcctgtttctttttctactcccagaacccacaattatagctctgaagtatccttccagtgagttttcagtatctgcatgtgtttactctagctcaaggtgtgtttttttttctgatatttatgtcattaattgatctctctgatgaatcttgtcagagaaatcttccagaaggacatttcagaccatattgctttctagattaaaaaacttcaaagacttccaagaatgtacaaagaattctcttgaattccttcctctggtcttcagggccctatgctatgacttcaacttttctttatttccctccctcaaatattttttctcttttcctttttatacttctttccttctgagctttctgtcactttttggcctgtacctagccatttccctgttcttgcatttccaaatctcatctatccttcgagagttggcttttacgtttgtcttccagctagaagtagtcttttcttcctgggaactcccaatggccttttcagtttgttattgtacttagtatcctttctgttgaactgtggttgttcatggttactggttgttatagttagttctttaacgcatggattcctgtctcattattctatttcttgtgtacgttttctggtacacgtatattcttaagacatataaagagctgtcttgttctgggggtatttcttagttgagaaaaataaaaccttggggatactttatatgctaaagataaaaatgattgtgtgttctataaagatctacaaaaatatgcttggaagtagttttgctaaaaaacaggtataagaaattagatatatagatgagaccttggatgacttgactcaaaccactttcagacagatgaaacgtaacttctaaatctttctagaaggttagattttacgatatgctcaatcatttaaacagttatttatatgagacttacaagcagaattttttttttttttagtatttttacaatatgcagttcacattttatgtactcctaatttacttcttgttattcttggaattttttaaaggattttcctgattcttaaatggttctattcttttttgcagttcttctgttaatgayatgttttttatttttttttagttctctgtttgtcctggcaaaacttatatttggaaaatgttctatttttcaggtatcctggtcagatataggaggactggaaagtatcaaactgaagttgsaacaggctgtggaatggcccttaaaacatccagagtctttcattcgaatgggtattcagccacctaaaggagttcttctctatgggccacctgggtgctmtaaaacaatgatagcaaaggctttggccaatgagagtggactgaattttctagctataaaggtaggrtgttaaattttttaatcgctactctctcttggcctcccccaacccccattctctgactcctacctttaggagaacgaataaaggcatcttaaggagcagtgattcttttttttttatttgatgttgatggcaatataatatagggagatgagtgataagaaataaattcgtgcatgtaatcagcaaatcatggtagacattgggaagactgctttatttagtttcttgattctggtatttcttatatccatgtgtaacagaagctaatctttttttttgtttgtttctacatttttaattatagacttttgcttaaccaggacttaaagataaacatgacagtgaattcaatatttacatacctagaattttcaaatgaacaagacacttgttatggtacactaaattctttaaaaatacttttccattcagaaagtatatgtgcattgtttttattctgaaccacacacacattttatttgttcattgcttcgccccgattaactgggatagataatctttcatgatatgtagttgtacacttactttaggaccagatattaattttatgtaacattatgatatatccagatacttaatccacacatataaaactgtaaatccatttctgtggactgtatcacaaaaatatatacctaaatagattaactatcaattcatttcagaaaaggcacatgatcatctgttttgatattaccagggaattttttacataacagaatgcattttctttagcgtgatcttggctcactgcaagctccgcctcccaggttcatgccattctcctgcctcagcctcccgagtagctgggactacaggtgcctggcaaattttttgtatttttagtagagacaggtttcactgtggtcttgatctcctgacctcatgatccgcctgcctcggcctcccaaagtgctgggattacaggcgtgagcgactgcgtccggcccagaatgcattttctgtcttagaacattgaaatcattggcagtttgaaagcacaaaacttcagagtagtttgtcaacttttggctttacttaagatttttatagaatgatacttaggtgtgattaagctgtttgttctttaagaatcagtatcttcaacatattttttattttctggaagatattggagagtaaagatgggggaggagaccatttacagcatgatcacttatggggaatcacaactacagttttaaaggtttcaggtttatttgttatttttttgagacatggtctcactctgtggcctaggctgaagtatagtggtgtgattatagctcactgtaacctcaaattcctgggctcaagctattcttctgcctcagcctcctgagcagctaggactacaggtgtgagccatcacaccagctaactttttaacatttttgtagagacaggktctcactgtgttgcccaggctggtctcaaactcctggcctcaagcagccctcccaccttaccctcccaaagtgctgggattataggagtgagctgctgcaacacagcaaaggttgcggttttaagggttgaagtaatgagtgattttgtcacttcccaggacaacttgatttctccttggtccttgtccttttatcatgtggtaatggggatggctgtgtttactggcattttctagtctttttactctcatctccattttttctgttcttaccttgtatattctacaattgtatattcatagtattagaatttttcttgtctactggaaatctaaaatttatttaagaacctgtgagcgaagtcctcatcagataagttttcgacttaactcttaagagcacacttattttcttacaaactagtatcttactttttctgtgatccaaggtaataattttagatactactaagactgctttctggactatcctagaattacttagaaatatatttattatcttttttgaacataaacatttcataaccttagacaatttcatttttagtctttttttcactatgaggaaattgtaaatgattctttgaaaggtttaactttgtacactgctatataaaataaccaggcacacattcatttatttgagctttttcattagatttttaggtcacagacagaaaagccacatgatgttaacaaattatcttcatcaattgagttcataactcagagattattacatgtcctagttactaattttgatttagtgtggatttttattcagtttagaatttagtgtggttcgacagtattattcaatttttgaatctgtatggaggatatacttaatgaatgatgggtttttatttttcaaattgaatatcccttatcaaaatgctttggacctgaagtgtttagattttgaatttttttgcattttgaaatatttgcattatacttcccagttgagcatccctaatctgaaaatttggaatctaaaatgctaaagtgggcattttctttgagtgtcatgttggagctcaaaacgttttgaattttggagcattttggatttttagatttagggatactcaacatgtactattcgttcaactctcctataggtttaaaatttttttaaatacaaagttgggaatatgaaaataatttgtcttctactagcattttcattggtccttttattttcatctattcagtgtttgtgaggaaagttttaaagtaacaataccatacagcttatgtatgagaaaatggagccaaagaagttgggaattcatactctgttctctttttttttgagacagagtcttgttctatcgcccaggctggagtgcagtggcacgatctcagctcaccgcagttcccacctcccaggttcaagagattcttgtgcctcagcctcccgagtagctgggataacaggcaagcaccccaacgcccagctaattttttgtatttttagtagagacagggtttcaccatgttgcccaggctggtctcgaactcctgagctcaggcaatttgcccgcctcaccctcccaaagtgctaggattacaggcgtgagtcactgcacctggtcctgttctgtttaattttaacttcctgtttaaaaaacttggcaacttttgttcaacccaaatgtttggtttcaacctatatatttgttttctacaagctttaagtgttaaaagttagtttgaaattttgaaataacaaatcttacacattttgaaagtgatcagaaaaagtagacatacactagaattctctagccagttaggaaacacaagtattttaaacagattgaaaggaaaaactccctatcacttttcacaatggtagttactacttttaatcttcaagatattttgatagacttacacttcttcctctaagtttatgaaagaaccttttagcttcctctatgcatcttttctgaacagggattaaaagatacgtactgtactcagggtggagacttcagcttggcttgtgtgagctcttaatgccctctggcatatatatgtgtttttgtgtagattgtgacatttgacatactgtgtaagtttagtttgttatctgggccagttacgtaaaatactttccagttgaaatttcctttctgcttctctcttgcttttgtctggagtgctacaatagattaattgccctgggatagctgcattgctttactatatgaagaactgtcactaattctgcaagaaatgtggttaggtctttgacagggattttcagcaaataattattctggtaaatacaggaatgtaatgagcttagtatatccttgactttttgggaaattttcttctctatacttgtctcagagaggaattgtataaaatagatttcatttccagaaaaacctgtggtttattcaaagtagtgcacaattcagagtacaggtgctccccaatttaagatggatttacttaagttttcgactttacaatggtgtgaaagtgatatgcactctgtggaaattatacttcgaattttaatccttttttttttcctctgagacgaagtctcactctgtcgcccaggctggaatgcagtggcgcgatctcggctcactgcaacctctgcctcccgggttcaagcaattctctgcctcagcctcccaagtatctggggttacaggctcccaagtatctggggttacaggcatccacgactatgcccgactaatttttgtatttttagtagagacggggtttcaccatgtaggccaggctggtgtcggactcccgaccttgtgatccacccgccttggcctcccaaagtgctgggattacaggtataagccaccacgccaggcccaaattttaatcttttactgagctagtgatatgcagtacagtactccctcatgatgcctggcagtaacagtgagccacagctcctggtcagccattgtgatcatgagtgtacacagccaacattctagaatgtactgtgttgccacgtcactttttccaactgtaggccagtgtaagcattctgagcatgtttaaggtgggctgatctaaaatatgatgttcagtaggttaggagtattcaatgctttatgacttaggatattttcaatttttgatgagtttatcaggacataacccccttgtaaatcaaggagcatctgtaattactatttgtcatttaactagatatattaatattctcttatcaaaggtacaagataatctgaaatttaaaaattccaaattcatctttaggcttctgttttttaatttttgcatgggaagctgcatagctcttttaattacagaatgctttaagattacaaataaggataatgattttaagaaggttaagtgacttttcgaaggtctaagtggtagtgatggcactgaaatttagtctcagaactttctgactcaagagtctgagctcttaaccactgtattatatatatgctcttccatttccctttttgttttttttaaaaaaatagaactagtgtccaatggcttttttcattaattacacaaagttaccagggaagatagtttaagtagtttctgtagggtaggtttagagaagtggaaagatgtttctgggaactggtttgaaaaataattttgtttctctaggacaaagaaaacagaaaaataacatggctttggtctaggagtaaaagttaataggaaagggcaatcacagccaaagatacaggaaactgttcaatgaaatagaagtgcctggaaaaagactgatggtgggataatggggagcttaaaatttacctgttagtatataatttgtgcccttgatattgagtatgtcacgatgaaaagaacactaagctgggattcacattgcttggatttacttcctaaccttagcactttttagttttgcagccttaagcaagttctgtaagtctcatttttttcatccagaaaagtataacatttgtacattataagctttggggagcattatgcttaaaaaggcaaatgaaaaagtttttggggggcataactccccactccttgagtgtgggcttctttccaaagaatttaatatcaaaagaggggaggggaagagctactgtacaatggtgaaacctgacaagccgtgccacagccagatgatcaaggttaacatcttcagtgataagtcatgttgacagtacagttgatgctttgaacaacacatttttttaatacatttttttttcagtatagttgcccttccttattgtaggttccacaaccaaacacagattgaaaatataatatttgtggtatatggaaactcccaaataaggagggctaactatgtgtcctcagattccacaggctgactacaggacttgagtatgtgtgcattttggtattcacagtggtcctggaaccagttcccgtagataactgataaatgactatatatacccttggataatgtggtgataatagcactttacttctgttgtcttcctcctgagtgctcataacccctctccaaccatgagaaaaattttaggcaaacccacgttaaaagacattctgtaaaatcactgactagtactcctcaaaactgtgaaggttatcaaaaacaaggaaagtttgagaaactgtcaccaccaagacagtacccaagaaagcatgatagctaaatgtaatgttacaatatcctgtgtaggatgctggaatgaaaaaaaaaaaaaaaggacattagggaaaaattaaggaaatctgaataactatggtctttagtttaataataatatctcaatctgggttcactgattgtaacaaatataccatgctaatatgagatagtaataataagggcaacagtgtacatgggtgggtgggcatatgcgagctgtttgtactatctgctcaattcttctgtaaatcttaaactttgctaaaaaataaaatatatttaaataaattttgaggtcagtataatagatctgggcatattgtagatgaagtaattgaagtttaaaaggctaactctgagttctgtactgcagtgaacaggatgcatggagtaaggcaaagaagagtcatgaagaagattgtggatttcatgggtgagggctttgatgacctctcctattcatagtccccctgcccataatgatagtggaaagttactgggaaaagccctgagaggaacttggctggggaacctgggtttggggctgccctgaacttgcctgtttcactgcacttctcagttgaagcctataaaggtgtgtgttagttctggccccaaacccagaccccaacactataaagaactctttctcttagtgttttggttattttttctttcaccttgggtgcagcttccagtttagtctcaccaggaactatgtcatttcatgccttttgtggatcctaagtctgtattctccttctataggtttattactgtttgggctcatctagagtctgaaaccttttgagtttctatttaatttcctttagagttttgtttttttttaactttaaaaattcccttgacttcagcaaatagtgttgtattatgtgccttatttgcttaaatcggcagttattaacatcaatattaaacaaagacatatacttagttttatccctgtttgaatgactattagggaataactaatagtaacctgttattcttgggacaagtggaatagttattgtgccattgtcagttttacaaggttatgaagaagttagatcagatttacttacatttgtcattatttgtacagtatactatgttaaagttgtggcatcatatgttaagactatatatatgttattttttttgagttgggcttttatcagttgataaagctgatatataaaaaaaagtcttgatgtgaaaatattccataaataacatttatctaaaagcagaaaatgacaataagaactataacaaaacctttagcatttggaatctaagaagacctagagagatttagaaaaagaaggataattttataaggaattttataagaaaaaggataattttaaacttataagaagtttaaaaataagcacattttattgttgggtttaattttttattcatggataaattagctgatgtagagaractagttttttctttctatctcaattcctttttgaatgaaatttagaggtgaaataaatattacaatgtcatgtctgtaatacttttaaaaatatttgtaaaagttttacaattggaatagcaaaaataacaccttctgtgtgtcaggcactgtgcatagtaaacaaagatatattagatgggctcctcgttatgtatcaactcattatttagtgggagagatatttgactcaacaactaacatgaagaaacagttaacagaatctgcagctcttggttgttgattgtatgtgagaaatgagaaagaaaagcagtcaaaggtgataaaaatttttactgtcaatgactggcagatggaagtatcctaactccagggagaaaaggagaaacaggttggaggtgagagagaaaataccagtgttgagtttgaaaagcctttgggacaaaatgttgaatatgtcctaaaggcagttgtatatatggatttgtagctcaagaggatgattatttcgagagatgaaaatatggaaattgagatgaaaatgtggaaattggaaatcagtgtttgagattctgcagacaagtcagcaaaggagactgagagtgacaaaagtagtcattaatagcagaaggggatttcatgggcatgtaaatatgtgtaaatacacattttacaacttgcctaattgtagccagcatggtccctgcaatgtaagttctgaagaaatgtgtcatttttctttttcctgaatagaatgaatgaatttggggaaggattgtattatactttwtgagaggaacagctcgaattctgttctcttccctgccagcccctcttgcatttcagggtttttacttgcccacagcattcttgcctagtaattaaaacctattttcaaactctttgaagtgctttcccagaatggccttctgtatgtgctgatactgtactttttattaattttcaagttcctttactcacattacatatatgtaattctatcttatgtgagtttggatttttatgagcatattccataacatttaaccatagttaacacttaggttaacgtgccttccccagacactttagaacttataaaaacttcatttgaattgtaataactaaaagcaccaggcaggtgtcagacacatttaaaaagcccttgggaggactgaaaaaaacccagtagtgattaaaggggcaaaattgtaagaacatgaggtgtaaatgttatactcgagtttgtgactgatatgatgtaaaataatgaagcacagtaaaaagataagtcaggtttacttctcactagattaatagaacagctggacaaatattttcacatgtgtttatgatatttttgttattttgtaaacttggatacttgaaatattggccatggaatgttaaaartaatgctattaaaaataactcaattaatggtacttattaatggcagtttttcttgatcattcttatcagtaaagcacatgctatctaggaggtaaaatatgtggcaagactaacatacattcttaaaagtaacataacttatgagcaaatacgggactgagactatactatatatacctaaactctgtagttagatataaatggtctcttgtttataacgggtactaataaaattcttattttcaaattagcctatgctactatctattaagaaagaattatacttcacctttgccactcgatctgctcaccagaaatacatttgaatttgaattgctggtactgtgtaaaatcttgttttaaatttaaaaaattatttttagcagccagctttgtctagccccaaattaactttcatctaaaatcttaacgggacatttcatttctcttttaaggacttagaacaggacatcataattcttagaaagagtgctggtttggaaaccacaattctgcattcttatcatttctgccatttaactagctctaggacttttggcatattactcagcctctttgtactttgcctcagttttaggtgagtaggttagactaagtgactcctaaagcccttctgctaataacattctatgagtaggtcacagtacttgtactttaatctgttgcatatcttttgtgccaatggtggccaaatatttggggcagtttctctaactgtcaagtgtaatagttaaaagacttgtatcccagttctgccatttgctaagctgtgtgactttggacaaattacttcacctctttgcacttaatatttttttctgtaaaattgtagtaacagtgtacaactcagaagactgttgcaagcagtaaaagggataagacatagtaagcatatagaaagattccacaaaattagtacatgctgattgctgctctcttccatttttaagaaattgatgtatgtttgacctcaaatggagcaaaaatatgacatcacagcttatgattccttaagttttctgttagtagtaaagtgtaatatttatctttgaaactgaatatagacttttaaactctttgtaccaaaatacagtgatttttggcaacttaaacttcaagcttaaaataacctcccttggtaatgaaattgctgtgacttctcataaaactcgagaccaacgcaacatacgagttcagctacttgggttgcattttgcaggccatctaggtaagattcatcagtacatagtcctgtacaaagtcatattttctagggaccctgcagtcttttcattatgccttattagtaacacttgacttgaattattccaatgcgtattttcttcacagtgccagattttcaagttagagtttcaaatgtcttaattttttttctttctgttttgttttgttttggaggaagaagcattgtttcattcttatccacaggtcctgtagtccacctttctgtggcagtggagtgacccttcaattggttgaggctttatactatattttcacattttcaaacaaagtatcaagaatgtttacctgtatgttggatatttattaataaaccatattaatctttctattgataccaagatattgacattgtacttagcagagaaaaaaatcatgaaatgaccataatcttgtactttctaacattaatgcctaggttatcttcatcatctacagagaacaatgaccatttttccaggttctctaatctctttccttcagttaagccagataattaaaaagcagtatatatacattcagttacattgcctgaataaagaaatctcttcactggattattattttatgccatatccttggcttttgcagacaattgctgtaagaacaacagcaataatgtagagttggcatgatggtaattgcaataaaaacagtgaccccagcaatttcctttctgattattgtcaggccacagtttgcctaggtagttgctctaaactgaataaaatctgcatacaaatttcttaccacccctaacccctcaacaaaaacacactctgctgtttatctaaagcttgttttattgggtgggccctgatccttgttttagtgttcactttcttaattccttgtccacagtcccccttgtgtaaaacttaatttaccacatgtaaatgaaaagtactagttttgtttatttgactttatattatgttatgaataggcatttcttgctttgtactacaatcgtttttacagccctatactacaggcatttcttgctttgcagtctagtacaaagcaagtatagggctgtagtatagggctgtaaaaatgattgtgcaaggtgaaattatgcagaatgatcttaatcagtgggaaaaattacaagtgttacataacttttaaacattttgtcaaaacattaagaacgttcattcttggttataaatgttgaggcagtgcattttggctgtataacagatcccttgctagtttccctacctcttaacttatttctttgactagcccttcattcacacactgacagcctagtactccattttatgaggacacaacaatttatttactcatttttatgttaatgaatttttaagacgcttccaccttttatttttattgttgttataaacagtgctcagtaatattcttattcattttcttttgtatattggtaagagtttctgtagggtatacgtatctagaagaagttgttattgttattggacatgtacgcttcaacattactagatagtttgaaattgctttttttgtgtgtcattaattttttttgcttaatttgtatcaatcaattttttaaatattttgaagattgttcactccttagcaattatgtcattgacatttttgatgacttttgatcttatagacaaaagtgaactctttcaaattatatgagattaatctacatcagaggtcatagtctttagacataatctggcctgcagtgtattttggtccagctccctagctaagaatgaatttttcatttttaaagggatattaacaagaagaatatgtgacaaagactttatgtggcatatacagcccaaaatatttactctctggctctttatatttcgtctttttagatcccacaatacgtggaaaactgccttcaagtttatttacctcagtgacggctgtgggtgtaaacattgtgtcgctgttacatagtctaacctgtatctaaaaataagcttgtaaaattgatttggtattgtttctttttcttcaaaatccttagaagtatgagaacattttgcctcagcataattaatgtttcattgtttgtctttttttaagttaaatctgtttggtagttgcattatttaaaaaattgagatatggaagtattggtgattaaattgtaattatgaagtcactctgtagtatcttaagcttaacaataattttattgtggaaacatgattgcttacagtttaagtaccaatgtacaaataattgatatactaattataaataattactcatccaaaacactgtgccaagcaaatccttgtttacttatggatacataatcactttgtctatttgtgtattctgtggtttgtagatttcagtcagtgatgtaatgatattatctgtcttaaatgaaagataatatttttaattattactcttcttttttataattttttatttattattattattatttttgagacggagtcttgctctgtcacccaggctggagtgcagtggtgcaatctcagctcactgcaagctccacctcccgggttcacgccattcttctgcctcagcttcccaagtagctgggattacaggtgcccgccaccacgcccagctaattttttttttttttttttttttgtatttttagtagagacggcgtttcaccgtgttagccaggatagtctcgatctcctgacctcatgatccacccacctcggcctcccaaagtgctgggattacaggcgtgagccaccgcgcccggcctatgattattcttttcatgtatctgtctcctaattagcctcaaatattgatttttagactatgtataatctattactctgaaacagttttttggggtttttttgtttgtttgtttttgttgtttttttgagayggagtttcgctcttgttgtctaggctggagtgcaatggcgtgatctcggctcacagcaactgctgcctcccaggttcaagcgattctcctgcctgagtctcccaagcttggattacaggcatgtgctactactcccagctaattttgtatttttagtagagatgtggtttctccatgttggtcaggctggtcttgaactcctgaccttaggtgatccgcccacctcagcctcccaaagtgctgggattacaggcgtgwtccactgcatctggcctgaaacagtttttcaaaaagattaatcatcttgggttaatagaaaaaaatcaggcagaaagataaaactacttctgtcattacttaaggattcctgtgtttatgctattaggtatctccctcatcttaattgaatatgatgcaaggcagtgtccttggtggaagctggattctgtcagtctgaactttgagatgttcttcctatccctttcttatttttgctcttaacttttctaccctgattctcatatcttctaacctactcgtctgttaccatattatcatatttcaatatttttgaagcagcattgtgaaggtaattgtcttatttcaggctgctataacaaaataccatagactgggtggtttaaacaacagaaatctatttctcacaatcctggaggctgggaagtccaagatcaaagtgctggcagatgtggtgtcttcttagggtttgctgcttggctttcatgtggtcatcttgacatagcctcacatagtggaaagcagagagagagagagagatatcaagctctcctgtctcttcttataaggacactaatctcattcatgagggctccaccctcatgaactaattacttcccaagggccctgtcttctaatatcacattgtggattaggatttcagcatatgaatttgggagggacaaatttggtccatagcagcaccatacaaaaacagtattaaaggtggtctcgttttcatcaggcatgtttccaacttgaaagatttgttaatgtccataatttttgtctgtttgccatttctgttcttttcccttttctcctcttttcttttgcattcagtgcattttgatattgtatattatctcctctattatcttaatagctaagcctctttattttacttaaaaaaatacttgctcaagcatctatactatacatacttacattctgtcttcaaataacactgcaccactttatttatagtttaagttcttacatcaatatacttttgttttcttgtgctgtattctgtattttacctctaaatacacaataaactttatattgtagagttaaaacttttagtcagttacctcttaaagaaattaattgaaaaaagagctattctatatttattcatatatttgccgtttctaaccctcttcatttctttgtatagatctaggtttccatttgatataaattcccatcaagctttagaaattgttttaatatttcttgtagtggagatctactagtgacatatcctctcagcttctgtttgtctgataatatcttgtcctcacctttcatttttaaggatatgccattctagcttgacaggttttttcttgcagcacttgtcctccattgtcacttggcttgaattgtttctgataagaagtcagcagtagttctttgcttacagatatataatgtgttcttatattctcatttctcttaagactttctctttcttatcagtttttagtaatttgataatgatgcatcttgatgtagtttccttacttggatttcactgagcttttttggatctagttaatatttttaaaaatcaaatttgcctatgtttttgtcatcttcttccacttttttttcctgacttttcaattgtatatatgaggggacttcaaaaagttcatggaaaaatggaattaaaagataaaaaatataaactttatttctcaacataaggtccatcaagttcaagatacttttgtaagtgatgataccagtcatttagtctatccctaaagaactgagtgtcctgggaaattaatcatatcagtgttatattttttacattagtaattgaataaaaatgggtgccctttaaaaatttttaaagattaagaaacaaaaagaagtcagaagttgctaaatcaggattgtaagataaatgcctaatgatgtcccattgaaattcctgcaaaattgcccttgtttgatgagacaaataagcataaactttgtggtaaaggaggactctggtgaagctttcctgggcatttttgtgctaaagcttttgctcactttctcaaaacacttgcagtcagcagatattattattctttggaaagtcaacaggcaaaatatcttgagcattcagaaaaactgttgccatgacctttgctcttgaccagtccatgtttgctttgactggactacttctatctcttggtagccattgctttgattgtgctttgtcttcaagatctgtagagctgtgtttcatttcctgttacarttctttgaagcagtacgtcaaaatcttgatcccacttgtttacagttttgattgaaagctctgcccttgtatgcagctgatctgggcataaggattttggccctaatcatgtggaaagtttgcacaactttaatttttcagtcagaattgtttaacctgaaccaattgcrgtggctctggtggtgggtattgtttgtgctgttaatcatttatcttcttcaattagggaacaaacaagatgagttttttccttgcaaactgatgtggaaggtcagctgctggggkcttcatcttcaacatagtcttgttctttcagttatccatttgtaaactgctatctcattagggcattgtctcatgaacttttcataaagcatcaatagttttaccatttttctatccaagcttcaccataaatttgctkcttcttgcttcaattttaacaaaattcatgtggctctgacaaactgttttcaaactggtatcttacccttagtgcctcaaactggactctgttcagacatgttttaacaagttagtatgaatttattttggtgcaaaaataactgaaatccatgcataatttttaaaataatacatcttttacrtgaactttttgaagacccctcatatattaaacctcttaatattgttgttattaagggacctgtgtctctgaggatgtcatktttttttttgtcaatcttttttgtttctatgcttactttgaatggttgttctgtctccaaatttactgatttttttcttcagcttgtaagcttatttagtgcactttaaaatttccaatattatatcttttagctgtagaagcttcatttggttctttttatgttttctatcttttcctcataattttaatgttttccttaaaattcttttttgtcttcttctttttttaaaaatttcttttggccaggtcaataactgcatagtgttttcctgaaaatttttgaaaatatttacgatacctgtttttaagatcttgtttgccaattttatcacttcttttatttctatatctatttgtattgaactttttttctccaatrtttttatatttggatcaagtttttgtttatttctttaagatctctaaactttacagaaaatttgcaagaacagtcacaaacatttttttcttcaaccatttgaatttagttgctgccatatgccccatcacagctgaatacttcagtgcgtatttctacaaaaagcaaattctcttacataaccacagtgtaaccataaaattagaaatgagcattattattgtcactcaagttttgtcaggggtcccaataatttcctttatgacaaaataagttagtccagaatcatgtgttgcatttatttgtcacatccgtgaagatttcttcagttggtnnnnnnnnnnnnnnnnnnnnacatccgtgaagattcttcagttggtaacagtttcttcagtcttctttactttagtgaccttgacatttttgtagattgcagggtagttattgtgaacaaacatctctaaattgagatttgcatgacattccctcatgattagagttaggttattcttagaaaggatgctgcattcttctcattgcattctatcaggtgatacttgattttaacttgtcgtatttctagtgatgttaactttgattatggtggtgtcagccaggcttcttcattgtaaaattactctttttcctgttaagttaatattttgtgggaagttattttgggactatataaatatcctgttttggccgggcgaggtggttcatgcctgtaatcccagcactttgcggggctgagatgggtgggtgacctgaggtcaggagtttgagaccagcctggccaacatagtggaaccccgtctctactaaaaatacaaaaattagccaggcgtggtgacatatacctgtaatcccagctacctcaggaagctgaggcaggaggatcacttgaacctgggaagcagaggttgtagtgagtggagatcgcaccactgccctccagcgtgggtgatagagtgagactccatctcaaaaaaaaaaaagaaagaaagaaaaagaaataaataccctatttcttaagagatttttaaatttatttcgtttttatgggatcataaattcctttctattcagtggtttatgatttctcagtatcactatttgtattgatgtctcagttgcaccagtttggctagcaggccctcttttaagctgtcttttgtgtgctcttggcattaattaatcgcagatggaaagtcagttgtaactctgtgcagctttgacattttacatagctgagttaataaagtgcttagaacagttcatggcacatagtcaaggttcaatatatgttagtacttatgattgcaattatacattttttattttaatcattttggagtacagtatttttaatgagctacgtatttatttttgtattttttattggtgtatcatagttgtacatattttgcaggcacatgtgatattttgatgtgtatacaatatgtactgatcaaattgggataattggagtcttcatcacctcaaacattgaacttttcttggtttcgggaacattacaattctcctcttttagttatcttgaaatatgcagtaaattgttgttaactatgatgtctctactgtactactgaatactggtacttactccttctaactgtggttttgtacccattagccaattttttttcatctccctcctcctctcttccctcctcaggctctggtaaccaccattctacgctttaccaccatgagatccacatttttagcttgcacatatgagtgagaacataaagtatttgtcttttctgtgcctagcttattgcacttaacataatgacctctcattttatctgcgttgctgcagatgacaggatctcatttttttaatggctaaataataattgatgaacacttaggttgactccataccctggctgttgtaaatagtgctacaatagacataggagtgcagatatctcttggaaagactgctttcctttcttttggtagtaaacccagtagtggaattgctagatcatatggtagttctgtttttagttttttgaggaacctccccactgctttccgtaaatggctatactaatttacattcccatcgacagtgtacacatgatttcctttctctgcatcttctccagcatttcttatttttgtctttttgataataaccattctaacttgcataagataagagatcattgtggtcttgatttgcatttccatgatgattatgatgtcgaaattttttcatatagttattggccatctttcttttgcgcattttttttattggattatttatatttgctactgagttgtttgaattccttttgttattctggttattatttctttgctgaataggtaatttgctaatattttctctcattctgtagattgtctcttcactttcttaattgtttcctttgctgtgcagacactgttgaggtaatttgtctttttttttgcctttgttacctgtacttttgaggtcttgcccagaccactgttgtatagcatttcctcagtgatttccccaagttttcttctagtagtttcatagattcaggtcttatgtttaagtgctttttttttttttccttttgagacagggtctcactctgtcacccaggctggagtgcagtggtgtgatcttagcttacttcagccttgaactccagggttcaagcaatcttcctttcttagcctcctgagcagctaggaatacaggtgtgaaccactacacctatttttttaaattattattattgtagaggtggggtcttgatatgttgcgcaggctcaaacttctggcctcaagtgatcctcccacctctgcttcctgagttgctgggattacaggagtgagtcatgtgcctagccacatttaagcctttaatacattttgaattgatttttgtttgtggtgaaaaatgtggatttagtttcatccttctgcatatggatatttactttttccagtatcatttattagagactgttctttccccagtgtgtgttcttgatgcccttgtcgaaaatgagttgactgtaatgaatgtggatttatttctgggttctctcttttgtttcattggtctgtgtgcctgtttttatgccagtaccatgctgttttattactgtagctttgtagtataatttaaaataactttgttttatgcttccagcttcrttcttttagctcaggattgctttatctactcagggtcttgtgtggatccatatgaaatttaggattgctttttctatttctaccaaagaatgcccttggtattttgatagggattgagttaaatctgtagattgctttgggtagtgtagacattttaacaatacttattctaattcatgagcrtgggatatctgttcattttttatgtgtgtcctctttagttgttttcatcaatgttttatatagttttccttgtagagatctttgacttctttggtcaaagaaaatttattcctaggtttttgtttgtttgttttgaagttattgtaagtggaattgctttcttgagttctttttcaaattaattgctattggtgtatagaagtgctactgatttttgtatgttgattgtgtatctgggaatttactgagttcattagttctaagagtcttttggtggagtctttaggtttttctacatatgagattatgtcatctgcaaacaagcacaatttgacttcttccttttcaattcgaatgccctttatttctttctctttcctaattttggccaaaacttgcagtattatgttgaatagaagtggtgaaagtggacatctttgctttgtttcagatcttggtgtaaaggctttccatttttccctgttccatatgatagtagctatgggcttgtcatatatgccctttatcagattgaagtatgttccttcaataccctgtttattgaaggtttttatcatgaagggatgttgaattttacccagttttttcagcatctgttgaaatgatcctatggtttttgtccttgattctgttaatgcagtgttcaatgtttattgattcgcatatgttggttcatccttgcatccctgggatgaatcccacttgattgtggtgaatgatctttttaatgtattattgagtttggtttgctagtattttttgaagatttttaaatctgtgtttatcggggatattgatagttttttttatttgttttgtctttggttttgctgtcatggtaatgctgccttcattgaataaatttgaatgtattctcccttcattttttttgaaatattaataattagcagaatttatgttaattctttaaatgtttggtagaattcagcagagaagacatcaaatcctgtgcttttctttgatgggagactttttattgcttcaatcttcttgttattgcttttctgtttttttcatggttaagtcttggtaagttgtgtccaggaatttattcaattcttttagattttcccatttgttggagtatagttgttcataatagtttctaatgatcctttgtatttctgtagtatcagttgtaattttttctttctcttctctgattttatttatttaggtgttcttttttttaggtagtctagccaaagctttgttgattttatggtttcaaaaatcagcttttcatttgttgatcttttatttttttagtctgaatttcatttatttctgctctttattatttgttttcttgtagtaattttgggtttggtttgttcttgcttttctagttccttgaagtacattattagattgtttctttgaagtcttcatatttctttgatttgggtgtttaaggctttaaacttccctcttagtactgcttttgtgtatctgtagattctagtattttgtgatttatttcactggtttcaagaaattttaaaattttctttttttttggtggactcattgggcattcagaaatatgaactgtacagaaactgtacagtttccaaagttgttcttgttactgatttctagtttttgttgtggtggttgtggtcaaaaaagatgcttgatatgattttgactgttttgaatttgttgagatttattttgtggttaatgtatggtctatcctggataatgtgccatgtgctgataacaagaatgtgtatattctgcagcagttagatgaaatgttccgtaaatgtctgttaggtccacttggtgtatagtttaactccaatgtttgtttgttgattttttgcctgaactgtttgttgctcaaagtggggcattgcggtcccctgcaattattttattgcagtcattgcagtctgtctctctcgagagctattaatatttgctttatatatttgggtgctccactgttgggtgcatgtttttaattttgttatatcttcttgctgatttgacttttctaaatcattatataatgactttctttgtctctttttacaagttgtgacttaaaatctgttttatctgatataaatatagctactcctgcttttttttggtctccatttgcatggaatatcattttccattccttcactgttagtctatatgtgctgttagaggtgaagagagtttcttctaggcagcatatagttgtgtcttttttttttttttggagatggagtctcgctctttcgccctttcgcccagactggagtgcagtggcactctctcggctcactgcaacctctgcctcctgggtttaagcgattctcctgcctcagctttctgagtaactaggattacaggcacctgccaccacgcccagctaatttttttttagtagagatggggtttcaccaagttggtcaggttggtctcaaactcctgacctagcgatccatcccagcctcccaaagtgctgggattacaggtgtgagggtcttgttttttaatccattcagccactcttggtcttttttaactagagaatttagtctatttacattcaattttaatattgataggcaaggccttactttgaccatttcgatacattttttttttggtattatgtaactcttcttttcgtttccttctttcttactgtcttcttttgtggctgagtgatttttctctggtagcatgttttaatttgttcttttttatttttagtgtatatattatagtttttagctttgtaattaccttgagtcttataaaaatattatattaattatttcaaactggtaccaacttaactttgrttgcaagataagaaacaaatgaaaagaaaaatttgtacaccttaacttcctctcctccaacattttgaatttttgattttacaacttgctgtttttatattgcctcttaacaaattgtacttgtaattatttttaattgttttgtattttctttttactaaagatataagtgatttaagaaccatgattatcatattagtataacaataacgttaatgttcttttcttttggtttgaagaactctgattagccttttttataggacaggtctagtaataaatttcctcagcttttttttttttttttttttttggcctgggaaagtctttatctggcctttatttctgaaggatagttttgctgggtacacwattcttcgttaagttttttattttctttcagcattctgaataatttcactccctccaaccctaaggttcccactgaaaattctgctgccaagtgtattggatctcccttatatgttatttgtttcttttcctttgctgctttcaggatcctttatctttgatctgtgtgagtttaattataaatcttgggttgtttcttattttggagagggaaagttgagcctggttggtgacctttaaccttcatgtacctggatatttatatcttttcaagctttggaaagttttttgtatttctttgaataagctttctacccctttgtctttctcagtttttttctttcatttcagtaacctgaatatttgttcttttgatgttgtctcatagctcccataaaccgttcatttcttttcattccttttgcttttttctcctctgactgtgtattttcaaatagttgggcttcaagctcactgattctttcttccttttcatcagtcctgctgttgatattctctattccatttttcattttgctcattgtattttccagctccacaatttttgtttgattttgtttatgatttcagtatctctgttaaatttccctaatacatttctgaatcgattccgtctgttttcttgaagttcattgagctctcttaaaacaggtattttgaattccttgtctgaaaggtcacatatctctatcactttagggttggcctctggtgcctcatgtccatttgttgagatcatattacccagaatcttcttgatgcttgtgaaattgcaggctgtctgtgcattgagggattaagtatttattttactcttcacagtcttcctttgtttgtgcctgtccttctttagagaccttccaagaattctaagccaactgagtattgtgtttcctgagcctgtgaccacttcagctatctaaacactaggagactgtattagggttctccagagggacagaactaataggattatgtgtatatgaaaaggagtttattaaggagaattgactcacatgatcacaagtgaaaatcccacagttggccatctataagctgaggagcaatgaaaccagtagtggctcagttcaagtcccaaagcctctaaggtagggaagctgacagtgtagccttcagtctgtggctgaaggcctgagagccaatggcaaaccactggtgtaggtctgagagtccaaagggtgaagaatctggagtttgatattcaagggcaggaagcatccagcacagatgaaagccagaagactcagcaagccggcttatttcatcttcttccacctgctttttctagccacactggcagcagattggatggtacccacccaaactgagggtggggctttgtcgcccagtccactgacccaagtgttaatctcctccggcaacatcctcatagacccaaccagaaacaatattttgcatccttcagtccaatcaagttgacaattaatatttaccatcacagagactctctgagcccaggcttgccacaaatctcacaggatctctttggttgatatggctttctggcccagatggacctggggtagacccaaggcagatactccggctgcgtggaaatgctggccagggatctgagtccagaagactgtcccaatcacccagatgagtgtgcctttcagcatatttctgcacaggcaggaygggctgctaactgcagtgagagggcctggagttgagactgggctgcgttgggatctgctgtgtgaaggagactggccccgacttatttgctcatatcagcatgcatcactcagctggtcattgcaaaagtgcttgactgtaacagggsggtctggtactgagactgggctcccttggaatctgctgtgggatggaggttggtgttcttgtcacattggctcagatgggcatgtgtctcccagcaggtccgtacatagatgggatagctcccagactgcagcaggaggggctggagctaagactgggcccccttggactctgctgtagggacggatttggaaagcttgtcttgttggctcagagtggcatgcatctcccagcakgtctcagcacagataggatagttcctctactgcactgggcggggcttagactgggtctcctcaggatatgttgtgggatagaggctggtgagcatgtcggggaggatcagagtyccaggccatgagatttgtgtgaatctccccctggtttcttgtgtaagcaactataagctgggacctcagctagggaggcctggagcagtgtcacagttcaacttccaggttcactactgagaccagttatcagtgggctgatgagcttttctgccaaggcattagtgtgcatgatttctctgaaccctttggcagatgattttggttgcaggctcaaggtcaaatggggctatagtcaagccccttgagagacagggctacttctgggcttgaatgcaaaagcaagctcagtggagcagatcagtcacttgggtgttagtgtaccctctcaaagtgaccctcctgtgtcttagggtttcacaattgtggatggatggataattctttttattgtgggcatatatgagcaggttaccttctatttcgccatcttggtggtgtcactctatgaactacatacttaagagaaattgctacacagaatatattgagcatcctttttttttttatgaattaagtcattatcgtgaacatcaaaaatagtaatgttactttgggaggccgaggcaggcagatgacgaggtcaggagattgagaccatcctggctaacacagtgaaaccctgtctctactaaaagtacaaaaaattagccgggtgtggtggcgggcacctgtagtcccagctacttggaaggctgaggcaggagaatggtgtgaacccaggaggcggagcttgcagtgagccgagatagcgccactgcactccagcctgggtgacagtgcaagacttcatctcaaaaaaaaaattagtaatgttaagtcaaatttgaattattctacaccccactctcatcttcacattttgctatccacaacacattaattttatatttttaattgtttttgtggctatcttctcatttccnnnnnnnnnnnnnnnnnnnnttgcactcctttgccttaaacttgttcctcattatttttcccctttactattctaagcattttataactgttctctcgacttctggactcttaatattcctcctaaacatcgtttatactgtggccagaatcatctttcattaatacctctgttatcacttaactttcataaaacccttcctattgcttacacgataaaatctgaacccctgcctcccactttaagtagctttattgattgccacaatctccctgcaccctatgattcacgtgtagtaaattcttatatcagttctgttcaagtgtattcattgtatgtaatttaaaagtcaatgaactcagcgtaaagaccttaagagctcttctacaacaaagttcatatagtaacatctattttggctcatcagagacctttttgatttcttcctgggtcttgatgtatttcatatttttgaggatgtgaaataaatcaactgaggactaacctgaaatgttactttctctaggaacatttcttgactctaaggagtttcttctgtatgttttgatggtacctgtgcattgctctatcatagtacttgtcatacagtatgctaattttccttgtaatatggtgttttatatgaagccaaatacygcccataccagtttgggattagttaacattctgctagggtttgcctttgtgtttcagtcagtcagatttttaaaaattaatataaattgtttaggaaatacttaagtcagtgtcttgttacatcctcggaattggctggacccgtgatctgcatggaatagaatatgaatcttgttcaaagtaaggggtgtgtgtatgtgtttgtgcatgcatgcatgctcgtgcgcacacacagagagagggagagagagacacacacacatgtctcttgttcttcgggatgtatgaggaactgtgtcagaatagccagatgctcggagaaacatccccacaactgaggtcatctatcattatgggacaatttaattcataacttcttgtggtgactgtttatcttaagagagtagatatgtatgtggtaaaaaagaaagtctgctgtgtttcttacaatatttgatattctaggtacttgagaaataagaaatattaaagttcagaaatattaatgtcaaaaaatgtgcatcttcagatctggtaagtagacctgcttagagctagccagtggttaggcctgagaaatggctgttccatcttctgtgcctagcaccacatctgatatagtgtaaaaatgtggatagagttatagacagatgatgaataagttgttaaaatattatgattagtcacagcctttcctttgtattgatgtgtggtttttggaatgtagaatggctttaacttttaaggcacaaataacaaacagagaaaataagcatgctaaagggattaataagcagattttgtttattttctcttttgtgtatattttttctacttcattggaagaaatatacatgattgcatttataaagacactgaacagttgttttcttttcatgcaggggcctgaattaatgaataaatatgttggtgaatctgaaagagcagttagagaggtaagaaattgtgcctttagtggcactcagcacaggagaatcacacttctgtcctgtgcagcttcccttttgttttaggtaacagactttggcatttccgaagtcagatcttagtggtatttttttttcttcaggtaaatattattttattatttaaaaatgcagttttgatcatctgcaatacttcagttttgtttttaaacatcatattaccagcccttttaaaactatcattttttctgataataatagccagcatttctgttaaaatagttaatgctgttactaatagttaataatacctatcatttattgagctcttactgtttcaggcattgtgccaaatgctttgtgttctttttaaaattcaattattaaaataactttctgaggtaggtgtttattatctccattttatagatgtagaaatcgaggcttacagaagtgaagttaactgctgaaagtcacacagttactagtagtgcagctgggattttaactgaaattttctgattgcttaactgaattgcctccttcacacctatgtgaatatgtattgatagtcttgtctctttaagcactattgaaggggatacttttacatccattataaagttctgaacatctattacaaggtctatacaaagtgactgggcttgttgacttgtacctaataggtttggttctaaatatagttttaaaacaaaccaactacagaattttctagtgtttgctcatctttagcyaatgtggcactctttccaccagaccttccgaaaagcaagagcagtggcgccttccattattttctttgatgaactggatgccttagcagttgaaaggggcaggtaagaagtatttaatagcactgctattacataataatatgatgttacataataatagcaattatggtataaatagcattttgtatacaacttttatctattaatacatttggcctaaaaaagttttcagtttttgtaattttttcctcttayacccattaaattatttcatgtaattactgtatagtacttttatctatattggataaaaaccactgatacctgtctgggcatttgagttaatttttatagtttatatcaacacatacttcttagtattgtctatcaaaattagggttattgtaaacatataattaaaactgtaaacaaaactggattaatcataattacttcttgtagtagaacaaaattataaaatacgttacacagattttaaaattctctggaataaatgtttcctaaagtaaaattaaatagaatataaattagtattaatagttttgctccaaaatctcaggcagtaaagaggattatctatgatgtcatttcaaacaaatatatayacacacacacacacacacatcagaactgttcataagtatgtttttttcctctacaaatgtatagcggtcctttaatatgttctacaagtggttcatgttgggtaatgtaaattcatgtactttgtgcatagcttcttgatgtgtatattgattataaaatttttgctggtggtaattacagtgaagggtgaagacaacttacaggtgtcagtagtaagtgtgatatgaaacattgctgttatcatccttcttaattagagctgcctcatgtgatgagagtataaattgtcattaggaacctatcattaggaggtagactgctatattagtccattttcgtgctgctgataaagacatactcgagactgggtaatttataaagaaaaagaggtttaatggactcacagttccacgtggctaggagacctcacaatcatggtggaaggcgaaagacatctcttaggtggtgacaggcaagagagaatgagagccaagtgaaaggggaaaccccttataaaaccgtcagatcgggctgggcgccgtggctcacgcctgtaatcccagcactttggcaggccraggtgggcgaatcatttgaggtcaggagtttgagactagcctggcccacatggtgaaacgctgtctctactaaaaatatagaaattagctgggcgtggtggtggttgcctgtaattccagctacttgggaggctgaggcaggagaattgcttgagcccaggaggtggaggttgcggtgagctgagactgctccatcgcactccaccctgggcaacaagagcgaaactccatctcaaaaaacaaaacaaaacaaaaaatcagatctcgtgagactgattcactaccatgaaaacagtatgggggaaaccacccccatgattcagttaatctcccactgggtccctcccacaacgtgggaattatgggggctacaattcaagatgagatttgggtggagacacagccaaaccatatcattccgcccctggcccctccaaatctcatgtcttcacatttcagaatcattcatgccttctcaacagtccctcaaagtcttaactcatttcagcattaactcaaaagtccacagaccaaagtctcatctgagacaagtcaagtcccttccacctatgagcctataaaatcaaaagcaaatttgttacttcctaggtactatgggggtacaggcattggataaatacacccgttccaaatgggagaaattggtcaaaattaaagggctaaaggccccatgcaagtccaaaatccagcagggcagtcaaatcttttttttttcttttcttttttattttattttattttattttattttattttattttattattattatactttaagttttagggtacatgtgcacaatgtgcaggttagttacatatgtatacatatgccatactggtgtgctgcacccattaactcgtcatttagcattaggtatatctcctaaagccatccctcccccctcccccgaccccacaacagtcccccgagtgtgatgttccccttccggtgtccatgtgttctcattgttcaattcccacctatgagtgagaatatgcagtgtttggttttttgttcttgagatagtttactgagaatgatgatttccaatttcatccatgtccctacaaaggacatgaactcatcattttttatggctgcatagtattccatggtgtatctgtgccacattttcttaatcctgtctatcattgttggacatttgggttggttccaagtctttgctattgtgaatagtgccrcaataaacatacgtgtgcatgtgtctttatagcagcatgatttatagtcctttgagtatatacycagtaatgggatggctgggtcaaatggtatttctagttctagatccctgaggaatcgccacactgacttccacaatggttgaactagtttacagtcccaccaacagtgtaaaagtgttcctatttctccacatcctctccagcacctgttgtttcctgactttttaatgatcgccattctaactggtgtgagatggtatttcattgtggttttgatttgcatttctctgatggccagtgatggtgagcattttttcatgtgttttttggctgcataaatgtctttttttgagaagtgtctgttcatgtcctttgcccactttttgatggggttgtttgtttttttcttgtaaagatagtcaaatcttaaagcttcaaaatgatctcctttgatccatgcctcacatccaggtccccctgatgcaagagaggggttcccatggtcttgggcagctctgcctctgtagcttggcagggtacagcctccctctggctgctttcacaggctggtgttgagtatctgcagcaacatggtgccacaggcacatggtgcaagctgtcagtaacctaccattttagggtgtggaggatcgtggctcttttctcacagctccactaggtggtgccccagtggggactctgtgtgggagctccaaccccacatttcccttccactctgtcctagcagaggttctcataagggccctgcccctgcagcacacctctgcctgaacatccagggatttccaacatcttctgaaatctaggcggaagttcccaaacctcaattctcgacttctgcacaaccgcaggctcaactccatgtggaagctgccaaggcttggggcttgyaccgtctgaagccatggcccaagctgtaccttgaccccttttagccatgcctggagcggctgggatgcagggcaccaagtcctgaggatgcactcagcagtggcagggggggccctggacctggcccagaaaaccatttttccctcctaggtttgcaggcctgtgatgggaggggctgcagggaaggtctctgatcttccctggagacattttccccattgtcttggcattagcatttggttccttgttacttaagcaaattactgcagctggcttgaatttctccccgggaaatgagtttttcttttctactgtatcttcaggctacaaaattccaaacttttatgccttgtcacatcttgactgctttgctgcttagaaatttcttccaccagatatcccaaataatctctctcatgttcaaagttctacagatctctagggcagggacaaaatgccaccagtctctttgtatagcaagagtaacatttactccagtttccaacatgttcctcattttcatctgagaccacctcagcctggattttattgttccatattgctgtcagcattttggtcaaagccacttaacacgtctctaggaagttccaaattttcccacatcttcctgtcttctgagccctccaagtctctaggaagttccaaactttcccacattttcctgttttcttctgagccctccaaactgtaccaaccttcacctgttactcagttctaaagttgcttccacattttcaggtatctttacagcagcaccccactctaccgttaccagtttactggattagtccatttttatactactatgaagaaatacccaagactggataatttataaagaaaaagaggtttaatgaactcattagttccacatcgctggggagcctcacaatcatggaggaaggtgaaggaggaacaaaggcatgtcttacgtggtggcaggcaagagagcttgtgcagggcaactcccctttataaaatcattagatcttgtgatgcttattcactaccacaataacagtgtgggggaaaccacctccatgattcgattacctccacctggccctgcccttgacacatggggattattacaattcaaggtgagacttggttggagacacagtcaaaccataccagctgccctgctttccacccccctcacatttggtattccatgaatacttaccagtctttttgctttgtgaagtgaagcactcaagcccttttattacttacgttttaagatggcacagagtgttacaaaactcaggtttacctaactacaagagaagaaaagccagagaattttgctgaagtagtgtgaccttccacagttatgtgacatcagagacatctggttttggaccctaaaaaggaacaggtgggagggatatcctgttaaatatgaaccagatgggaggtagaatatgtagcaaagttctcttaaaatgtctctgaaataaagtgatgtgagaaaccagacaaggcactttgtagtaatatcttgctttcwtaggagtttagctcagtaggaattaccagatacataagagatgctaatgatttgcagcttctagatgttatttcctctggtagtcttcatcaaattgaacttttcagagaacacatgtgtttagtgtatacctccctctctcaatggctcgtcatgtgttacttaatgaagggaggcagtttacatactgagaaattcagtcattagtcaatttcattgttatgtaaacatcatagagtatacttacttataaacctggatgatgtagccttctacactatataccatatggcctattgctagatagtataacaatcatctgcagtactttgattttgttttcaaacatcatattaccagcctttatttttatgaaataaagattttttttaaaactatcatttttttctgataataatggccagtatttctgttaacatagtcaatgttgttactgttacttaatcatacctatcaattattgagctcttactatgtaagatatatatagcaataagccatatggtatagcaataagtcatatggtatagcaataggctatattacctataccaggtagcctggtcctaggctactaacttatacagcatgttattgtactgaataccattgtaggtagtggtaacaaaatgcttagatttgtgtatataaacatacaaaagttagagtaaaaagacagtgctgtgatcttatggtaccagcttcatatatgtgattgccattgacccaaacttcattatgtggcacatgactgtagaaataaattctatgcaatttgttttgtacagaaacatttctggtcataatttatcaagttagttggcatttcggaaagcaaagatgaagttccattcaaggaaatagagtgctgatgggtcccaattaaagagttttggttgtactctatttgcactgaatcttatgtagtttgttttttgtaaccataaaactctcataaagtgactttctgttttcaggtcttcgtctttttttcctaattatatgatggatcattattgcctataagtgattgttttatctaattagtttgctgttacttgaaatctaaaacaaaaggtattttgttcatttttttgttctttggctatttgaattgaacacaatggaaactgataaagaactactgatagatataccagaagtataaaattcccaagatactaaactaattttatgcattgttaaactactcatggaataggaaaacagagaaaaatttcataaattaggaggcatttctatgtaatattaggctgtaaacagtcactgatttaattcgtccaaagctatcatctgttttctatgataacattcagatcaaatcatataattagtcccaaagtgacaatgcataaagaagaatgtttctgggctgggcacagtggctcacacctgtaatcccagcactttgggaggccgaagtgggcggatcacgaggtcaggagatcaagatcatcctggctaagatggtgaaaccccgtctctactaaaaatacaaaaaattagctgggcgtggtggcagacgcctgtagtcccagttacttgggaggctaaggcaggagaatggcgtgaactcaggaggcggagcttgcagtgagctgagatcgcrccactgcactccagcctgggtgacagagcgagactgtctcaaaaaaaaaaaagaagaagaagaaggtttcaagaatttagtttctaaattcaggatgtttcrcaattgagcaaagaatcatgatatttgctagtctttactgtcttgctcatgctaaatcaaattattttgactacttaaaattactgaaaagataagacatggtaattagccatgaagcagaggattgcagccagcacattgtaagtagagcatagatatactatttgcttgttagtcattgaagtctttgtatttcaaaaaaatcgtatatttcgtgcttatgaaagtatctaattataaccaatattttatctcttctttgccctgtttaatagattctttgggacttgaagaataaataagcctgatatttacttctcttctgtgtgttcatttaaattacggcacctttgaataagaatttttgtcatattttatattgtaagaggaaatgctgcatgattcttttttcaaagtattttactacatttgggaaaattaaaaatgctgttaagggtaacatagctctttggaaaatggataatatgatagggagtgagacgttgagggaggaaggggagttgaattatactgggctaataataatattagataacattcctttagtgcttmttacatactagaaactacttacattgctttacagtaaagaaaaactcacagaaaggtccctgcattaatgcaaagtaggatattatacaattggcagttgactctagtactttgtcttacctcctgactagcttacatttttacctttttcaaggttatgatgtggtgagtagagcaaactgggcagtaaattattagtcaaccttgtcttaggcaacaatcctgtcatcaaaagtgcagacatgtagggttggcccagtctcctctgactgacgaaatgagtactgactaacctgtagatttcccataacaacttctattgtccaggacatttcataggatcctaagatcctgaatcatactccttagctgacagtgattacttagtagtgccaaacttcaagtaggactagaacagatttggaactaggaacatattcctgaaacttagggtcattagctagagaggctcatcttttttacttaacttccaagtaatgtgactccttttgtttggaccccacttagtgtattaactcctaatcgttgtgtttaggtgctattctcatcttcctttcacaggtgagaaaacggggctgtagacacctaagtacctactcaagggcatgcatcactaataacagagcttgtatttgaatttagatatattgactatagagcagataccctgagccacttttttgttcaactacggtaccacatagcccaggattccaggtgtaggtagttaactaaccttcaagcttgtttnnnnnnnnnnnnnnnnnnnntgcgttggggataaaacagtgaacagtaacctagggacaggttccttaacctctctaagccttagtttcttcatctgtaaagtggagttaataatagtaaattctaggtttttggaagtaaatacatttatagcgcttaacataatacctggtatttaataactactagaaaagttcaatgtttcttcttagagtaatttttgcaagatattcttaaaataataatgatttccatataggttgaaatatagtaattgagattgaaatgaatctacctcgacagagtttatacactagtgaaagaaaactgattaaataaaacatttgggaattagaaaaaatattctacagttgacacacagtgtggcattttgtcactctaagatgccatcagttataagatacatcattattttatgtaacttactgaagaaatatgctgagaaaatggtgctgagaaatcaccaactacaggagacattctgacctgacaaatttaaaatatgaaaaaaaattatcctagatataggagaaaattttgttgtttaggagatagggaaatgatttattctgttttgtaacactaaagctttatataatgtattggggtattgttttatgactagaacataaaaacatgatcaaatatatttaaaaaaatgaaaaaggtgaagtgctcagttaaaagctgactggtatcttctgtgtggcactagagaatctatattaataactgcttctcctatagctgtttctgcatttatagtccagaattggtttccacttaagagtggttagggaaaaaaataaaaaagttctaagctagctttcattgaaaatgaagatctcaggcttagcggcattctgaaaagaggtctgcgttttaaaataataatcaggaaatgaggtaccctcttttaagcagcagcagcatatccagatttgaggtaaattcaatacattcatgatgttatgtactgtaaaggaaatttttgtaggcatcatttctctaaatgacacttttcaagaagggttataaattttttaatgtgatttttatggtggtttataaaatttcataaaatcatagaactttataaatggaaaagttcttagaagtcatctagtacaaccttttatttttcagaagaaacatgtaattcttttgtggcctagacaagactagaactcatgtcttctgatttaatgctctttgaactatactactgctgtttcatatattatcaggatttaggatagaaaaagtacatttatttcagggtaaaaattctcatgtatctaaatatttatgaagaatttttttatgttttaagaaactctagtagtcacaacttagatatttttagccactattatttttatgtccattttgaaagttactaaaatcaatggcatttttctggtaaacagttttttccaatttatacttaattgcctcacatataacatartttcatattggtaaattttaaatagtaaacagtaaacaaatgctgaggaaaacaaagcaagagacgaaatggaaaatgtgtaacagattttctcttataatagttttatgtggtatgagagttctatgagtttttttatttgtgttttgtctataagttgtaactaagtactatagcataatttttcaaaggcatgagatgagtttccttagagagatggcctgttgcagcattttactaggaactgggaattctttgttatgtgtaggacacatagatttcttgctgtagctatctcacctttaaaatcaaagtttgcttacattttacgtgtaccatgaaaattatcataagtaatgctttaactcagagcagtatatgttggctagccttcttttttggggtttcttacaagccaattttgactgtgggtgtgtgagattttaagaaaatgaggctgggcacggtgactcacacctgtaatcccagcactttgggaggctgaggcgggcggatcacgaggtcaggagatccagaccatcctggccagcatggtgaaaccccatctctactaaaatacaaaaaattagcttggcatggtggcgcacacctgtagtcccagctactcgagaggctgaggcaggggaatcgcttgaacccgggaggtgtaggttgcagtgagccaagattgcaccactgtactccagcctgggcaacggggcgagactccatcccccccaaaaaaaagaaagagagaaaagaaaatgaacaaatttacatgcctaccatttgggacttgttatgatatttaaaatgtatactaggaaaaaatattttaaaattaaaaatgagtatataagatgctggtatataatttgggtagggcattttattttattggaggagttaggaaattcatgtattctgtgaaaatttttagtactggaaaatagaatcagtataataattaccataatgggagtgaagtttcttaaagataggggtaagcacattttttttctgaaacagttcagttagtaaatgtagtctctgttactgctattcatctctgttgctatagtacaaaagcagcatggaaaatatataatcaaatgcgaaaacaattggttggtcagatttggtctgtgcctatagtttgcctaccccagttttaagataccgtaatatccctttgatctgtggtcgtatatgtcttttgaatagcaataatttggaaagggggcttgacttttgaaaggaaaagaaagttaatgctttgggaatgtctggcttatatattrgctgtacattttcccctattgtgttgcctatgtctagcagataataaagtcttatgaaatcatttcattatgttagtgattaagcatttgtatttaaactttttcatagagttgtttttgatttcctaggatgtcagttttatggtttttgtttcctactgaagctttgaaagtcagccaagaatatttctcagttcataaaacattttcactatgcttttctccagctagctttcaatgatctgtggaaataaagagcaaaggccgtatgggtaataggaatgcaaagaattattgtcacctaatcttcagcattaattacagccactgtttcatcctacaacaaagagcaaattggaaaagtttgagtttcactgccttttatttagaagtacctgattggaggtgtcaataaaacatttctaaatatgaatattttattaagagtaatcaartagctccacatagatgctacataataacagcatagaatcacaattttattaaaattcaaaagacttatgtatatattacctaaatttgctccctcattcatacctgccaacaagaatgaaatcttcaaggaagtgaaaatgtcttcattctcttacctcagatgtccaccacagtgcctagcaaagatgcacacagatagttttttgaataagggaatagaaactcagagaaactagagattatgatcactccactggttattcagagttcgacttagtgccacgtgtgaacaaattttcttttaaaatttgagacttgtaaaatttaaactgagactcttacataattttatctcctgcattaatgtttatagaagcatcatcatcttcatggtaaagaatcattggtaagctttggaataatttacctctcaaagaactccaaaaagaattactgaagtgctaagccgtgctaaaaacatttaatggtttttgaacacaataaatttaaaagtgggttcgactcacaaaactttgtcagtgtgccaagtatacagaaatgatagatattctttttaatatagctgttagcagccgtaattaaaggccaacaaaggatagcagcagtgatgagcattatccattttaggccagtgagaacacattttgaaaaagactgctgccatccatgatatattaattaatttgtagaaaggtctccatgttactctctgcacaaaaggccattcagtcacacttattttattgtagggtaatttaacagtctttttttgcgtaaacaagcacctaagtcagtaggttccaaatcctgtgtttctacaaccatacttagagcatataaatgatgatcctgtattatcaaggacaaatgctgtatagaatcctgtggcaccctcttcccaaacaaaagctgagttgactgggaatacacaaagaaggagtgtaggtagaaaaaaacagatgaagagaacttttggtatagattcaagaaaccaaagaaatacggattttctttttgttggcctatttcctgagccaagcatttctgcatctgagcacagaatcttacagtatgttgttaaaaatattttgtctattttagaaggatttacttaaatttatttttaattataaaaatatccgaaaagtataaacatattcttatctggaaattttagctatgtaaaataaataactacttgaggaatttgagaagctaagcaattactacatttgaacaactaaaacagttaagactgttaagactaaaacgtaaagtactctaattaccaatgtcttaacaatctcctagtaatacagcaacaaaatctctattaggagtgtattaaaggctgactgttctgggcatgcctcatagttatgaaggatttcagaggagcagttctgatcttagtattcgcttggtggttttcatggcaaaatttaaggaaatttgatactttgaaccatattgtaagtaaggctaagtaaggaactgactgttaatctggatgcatctgttgacccatgctgtttgaagcttctgaaaatcttctaccagacatcacattcttgctcttttcagcaaatatttatgtatcacacacccgttagtttaatttataactttaaaagatttaaaaggtatcttcattatgccaattatagtgctgacacttacaatgactaaaaattaatatttaattaatttttataattataattattataatgccccaaactgctatctagtgacattttctttgtgctaagtactgtgctagatcctttatatgttttatttaattttgaggaagtgtcttagtccccttgggctgttataacagcataatttagtctgagtggcttagaaacaaaagtttgttagttctggaggttgtgaactccaagatcaaggtgctgtcatatttgatatctggtgagggctgcttccttctttatagaatgccatcttctcactgtgtcctcacgtagtgaaaggggcaaaggagcagtctgggggctttcttacaaggatactaattccatacatgagggctccaccttcatgacctaattacctcctagatatccaccttcagataccatcactttgggggttagatttcaacatatgcattttgggaagaggcaaatattcaatcaccaggcaagtatgatccttcgcatgttttgactgagaaaactgagcctcacagacaacaaacaaggtgaaaagttgccgtttgaacccaagcatattaaatatcaaagtcctttcccaaattcaaagcaaccttcccaatgagtactagtcaatgaaggtttattggttttctttgggttgttgtttcttacgattactatagatttttattttttattttactatttctagatctgtgatattaggaaaatggcacacgtttaaaagcatttaatctgcttaaatttctaggtagttggctgtcagaaagtaagtttgaactgacatattaattttccttattatttcttgtgttggattatgtttatgatatcagtgcctgcaggttcaggattgggaaacaattcttttcaaaaaattgcttttgtcaggtggtaaattgaactgtgagtttaagaatcacttgtttctcgggctgggtgtggtggctcacgcctgtaatcccagcactttgggaggccaaggcgggtggatcacctaaggtcaggagttggagaccaacctgaccaacatggagaaaccccgtctctactaaaaatacaaaattagccgggcgtggtggcgcatgcctgtaatcccagctactcgggaggctgaggcaggagaatcacttgaacccaggaggcggaggttgcgatgagccgagatggcgccattgcactccagcctggacaacaagagcgaaactccgtccccctccaaaaaaaaaaaaaagaatcacttgtttctcttattctgtgtttgaatcaaaactatacaaatgtaatgaatattgtctgtgttagtgtggaatttttactgggaaatcatggcaagatggaaaaatacatgcttttatgtcactctctatgttaacagtttatacaaatctgcagttacatagagcacatgcagcttatacatctgtataatagctgacaaaggtaacttgtgtgtctttctgcatttataggatatcttattaatctaaaataggttcctgctgaatgttgatcataatctaaaatctagtttatcatgtaggtgataagctagattactcaagacattattgattttggacatttatcaaatggtttttgctttcatatttttcaagttttgttgattattcattgttaaatatttcttcagtacagcttcctttcaactgtaataaataaggaacttttatttttcttctggagtactgattaaaagatggctgtagtagatatttcagctttaccatggcacattggtgtatttggcttacaaaatttttaaaaattatttatgatggaatgagtataggctctggaatcaagtaaatgtgcttttaaatcccaactcttttatttgctagttgtggaatcttaagccattcaacctttctgtctcagttttttaatggccctcacagcagtatttacctcacagcactattattgggattacttaactaatacctgtaatgcatgacacagagcaacttacacatgtgtcaactcttattaatacagtgtctgggaagtaggtattcaatgaacaatagataatcttcataattacttaatttcgcctcacagcactgtgtgggaagtcagaattctccattttcaaggctagaagtgaggcacaggtaaacttcctggtgtaaacataattatatactgagctttagtaatgctgtaaacaaatggtttatcagaaacaaggaggtttaattttgtttatgggaatcagagatcttttgaggagattatttttaaaacagcccaaaaaagtgagcaagaaaccttaagaaatccttgatgttgttagactctttaaatatttgtcaaaatgtaattgccagctgtataacatagctggaattttaaacatccataatttcccataattttaaacactagggaaaaatgcagtatgtgcaacacaatataattttgcttttctctagagttgtttttcaagaagtccagtctaacatggatttctttagttcaagagttttgtgatattggaaatgatttattcaaaatgcatttgtttatggaagaacaaacttctttcctagggatagagattgtattctataggtaaatttattactgtaatattaacctgttttatttggagtgatatgtaatgtttgtgttcacattttttaattgacaaaaattgtgtgtacaatgtgatgttttgctatatgtatacacataaaatgataacataaagctacctgacgtatctggcacctcacatatttgacactttttgtgtgatgaggacatttaaaatctactgtcttagcattttcaaatatgtaatacattattattaattatcataaccatgctgtatatcaaactttttaagatgtttaaaacatgaattcctattcttttttttttaaactgaaaaaaaatatggttaccttctccggcctatctccttttctttcttctttcacttaaggaaatgatgttaaaacattttagtttttttcataacttataaattgtatctttattacagatttttactttttgaaacagtaaaaatcattgacaaaaatgatgtttttaaaataattttattcttcatgaattataacttgttttatttgtatacatgcttaaaattcttaaaaatataaatttgtctctttttctatttttacaaaatatcaaggaactagaataatgttatcatcttcaaggtatwtatgcggtgaaaatgtaattcatactcctcccaaactttgctatggagagggggagtatttttagaaagaatctctttttatgtgtttgttcctgtccaaacttattttctctcaggtggttgtactcattactacttcttygtcaaagaaaactgactctttctcaagtatataggtttcttaatcttagtaatttattttgaaagaagttcacgtcggatttktcaggtcaactaaagaaaaggaaaggcaaaacagaatctaaaacatttagatgtattgttgacatttttaatgagtgagcatttacaggtgtgtatgcaaacaagtagtaccataacatttacagtttctgtttctaggataattcatatttaggactcagaaatgccctgtttgtacctgttttaatattagtcactgattgcagaagttattttgcatagatgacttttggaataaatcttaaatgtaaatggtggtcacagacagttatctttagttagaagtaattttattgccttcaacatttcagagttttgagtccattcttgatctctttgatttctttcaatagttttgggacattctcagatagtattttttttttttttttttttttttgaggcagagtctcgctctgttgcccaggctggagtgcagtggcgcgaacttggctcactgcagcctccacctcccaggttcaagcaattcaccctgcctctgcctcctgaatagctgggattacaggcgcacgccaccatgcctggctaattttcgtattttttaatagagacagagtttcagctgttggccaggctggtcttgaactcctgacctcaggtgatccatccatcttggccttccattctcataaggggactctatactttttttttaggcctttccactggattacatatgtcttttgcactctattctgtttccattcttttttttttttttttgtcactttgtgtattcatttggatgctttctagtaaccagtcttccattttaaraatcctctgttctgttttcactaatctcccattaagactatcttttgagttcttaatttttattatagtttttargtttaggatttccctttgatggttttctaatggattccaagtccctggtgaaattcaactttttaaaaattttgctgtagttcatgtggatttttgtttttactatattagcactatctcttgccagattgtattttaacttgtttcacagattgtaattcactaggatctctcctcttcttaagagaaaattaaaagggagatgggattaaagccaaatgatactctagaaagcctttttcaaaaaatttcttctttcatttatagaatttagggtttcgaggaatgggatgaatagagatgtctatgcttttgttgataacatggtattttgggtttttctcaattgttccatctcttttttgggggcggtgggaacggagtcttgctttgtcgcccaggctggagtgcagtggcgacatctcagttcactgcaacctctgcctcctgggttcaagcaattctcctgcctcagcctcccaagtagctgggattacaggtgcatgccaccatgcccggctaatttttgtattttttcagtagagacggggtttcaccatgttggccaggctggtctcgaactcctgactttgtgatccgcccaccttagcctcccaaagtgctgggattacaggcatgagccaccacgcccagcctgttttatcactttataatcattatttttactgtagcttacttaatgccttgtgttgagttgagcgtctaaagcaattaggatattggtaatgtttctgtttgtgaaatgatttacgcaatcttggcttactgtaaccttcgcctcccaggttcaagcgattctcctgcctcagcctctcgagtagctgggattacaggcgcctgccaccatatctggctaatttttnnnnnnnnnnnnnnnnnnnnnnnnnnnnnnnnnnnnnnnnnnnnnnnnnnnnnnnnnnnnnnnnnnnnnnnnnnnnnnnnnnnnnnnnnnnnnnnnnnnnnnnnnnnnnnnnnnnnnnnnnnnnnnnnnnnnnnnnnnnnnnnnnnnnnnnnnnnnnnnnnnnnnnnnnnnnnnnnnnnnnnnnnnnnnnnnnnnnnnnnnnnnnnnnnnnnnnnnnnnnnnnnnnnnnnnnnnnnnnnnnnnnnnnnnnnnnnnnnnnnnnnngccgggcatggtggctcacgcctgtaatcctagcacttagggaggctgaggcaggtggatcacctgaggtcaggtgtttgagaccagccggaccaacatggagaaaccccatctctactaaaaatacaaaattagctgggcgtggtggcacatgcctgtaatccaagctactggggaggttgaggcaggagaatcacttgaacccaggaggcagaggttgcagtgagccgagatcatgccattgcactccagcctgggcaacaagggcgaaactccatctctaaaaacaacaacaacaacaaaaaaaaaacaaaaaaaaaagaaagctccctgaactgggtgcagtggttcatgcctataatctcagcactttgggaggccacaggagttccagaccagcctgagcaacataagactcccatctctataaaaaatttaaaaaaattagccaggcacgatggcacaaacctatagttctagctacttgggaggctgaggcaagatcacttgagcccaagtgtttgaggctgcagtgagccatgatggcaccactgcactccagtctgggcgacagtgagaccctgtctcagattaaaaaggctgcatgaaaagttttttttttccttacctgtgatttaaaacaaattcaaaataaaaaacagttatacagttttagtttttccttattttctgatgagttctcatgtaaaaactgcttataataaagcttagatatgatattcttttaacttagttatctgttgatgtgtacagttatttatgtttgcaacattcatcctagggtttaagatataaaattattttttaattatatgatgaaaatttatgtacatttagattgcctttatttttatttttatttgttttttttagagatggggtgagtcagtctcttagcctttttttggggggtggggggtgataaacaagtaaacatagaagagattaccagtcagtatatattcagtgacattttatgtcttgggttagggatttttttcccctcttaaaggagactttttgcttttgacccccaaaagaaatcagtgtagaaataaagataactgcaacactgtctttagccttattttgaactcagacctatctactgagtactatctactatctactgagctcaggtctatcttcagaatactcccatctagatgtttcagaagtaccacagatttatacttgttttctctttggtgcagttgttattctacccaagatcattttggggaaactcaagccctgtgctgtgtgtgtgtgtgtggtggtggtggggcgggggggttgtgtggtgtgtgcatgtgtgtaagtgaaatttttttttcctgttgttgtttttttttttttttttttgagacagagtctcactttgttgcccaggctggagtgcagtggcgcgatctcagctcactgcaagctccgcctcctgggttcacaccattgtcttgcctcagcctcctgggtagctagggctacaggcgtatgccaccacgcctggctaattttttgtatttttagtagagatggggtttcaccatgttggccaggatggtctcgatctcctgacctcgtgatctgcctgcctcggcctcccaaagtgctgggattacaggtgtgagccaccgtgcctggcccctttttttcctatcttaaaaccacttactggctctgttacctgcatgatgtctaagtcaagaactgtgaaagatctggggttttctacttgcaggctaacaagtagccttccacagttgcatggatactggcagaaaccatgaggctcatgggtcagaaacgaatgacttcattattcacagcacagcaagcagcaagaatatctgtatgtttgtatcagttcctcctttacactgcatccaaaagaggtgatgcatatgggccatatggatatctgcacatctggtaggttgcattacaggacaggaatcccactcttggttaactcagatcttttatcttgggcagtaagcttgcctgccctttgcccctgagggaggtagatgaattgtgtagcttctgaagctctaaccaaacctactctttgctctggagggggacgttgtttcttgtttttgttcttcaccattttaagtgtacaattcagtggtacttcagtatgtttacaatattatgcagccatcaccactaattccagaacatttccatcaccccagttagtgccttgctcataagactgaagaaatgtgaaagacccgtggagaattgtctcccaaaacacacattatttgtaagagaaaatcatatcttacacagattatattaatggcaaagtagcatgggagagggtcacagaagtgggttggacgattccgttaaaagcagggaacattctagttaaggcacttggataggcattgggtgagagttttcatgtcttttctgctagattgttcctgttttttttctctatgtgcacctgattttatgctttttttcatctagcacattatctttaatatatttgacattgaacatttgtttgttaaaccaccaaaaagtttcaaacaagagaaatctgttttgactgttggaaggcagagacagcacaagattagcctgttctgctgaagtcatagttcaaccttaatgaacgtcaaggaataaaagactgtacatatgaggtgtgtagtattagcgtgtttgtgaaatcatatacccagtagaacaaaacactgattttgctgcttttgaatgtgcacatattatttttgtgcattaataatagctagtcagtgtttggaactgagacttttgtctagaattgtatagaggtaaagagcatggatttacgtaggcttagtagaagaactaattttaaaataaatggtcacatcataagacytaagtcaggttatcaataaatatttataagtgtctgtaacttgcaaggccatgtcaggtaatgttcagcagtccccaacttcaatctagaatggagrtggctaccaaaaagtatctttggattcctaggacccacagagattgactcagtgggtttgattgttaccctggattcatgggtaacactaaatggttacccatgggtaatctaaagcacagctagatttctgaacctttatttcaggatagctgaaaaacatagagatgagacattaaagcccccagtcctctaacagctacctccgaccagttctttgtttagcataaggattaccttcacctaggaactttttgaagtgtccagtgccctcctttgtgctctgattttcttctgttttgcattgtttgagaagttatgttgttattactgtttttatgaggggaatggtgttaggaatgaggggttctctttctataacactccttgagggaatagggacagtcttctttaatcttctcatttctgtttcctaaagtagtgcctgccagctagtgtttattgaacaaataaattgaattgaatgaattgttatacattctaatgaaattattccccttatttttcttccagtcttcctcctgccatgccacaatgatctttgcctaacatgagataaaacttacttagctatttttttactgcttggtaaactcaagtaatacattcacactttccagtaagacacttggccatcttactaattcattgggagaaatagagagcatatatataactaaggataggatctgacattatttggatgtagctcctgttagaaggcaaagcaagcaataacatgcataaattagatgtggcatggcccaggattttgtcttttgatgaaagtaggccattcctttggaactgtttagttatgttccatgaactcctctaggtagggcacaaaaattagaagaattctgttttatctagtagtgtagtcaggttaacatttttttgttgatgtgtaaccctcgccaatgctaggagtataaccttcctattgataaatccagttgttattttttatttctttacttgactcgaaaatatttgacacagttaactccagctttttttttcttttccttcttttttttttttttttttttttgagatggagttttacccttgttgcccaggctggaatgcagtggcgaggtctcagctcactgcaacctmcgcttcctgggttcaagcgattctcctgcctcagcctcccgagtagctgggactacaggcgcccactaccacacccggctaawtttttgtatttttagtagagatggggtttcaccgtgttagccaggatggtctcgatcgcctgacttcgtgatccatgcgccttggcctcccaaagtgctgagattacatgcatgagccaccgcacctggccaactccaaccttcttgatacactatcccctttattccttggtttcctttcttcttctctgatacccgtaaaattcatatattgaagccctaaccccgaatgtgatggtatttagcgatgaagcctttgggagataattaggtttagatgaagtcgtaaggttagttcccacatgatgggattagtgcctttataacaggagatagcagagagctagcgctctctcaagtttgtgctctcactctctctctgccatctgaggacacagcgagaccgcagccacctgcaagccaataagagaactcttgctggaacttgcccattctggcatgctgaccttggacttccatctaccagaatgtgagaaaataatttctgttgtttaaactactgaatttatgttattttgctctggcagccccatctgactactgcacaccccttctcctttgcaaattcccctatcacttcctgtacctaaaatactggtgttagcattctcttcattatgcatttacctttcttctaactatgtattttttctcggtgatctatttccattctccaggtaccatctttatgacaaggactggtaaaatttgtatttccattttgtacctctttctaactctaaatatctaaatctccagttgtcccacaggacaacccaccatgtttacagttaaagtttttttcatccggtgactccatggagacattagtttatcagccctattgattgtatttccttaatatttctcacatatatccacttctgtctcttttgccatgattttaattcagacagctaactatccgtcctggatcgctccaacatttttctaattgactgacatcaataatactcttaaatttatttattttttctaaatagactttttttttttagagtagttttgggttcacaccaacattgagtggaaagtacagagtactcatatatactctgtcttcagaaacacacaacctccccagctgttaacatcctgtgggagagtgatacatttgttacaatctataaacctacaatgacacataattatcacccaaagtccataattaacattagggttaactcttggtattgtacattctgtgggtttggatgaatgtgtaataacatatatctaccatgatactgtcgtacagaatagttccactgcattaaaaatcctttgtgccatccctgttcatttctgcctcctctgtaaccaggtgttaacctggcaactgatccttttacagtctacgtagttttgcctcttttggaatatcctatacattcctatgcagtgttcctgtagttggaataatgcaatatgtagcttttccagattggcttctttcatgtagtagtatgcatttaatattcctccatgccttctcataacttgatagcttatttccttttagcacagaataatattccattgtctrgacctacctcagtttacccattaacctactgaaggacatcttggttgcttccaagttatgaagactgtgaataaagcttctgggaacatctgtgtgcaagttttttgtggatataagttttctattccttttgataaatatccaggaatgcaatagctggaacctgtggtaagagtatttttagttttctgagagtttatttttgcaacttccaaactgtcttcaagagtggttgtaccattttttaccccatcagcagtgaataaaagtttctgttgcttcacagcttcatcagcctttggtgttggcaactttcctgattttggccattctagtgggtgtgtaatggtatcttattgttttcatttgcagttccctaataatatatgatgttgaccatcttttcatatgcttattgtttgtgtattttctttggtgaagtgtttgttcagtttttggcctattttttaatctgcttgttttcttgttgagttttaagaattctttgtatgttttggataacagtctttatcacatgtgtctttcgtagacactttctcccagtctgtggcttgccttctcattttcttgatgtcgtcttttacagagcagaaggtttttgttttaataatggccagcttatcagttgttttatttgtggatgatgtcattgccattgtacctaaatagtcatttccatacccaaggtcatcttggttttctcttatgctgtcttctaggtgttttataatttgtgttttacatgtaggtctgtaatctactccgagtcagtttttggaagaagtgtaagggatgtgtctagattcattttttttgcatgtggatgtacacttgttccagcatcatttgttaaaaggaccatctttgctcccttgtattgcctttgctactatgccaaagattagccagctgtatttatgtgggtctatttctaggctctctgttctgttctgttggtactttttgtgtgtgtctctgtctctctctctcttttttcttttttttttttttttggtcactaccacactgttttgattactgtcgctttataggaagtcttgaatttggatagtgtcagtcctgcaactttgttcttttccttcaatattgaattagctattttggatcttttgcctctcagtataaactttataatgggtttgtcaatattcatagaataacttgttggggttttggttgggattgcattgaatctgtggatcaagttgaaaagaattgacatcttaacagtgttgagtcttcctttccatgagtgtggaatatctctccatttatttagattttcttcagttttctttcattggtgtttgtattttttctcatatagattttgtacacattttgttagagttataactcatttttttggggtgctaatataaatgataatgtgtttttaatttgaaacactttttaattgctgatatataagaatgcagttacttcataggttaaccttgtatcctgcaaccttgctataattgcttattagattcaggagtggttttgttgataatttcacactttttacatagatgatcacatcatctgcaaagacacttttatttcttcctcccctatctgtaccttttatttccctttcttatgtagtgtgatgttgaaaaggaatgggcagaagggtcatccttgccttgttcttaatcatagcagaaaagcttctaatttctcaccattaagtgtgatgttagctgtaggttttttgtagctgttccttaccaagttaaggaagttctgctctattcctggtttgctgagaggtgtttttttgtttgtttgtttttaccaataatgggtattggattttgtcaaatattttcttcatctatttatatgattatgagatttttttcttcagtctgttgatgagatggattaaattaattgatataatgttacatcagttgtaacatcaattgtaatgtaatgttttcaagtgttaaactagccttgggtacttggaataaatcccactttataatggtatataattattcttttttttttttttcttttttttttaagagacagggtctcactctgttgcacaagctggagtgtagtggcacaatcatagctcactgcattcttgaactctgggctaatgtaatcctcccacctcataattatttttacatgttgttagatttgatttggtaagattttgttgaggattgttgcatctatgtttatgggcaatatttgtctgtagttttctttttttgtgatatgttcgtttggttttggtattcgtctaattgtggcttcatagaatgaggaagtattcactctgcttctattttttaaaagagattagagaactggtgtaattttttccttaaatgtttggttgaattcaccaggaaacgatctgggttttgtgctttctgttttgaaaggttattaattatttatttaatttctttaactgacacaggcctattcaatttgtttattcttgtgtgggttttggcagattgaagtttttaaggaatttattcatttcatctaggttwtcaaattttgggccataggatgtcttagttttttaaaattatccttttaatatatatagatctgtagtgatgtgtcctctgtcatatctgatattaggaatttatgtcttttctctttttttcgtagatagcctggctacaggcttattgattttattgattctctgaaaggaccaacttttagtttcattgtttttttctcttttgacttcctattttagatttcattgatttctgctctaatttttattatttctttcgttctgcttactttagcttgctcttctagttgcttaaggtgaaagcttagtattgattttagatcttctctaatatatactctcartactataagttttgctttaagtactgctttctctgcattgacaaattttgataagttctattttctttgyatatttatagacaatagaactttgataagttctatttatatatttatagatatatatctataaaactagtgtatatatgtaaatagtatatatatatgtgtgtgtgtgtgtgtgtgtgtgtgtatatatatataaagagagagagacagagacagagacagggtcttgctctgctgtccacacctcagtgcagtggtgygatcacagctcactaaggcctcaacctccctggctcgagtgatcctcctgtctcagcctcccaactagctacaactacagacatgcatcaccaagcttgactacatttattttattttttatggagatggggtctcactctgttgccaaggctggtctcaaactcctggcttcaagaaatccttccacctcggcctcccaaagttctgcgattacaggcgtgagctactgcacccggcctaaaaatattttaaaatttctcttgaagtttctttttttttcctttgtattacaagtgtgttgttcagtcttttaagtattttggaattttttttttttagctgtttgctgttgactttcagtttaattctattttggtctgaaagcagacattctatgatttcttttaaatttgttcatgtgtgttttatggacaagaatgtggtctatcttgatgaatattctgtctgagtttatgaagaatgtgttggctgttgctgtatgaattagtgtgtagatataagttatatccagttgaattgtgatttagttcaactatgttcttattgatttttttgcctgttggatctatttctaataaagtgatgttgaagttttcagctataatagcgtattcatctgcttctccttatagttctattagtttttgcctcacgttttgctgatttgttgttagatgcatacacgttaaggattgttctgtcttcttagacaatttacccttttatcattatataataccccttttggtctctgagaattttgcatgcttgaagtctactgtgtctggaatcaatatagctactccagctttctttggcttagtgttagcattgtatgtctctcttcattttttttacttttaagctatatttgtttttgttggtaaagtgggtttcttgtaggcaatatatagttaggtcttatttttttattcattcaatctctgttctttaattggtgcatttaggccgttgatgtgtaaagtgattattgatatagttggattaatatctacgatatttgttactgttttctattagtcgcctttgttcttcattcccatttcttcttctctttcatggctttaattgagcattttatgttattttattttatctcttttcttagactgttaagttttttgggtttttttgtttgtttgtttttcagttgttaccctaarttttgcaatatatttctactttcaaatagccctattcacttcacaggtagtgcaagtaccttataataaaaaaaattcctaagttatccttctcatgtcccttgtatcatttttgtcattcatttcacttgtccgtaaactataggtatcaaatacattgttgttattttgaacaagcttttsttagatcagttaaaagtaggaaaaattaaagtttttatcttctttatttcttctttctctttctttatatagatcaaaatttctgacctatattttcttctttctgaagaactttaaacatttcttgcaaggcaggtctactggcaacaaattccttatttttatttgagaaaaattttctccttcatttttgaaggatgtttttgcaggatataaaattatacattggtgggtttttttctctcaatagtttaaatatttcgcttcactttctttttgctcacatggtttctgaggagaagttaacgtaattcttgctcttctgtaagtaaggtggtccccacccctcgacatatgacttcttaaaggttttttaaaaatctttgattttctgcctatgtgtagctttttgtttgtttgtttgtttttacatttattctgctcagtgttcactggacttcctggatgtgtatctgacattaatttggggaaattctcagtgaatgtttcttcaaatattggttmtcttctttcttcttttggtgttgctattacacatgctacacctatttgcttcatagttcttagatattttgttctgtgtggttttattattttttttttaaatctagtccagtattttgttttcataaagttttccttatccttgcttttcagttttggaagtttgtatatacatatccgtaagtgcagagattctttcctcagctgtttccggttgactaatgagcccatcagatgtaatctctatttctgttacagtgtttttgatctctagcatttcttttttatagcatttctttttgattcttgcttagaatttccatcactctgcttacattactcatcttttcttacttgttgtctactttgtccattagaatccttaacatattaatcatagttttttaaaaattcctggtctgacacttctagtgtttctgccacatttgactttgcttttgatgtgtactcaatttcttcaaactgtgttatttctgtcttcgtaggccttgtaatctttctttgatagccagacatgatatatgggataaaatgaattgcagtaaatgaggctttagttatataatggtaaggtgttggggggagtatgggaaggagtgttccatggtcctgtgattaggtctgagtcttttagtgagtctatacccttggactgtgaacttcacaattttctccygttaggtgggacaggatggctagatggagctggagttttttattttcattctcccatgggaaaggctagagagggctgaagttgggtatttctcttcctctgggtcagttggtgtctaataaaacctcaataacataagctctgggaaaaaatattttctcttgaggagcaggcctttttaagaagagaatgctctagtgtatttcacaatgggtacttttccttcctcctgccagaagcacagggtaatttttctcagatcttcactgtgagaagctggtgtagttgctgaagataaaactcacaaatgtgtgagggaccccgctctatgactctcagacttgtcaaacactgaaccyccagcagtttgttaattgcatttccagttgtcctaccctggcactggctctcatggaggtttctctttgtgggtttccgctccagaaagttgtgattttctgtacctgggctgtctgtctctccaattttgggggcagtgatttgccctgtgaccttactaatatgatgtatctaagaagagttggtttttcagtttgttcagctttttacttgctgttaggacrgagcgaagacttccgagctcttaacgttctggaccagaaattggaacaatgctgtccttttattgtctcttctctacactgcaggcagccatggtgtttctcaaaaacacaaatctgattaggtcatgtctctagttgaaacatcccattaactgtagcataaaatccaaactccatgatttggataacaaggtctttgttttcagccttggtttatttttctgtactatcttttataatacattttcactttactgttatgctgagccattgtgcactttatccagtttttagtattctgtgttctctctctttccctcctttcaccctttgcttgcctgatacccaccaagtttttaggttttaccttagaaaccatctttcttatgacagcccaccttgactctcctgagacctgtccatattaccttcctgagttttttctggtatagaatcacaagtgattagcagagtagatacaattaaaggcctccgatgtaatttattggcagcctgaaatatttactatgcttgtagtaattatgaaagacctcctaaagcttttgccaactgtgtttmtacttgacagttaaactcccacgtggaaaagttatattatggagawtcttttgaaggatgttgatagtgtttggctctgtgtccccacccaactctcatgtcaaattgtaatccccgtaggttggaggagactcctggtgggaggtgattggatcatgggggcagatttccccctttcagttctcatgatagtgagtgagttctcatgagatctgatgatttaaacgtgtgtggcacttcccccttcgtgctctctctctctctcctcctgccatgtgaagaaagtccttgcttcctcttctccttcagccataattcttagtttcctgaggtctcccggtcatgcttgctgttaagtggaactgtgaatcaattaaacctgtactcttcataaattacccagtctcagtagttctttataacagtgtgagaacggtctaatacagatatagaatccatttgtttatagtgttcaatgtttattcttacgtagagtcaaaaaagcaaatttgtgtaccggcagagtagctacctgcaagaattagtgcccaaaacagttctcattgactttgcaagtactctttggtcccatatattttaaatactggagaaraccatgttaaattaataaattagcgttgtgatttgtatgacaacctcatgtgcatttgattagtgtgagttagaggctattctcctgtggatacactaagtcaaatttttgaacttataagtctaaatacttaactaaatactttaacttataagtctaaatactgtcatttagagatgctgattaccttattattaaatatattacatgatgattatactgaggtgtgcttctttgtcacaggtgctaacaaagttattgggtgtgtatctccttctactttacgtcctcttccacccaagtgcatctaattgaatttacatgtttaatacgcttacaatgctgtgttactctataattgtccactcagttgtttattacatatttatcaattccaaataggtcttggaggaaatccaagctattgctaatgagaattattttgcacattttgactgtgtgatacagggttttgttcattagtaggatctgttgagtttacttcttttttttttctttttttgggacagaatctcactctgttgcccaggctggagtgcagtggcgtgatctccgcccactgcaacctccacctcccaggttcaaggtattctcatgctgcggcctcctgagtagctgggattacatgtacatactaccacacctgactaatttttttattttttttagtagagacggggtttcgccatgttggccaggctggtcttgaactcctggcctcaagtgacccacctgcctcggcctcccaaaggttttacagacgtgagccactgcgcctggcccgagtttatttcttaaaaacttatatttagtaatttttttgtggtcaaaggacatgaagttaraggatagtgtgtttagaactggctttgtaatggacttggtacgtaaaccaaaggaaaaaaaactagcctgctttctttgcctgtttctcaagaaatcgggattgtggtgattacctaccttctgatgtgttttaaaaatattcttaatatttatgaagaaacatcagaaatatcctagttgctgtggatgcgtaatgagttttttatttcacatagactttaggtttcatgtgaggaatgggtttgcatcttactcagttttttattctaatttctgtcaacatatttaccatgtagaatataaacattgattgaacaattctctatgtatttgatgaactattttaaataatcttatatcttgttttccagtgcttttatttctgacatttatttaaatatttttgttttggaatgaaaatgaacatggttgatgatagaggaaaataaatgatttgaatacagtttgttttgagatatgataatgcagtaaataaagtctcaaatgcatacttcatatttgaaaatagacatgatttctcttgttatagactatagaacctttaaaaattaatagataatagtatttgaagataagtaaagatattttttaaaccrtactttcaaaatcagttctttaggtgctgggaatgtagccgatcgtgttttggctcagctcttaacagaaatggatgggattgaacagctaaaggatgtgaccattttggcagctactaaccgtccagataggatagacaaggtaagagagaaggcattgtggatattataaaatcaagaactggcttgtttgattttatcaggtttttgtttttgtcaaattactttctaatcagtatttcatttagaggatattgaagaatgtaaagcaggttcactgtggactggttaccatcttgtctgagtctggtaagacagaacattcttgcatacaagttatacaaagcaagtttaccacttctggataggcagcaagatacaacagaagcctaggattcattgcaagctagtctctcaaggttcaggaaaactgccctgggtgaatggaatcttgactgcatatgccccacttgcactgcagctgagggcctctggaaagcaccctgttccaggttttatacactgagtatgtgagactcactgggctaaagtgttggaggacatcctgtttttaggggaggactggagtagaacctgggctgttccagccggtccctccctgtctcaggatgttgcatttcctgcacatgctwcagttattcttgagagctacgatgggagagagagaacttggtcattccaagaccacccagagagctgtcctacaaaggatcttaaactaaaggaaatgaagagaacaaaggaaagcttttatttacatttttattgcttatgattcagtattaatgaaactatttcataactcttcaatatctactccccaatcttgtatcttacttttagcayatttctctagagaattgaagttttgaaattctttgtttcatctaatttattcttccagagttttcaacattttcatctatacgaaggtacattctagctatttagcaagtactagttagactccagttgccatcaacacaagaactttgaagaagtactgtcctaattgttgtttttaaagtaattagaataaaaataatggattmttctatttttttaagaagttagtcaggctgtcacattaaattaagtagtrtaggtgcaaaaccagtcyttttaaactattactaccactttttccctaggtcataatttaataaaggagttcrgtaatttaagttcctcatctatatctaatatgtaatattttataaggatttaagttgagtaaacatttgctctcagagcgtgaaccagtttctcttttttgttgttgctggcattattgccttgtgtatgactttatgagctactttcttcctgtgtacatatacacattctttcagttttaaaagatgtgatttttaaaaaagacccctttgaatgtaactattatgtggcaagaaagccttgctttggttaggtattttgctrtgtgataaagatcctttggtaaaattcaggaaagctttggaccttaaaaaatcattcccttcctgatgcagtattttattagaagrtaggtgagttctgagtatttatagaatctgggttggtgttaaggcatctctgaagtctatacaaagtataagactgtatcttaacaaggactgtagaaactgctgaaagagcccttaaagtttacctaattctgcctctggtttcacaaataaagggtgctgaatccagaaaaatctttctcctggtaagaattcattgtatttttatgatatttatttcctggtttccctgtggttaataagctctaaaatgtcttaggatttttgtcactacggcttaatctaatagtagccttctttggcttcctaatgttgggtgtcctcgatattagatatatttcttgaagtaggatgtaaggcttacagtaaacttaactgcatttttctaaatcaagctgtctgacttggcctgtttagtgcttgtattgttgttttctttctgtgtaacaaattaccacaaatttagcagcttcgcacccatttgttagttcacatttcttaggttagaatgtgggcacagcatgactagtttgtctgctcaggatttaaactaaagactgaaaacacagtgttggctagactgcattcgcattaggagctcatgtttctaaactcacatgattgtggcacagctcacttgtgattggggctgagaactaaagactgaatttccttacttgatgtcagctaggagccactcccagctcctagagactacccacattccttgccacacagccccctcctccatcagaaacagcaatggaaaactccattatgttttatccctgtcacacttcaaatttcctttgccaggaaatttgtccctttggagggctcatctaatgaggttagccttattgaggaaaaatctctggaccttgaagtcagttgattaaggatcctgcaaaagcccttcgcagtagcacctagattagcatttgattgaataagtgggagaagatatgtttctatcagggtgatacaggacaggccagccccagaattgggacatagcctaggagggttctttgctacccccaggaaagaattcaagaacttgctgggggtgttagacagcaatcttttattgattggtactgcccgttgtggtgcagggctaactcataagcagtgcacccagagttggcaaggtgtgggcttttggcaactgtatttatactcacttatgcccactttcatttacatgcaaattaaagggtgagttaacacaaattgattctatgaaagggtaacttctgggtcactgccatggaaacgggtggtaacttttgagtcattgccatgacatttgtcaactgccatggttctggtggcagtgtcttakgccaatgagcattgagcgcagctagagatcgcttttgttgccatctgctggctttggccagtttcttcactttgccccatgtggactagatcctgttttgttcagcagagtttttcaccagaaaacaagtcttgttggtctcctaccttattcccccctcagagattagaaactcctccttaatcttaaagggctgcagatgggcacaggtctatcttctgtaagtgctttctgctgattttataaacataggctctgcctagcatgggaggagtaaaaatctctggatacctgatctaaggagcccaacagcaggatattttcattttctgggtcagaagataagatgagttggaagccttgtgccagcatcatctttatgttgactttagaagatacaaactttagtaggaggttaaacaagaaaattacaattataaggaagagaaaacttaatgctcctatgcccacccacagcatcacattatttatctgtgtgtttgtgaaataatagctttaagtcttctagaggtttgtaagttatggtgtcttcctcttatgcctgcagcgacttrcaagaaacaggtttaatcctggacagctgtatccagctagtgattctctaatgtttgacagcagtggaggtccttaacaatacctgataggggtccttccattttgggttgtaattgatcatcaggggatctttctttttaagttcttagtaagactaagtctggttaaacagaggaactatttttttctttgtgggaaacggcaacactttattttcataattttgaaaggccttttgaacctggcctaaattccaagagccggggtggcatagtgaagtctgtccaaccccctatttcccatcatggcttgaattagttttttaggtttctgtaggatttcctttggccggggaacgtgtaagtcaaaagacttatagccaattaaacattttaggccagagaggaatggaggtggcttaaaacattttaagcaatataggagtcaaatattaaaagccaaaaataagattatatatcaagaaaaaccaagagcatcaaatcaagctatactgggggaaaagtgttcctgtagatctctaaggcaaaacactctagtatcaggccataacagcagtcagaaccagaggagaaacaagtyacaggagctgacaaaaaagctaaaggaaagagttacacaaatctgagaagctttcaaaagaaataaatcacagaattgaaaaagcaaaaattctggtaagttagcaaattaataccttaagaaaagctggctctaacacctagaccattttctagaaagtctaccacgaacagttttccttcagtcacagccagcttaatcacacacaaaactcccctcacaaattccctttcacaaaccccattatcacccacacagaccatccatgacatgtctggaccttgtgacctgtcctacaccatctccctctcaaacaaccagttactttactctaggacaagaatccaccatgcaaggtccctcatacaaaatcactttctttatatccctccccmcaaaaaaaaaaaaaaaaaaaaaawatatatatatatatatatgtgtgtgtgtgtgtatatatatatatatcttttatccacactttcctcacatccctctttttattcattgattccctcttattttgaaccatggcctaaatgtgctgtatatattctgtagttatggtggggaaagtgccttcagtatttagtgataattataaaaaagtttaatatttaattcatttctctttcaggtagaactccctgtggaacatgaattttttttaactatacttttgttactactcagatgatatatactgtatcaaaagtgtatgyccttgtcaagttctctaaagtttgtgaaatacaagagaatatgcagtaaaattttaagtctgtttcctttccagatactttttctctgaagaactactgtggaacattacttatattgtttaatagtactataaagttgtttccacacttgtatgattagcacgtaatgttcaaactgtgccatgaatgtgctggtagaaacaaaacagttttaaggacaattaaaacaacaacatcctgttatgaagtaaagacacagtttttaccatctttattgtctggaagaaactgtagtaggaataaaagaggcgacgaagagttaaagtacattttatgtttttaggctaaaactgattaaaaaaaaaagatcattgtagggtcaaagaaattgatatatatagtgtaattttggctacattaaatccaggcatttggccttttaaattagctagcatattttacaatcttgttgcctcttaccccacaacctctatgttatgatgattttaggttagtatgttaaaacaaggagaattcctggactgtcacaggagtgaaattgatatcattatgttacccatgtgttgtgcatatttagtgtctctttttgacagtatttcagtttcatgtcttctggggagactaaagccaaagtttcttggggattctggtgttttagcaaagacagtgagacacatagctcaagaactgcgttattttactccttgctatgtcacatttacatgtcagactcatttgctgtgatgtagcacactaggctggtgaaataattgcttgtgatgtccctaartccccgaggcttttttctacctcctgcttagatagtgaagagaagttgaagttgmgtcctctagtgttcattttgcgtaagagtgataggatgcggtaggacagatgaagattaatgagattgtgtgatatcaagtaggctcattgtctttagattgattgctgatggtctggatttgcttagcatcaggagagtttagaaacaaacaactaatttattaatgatgcccaaataatagttaaatgcccaaacttttggaatttatgttgttcattgttaacaactgctgtgtggcccctttagaagtgtccagtccatgacattttatacatttgtsttgaatcttaaggaaaacatgatcatgtcttctttctcgggtgataagcatgcctcaaaatagttttaattctgtgaatatctttgaattcagtttatttgggtacttttagtacggatacctactatataacaagctcctaataagaactattaaattataagcattatccctagcgtataaacctagttttcttgtagtaggaaatttgaaggacttcaaaaattttactttaagccatctatggaaaagattgcccaattgagaaaaattgtgaaagatatgtagaagtcttaaataattttggtttcaggattattttctattgttgtgttagactcatggaggtagtaaattggcattaatttyccttacagtttttctggaagaggaaatrtgcttaatgagctaaataagacataacattttgttttcttacattgttgcaaattgaagttgggttttgttgtttgtttgttttgagatgcaggtctggctgtkttgccaggctgaagtgcagtgtctattcacagatcattaagttgtgcagccttaaacctttggactcaagcaatctcctgcctcagcctcccaagtagctaagattataggtgtgcaccacagcatccagcttaaaatttagttttctagaaagttttatgacatggggaaaagttaattaacaatatttaggaatgtccacaaataaaaagctaaatatacgtatctttcgatattcaaatgactagtattccaaaaataccctcagaagaaaggctacaaatgtttcttcattctccatttttcctagttataactattgctcttctaatattactcttcttagctaagtcagaactaaaaaaaaaaaagctgcaaggactaattgacattaatagttcaaatgaatcataattctttactttcccaaaagtatttaaggaatggatgcctattaatctttcacattgtttatcaaaatgatgtgaatagtctttggtgagccatattaagattaaagctggaaagcstcctgtacggttgttttccaatttcagctttgccatctttacacaagactctcataagtgtttttgttattgttgctggattcttcttttgtttgtttttaaaactccaggtgttttaacttctatgacagttattattcttatcttctatggcagccccttccaagttttggctttggggatagagaattgggagagatcagagaagagagactggtgagaggttgtatgcatatgtgggtcttacttcatttcgatgttcataagataaagacgctttatctcaagggttggcagaccatggcctttaggccaaacgtgacccaccaactggttttgcatatcccattgtctaagaatagtgtttacatatttaaatgattaggaaaatactttaaaagtggttttttgtgacatatgaaaattatatgaaattcagctttcagtcctcataaataaagctttattagaacacatccacactaatttgattatgttttgtctgttactccttttgcactactgtagtagagtagttacagtacagacttatggcctataaagcctaaattatatactctagacctttgcagaaaaagtttcctgactcttgatttgtccttgtaagtttttagaagattagtagcctttaatgtctgttgttcatatatgaacctcacgtttttgtttctttttaaaaaagattattttaattgacataaaaattgtatctgtttatagagtacaacatgttgttttgataattgtgtattcattgtggaatggctagatcaagctatttaacatgtgcattacttcacatacttcttatttttttgtgatgaggacacttaaaaccaactctcttagtaatttttaagtatacaatatattgttaacgatagtcaccctacagtacaatagacctcttgaacttatttctcctgtttaactgaaggtttgtatcctttgaccaatwtcttcccaactcccttagacctccaggccctgataaccaccattctactttctgcttttgtgagttcractttttaagactccacatataagcaagatcatgcactatttgcctttctttgtctggcttatttcacttagcataatgtcctccaggttgatccatattgtcacaaatgacaggatttccttttaataaaggttgaataggattaccttctgtatacataccacattttctttatccgcttattcttcgatgcatacttaggttgattccatgacttggatattgtgaataatgctgcagtgaacatggagtgcagatgtctcttggacatactgatttcatttcctttggatatatactcaatagtggaattgctggatcataagatagttttattttaaattttttaggaacttccacactattttctctaatatctgaagtaatttatgttcctaccaacagtgtacaaggggtctcttttctccacatcctcaccaacatttatctttcatgtttttgacaatagctattctaacaggtatgaaatggtatctcattgtggttttcattggcatttctctgatgattagtgatgttgagcacttaaaaaatatacctgttggctatttgtatgtcttctgagaaatgtctattcaggtcttttgcccattttttaatcaggtcatttgttgctgttgagttccttataaattttggtattttagattttaacaccttatcaggtttggtttacaaacatattctctcattttataggttgtctcttcactatgttgaatgtttcctttgctgtgcagaggctttttagcttcatgtaatcccattagtctattttttcttttgttgtctgtgcttttgaggtcatgttcaaaaaattattgtccaggccagtgtcatggaacattttccctataacttctttcagtagtttttcagttttagctctttattcgtctttaattcattttgagttgaatgagccacagagtttttttttttaaagattgtttaaaatgtttaacacrtacgttttctgaagatacattataagtcgtatttgagtaaaaaatataatactgaacttaaataatagtagggaggctgaattaacttatttcaagcatacaccatcccctcttgaaagctctcttaatctttaattttttaaaatacattttcttccactaaatacttattttttccaactgactccckaaaactcataaatctacaattgttattacatgagtaatgtaaatatttattcatgccacctgaatcttaaagttccattggttattagctttttgtagttatgagttgtatgccctttttagtatttagcaacattgggattttcaggcttagatttctaaattttgaaagattctgtgtttagatatatttgtttagtaaataatatttgatgttgtcaacgtgaattgaagtatgtttaatattagagaaagtaataccataataaaatacatgttgctgtcaatacccaaggtctaaaagaaattkgktttttcaagactggagaggacatagaaggctccatggtctagatgacccatctgatacactgacacctgttgtaaaatcccaacccatcatttcttcatcctttgcttattcacccacactgatggggaactattaattcacgaaatagaccatttcatttttgtgtcagactattargaagttctttaatcygatgaacaagcagctgtttgtctccctaaaccctctatacctctacctgattttattccaaagtctgtaaagarcagtttttaatccttcttctatatggtgttcctttattttttaaaactgttagttatcttgtctttacactttatctcactaaccagtcttttgtttttcaggcttgacattttggattatttcatatgccattstttttccgtctaaagcattctcatctttttcttgtgaactatttgtcctttttgctctgaagttgtaacatccaccaacaaatatatattgattggttgtgttctatcagtacacaacttagtgagactcctgctgcctctaccctgaataccttgcttctcctaatgcattccaggattttgttagctttgttgtcagctgcacattgagattgctattgaataaagtcatcaggarcaacaacaaaggtgaaaagcccaggtctttcttcaaagtctgctaaataatagttttcacgccttgggcttgtgcagttaatttgatttaagtttcagcaactgaggcacaatatataccagatatagaagttatcctccaaaattagctcctctaagtttctcctacttttcacatgattcccagatattcttttctttaagtccaagtgatttcccaattatttccatggctatggctacaaaggctttaggccataggaatagaggaatttattcttactaaattcatcttattagatttgattaatcttcccaacttgtcaactgtgggatcttgtttctgtcattctctatgtatttctttattcattgatagcaaaggcactatatatcttaaataccaagaagaatttatatagctttctttttgaaaaattgtttaaagtatctagttcaagatccccaatctaggtgaacttcatggaacatttaattgacatggagataattaggggatgttctgaagagttaccaaagagaactcctaaagagaaactagatggttgagattatttatggaggaagaacagatgaaagtaaaattctgctattaagaatactatctgggtaaagaaatgctttctgctttctttggtggaaatagataagagtgagcagacttatattcattcattgaaattcagataaattcataaccaaagttttattatatatatactgataaggtgaagagttcaacactaatctagtttgaactccatagatatttaaaaccagctattttaatttcttttagctttaagacaatgctgaaatatgtacttaattttctgaatactttgctctttatagttgccgtttcatgaatttgtgatattagacttattgtatgaggagttttgtatttttcttctttgaactttttgcttatagtgctttgggcacagaccttcccaaaccttagtatttctggatgaattttttgagagtgcacaacattggaaaggagcttttgcataatgccagcaatgtagctgaggaaatgggtctggaggaaaatgagatttgacacctgtaacagaggataaatatgataggggccagagtgccttatacagagtgtgataggaaagctcaaaactaacagaaacaagcaatggaagagtaaaggcagacagatggttgcagagatcttagtttctgatgctagctgtgttattaacagactgtgtattatttgaaataatttatcctcactgagcatctgtttctgtacctgtgaaaaatgtactagataatctttgatatatcattcaagctctacaattatcttcttttgtgacacagagacagacaagaatagagattatcaatgttatataaaaggatgttacttaccaaacaagtttctgaggtttttgttttttgttttctgttttgtttctttttaggtaccaccttcccagactttcttgttactgtaacgtttatttcttcaaacagatcataaagcaagcagatattatccaggtgtgcaaaagtgattaaccatgtgattttcagaaaaaaaaaaaaaaaaagaaaaagcaatcaatcagcctttaaggctgttgttgtgtaataaaaaccttgcttgacagttgaagtacaccttaactttttcatttaaaatttattactctttgaaaaaggagaacttgttgagcagcatattttcttttttcacagatgtctgattagcctgcaatattttggttctatttaatatacttttaactattttttaatgaatatgaatgtaaaaataatgttgagttagaatagaaatatctaactgtatgattaaagttgaatcacttataaatttgaaaaagcttcttgtcttctattgttaatgctcctagaatctcatgtttgagaacgaatgttcagtgtagccaaaacctaaatctgggrctatatgttgaatgttttaaagtcactagtagaagggcaatttggtggctaattttaaagtacataaagagtattaacaataatgaagtgtcattttgttcctggcattctgtgtgtgtgtgtgtgtgtgtgtgtgtgtgtgtgtgtgtgtggtgtcaaaaaagtatctgaaggggcctgtaatagaaaacctagttcctttatgatatacacaatctagcttgaaattttgatgcattaaattcataaaacatgaagagtttaagctttgcaacacttaattgacacatgcgtcagaataagtttggaaaaaaatgaaccttcatacattttgacttctctgttttctatttgataactttggtattgcagttactcttttttgacacaagatggtgatgttcacctgaaatgtttcctgagtacaggctctactgcgtttagaggctcccccttatttatccaaagagcagcttaaagaaatgaatgaaactggctttgctttaagagataatagttgaagaaaagcaagagagtgtgtcctcttttataactgatttaacaaataatgattcaaatttaagtgtgggtttgtgtgagttgaggactggggagcggagagcactgggaaaaaggaaagttgaacagtggagaattagcagtcattaggtatgcagtatgcattaagtctatgctatgtgttttacatatgatgtctagttaattttagtcaaatatgagcactttacatgtattttacacaayactagtgcattccttgtttaattgtgcaagtttaraagtacggtgtgtgtttgttctttcttaaaaaaattatgacgtatcatcagccagtgtagtagctttattcataatttaagtgatactgtttcatttttaaaaatacacaagtttcttacatatagttaaatatatatttaacatagtatccgacaatctcagtcctaggtatttacccaagaaaaatgaataaattgtccagcaaagacctgtttgtaatgtttatagcaactttatttataacacctaaacaacccaaatgtctacctacgtgaatgaataaataagttgcaacatgtccatayrgtgaaatactactcagtcatgaaaaggaacaaattattgatatatgcaaagatggataaatttcaaaagcattatgctaagtaaaaatagtcagatataaaagactatacactatactgacattgtgaggattgcagggacagaaatcagttcggggatctgagggaggaaatttcaccacagagcagcaatgggaaactttttggaatgatgtagatattctatatcttggctgtagtggtgattacaggactgcatatacagggatacctcgttatattgtggtttattgcactttgcaagtagtgtattttttataaattgagtatttgtggtaaccctgcaagtccattggtgccatttttccaacagcatattctcacttcacattttggtgatttttgtaatatttcaatcttcctcattattattattatgttatcttgatctgagatcagtgatatttaacattattattgtaattgttttaggacaccataaaccacacccatgtaagacarcaaacctaataaataaacgttttgtgttctggttgctccaacagccagccatttttctgtctcttttcctctctttgggcctccctactccctgagacacaacagtactgaaattatgccaaagaataaccctacaatgatttccagatgttcagattaaaggtagagtctcacatctgtcacattaatcaaatgctagaaatgattaagtttcatgagaatggcatgtcaaaagctgagagaggccaaaagctaggcctctttcaccaaatgtttagccaagttgtaaatgctaaggaaaagttcttgaaggaaattaaaagtgctacttcagtgaacacatgaatgataagaaagcaaaacagccttattactgatatggagaaagttttagtgatctggatagaagatcaaaccaactacagcattctcttaagccaaagcctaatccagagcaaagccctaatgctcttcaattctgtgaaggcggagaaaggtcaggaagctgcagaagaaaagttggcagctagcagaacttgggtcattaagtttaaggaaagaagctatctgcataacataaaaatgtaaagtgaagcagcaagtgctgatgtagaagccgtagccagttatacagaaaatctagctaagataattaatgaaggtggttaactaaacaacagatttttaatgtagcaaaaacagccttatattagaagaagatggtaatctaggactttcatagctagagaagagaaattaatgcctggcttcacgcttcaaaggatagggtgactctgttgttaggggctaatgcagctggtgactacgtggaagccagtgctcatttaccattctgaaaatcctagggttctgaacagttatgttaagtctactctgcctgtgctcgatcaatggaaaaacaaagcctggttgacagcacatctgtttacggcacagttttctcaatatttgaagctcactgtcgatacctattgctgaggaaaaaaaaagattccttttgagatgttactgttcattgacaatgcacatggttactcaaggctctgatggaaatgcacaaggagaattaatgtttttgtgtctgctaaaacagtatctattctgcagcctatggatgaaggagtaataytgactttcaagtcttatgatataagaaatacgtttcttaaggctattgctgctgtaatagtagatatgggcaaagtaaacctccttgaaaggagtcaccattctagatgccatgaagatcattcatgatttatgggaggaggtgaaaatacgtcaactttaacaggagtctagaagaagttgattccagccctcagggataattttgagggcttcaagacatcagtggaggaagtaactacagataaggtagatacagcaaaagagctagaattagaagtggagtgtgaagttgggactgaattgctgcaatctcatgaacaaattagaatggatgaggagttatttsttatggctgagcaaataaagtgatttcttgagatggaatctactggtgaagatgctgtgaatattgttgaaatggtaactgaggatttagtatatcgtgtaagtttagttgttaaaacagcagggtttgagaggattgactccatctttaaaagaagttctactgtggtttaccctatcaaatagcattacatgctacaaagatatctttcatgaaaggaagagtcagtygatgtggcatactttattgttgtctttttttttagaaattgccacagccaccccagcctgcagcaactaccaccctgatcagttagctgtcatcaacatcaaggcaagactttccaccagcaaaaagattataacttgctgaaggcttagataatcatttgcatttttagcaataaaggatttttaaattaaggtatatatatttttcccccatacatattggtattgcatacttagtagactatcatatactgtaaacatagcttttatatatattggtaaattagaaattcttgtcacttgctttattgtgatattagctttattgcaatattagctttattgtagtggtctggaactgaacctgcagtatcttggaggtatgcctgtatttgtcagaacccttctagctgtaaaagtaaagagattgaattttacaatatgtggggtatacccaaaccaccctaaaaaaaattgtttaattcggaacacaaaggaaaatgtcagctttatacttcagcaacagtttcttttcacttggaggtaaggcctcctgcttctccgctcttttaccaacctttgactatcttttacaacccatttacacagacctgcattgttattgcctcagtgggctcagaactacctcagcaaagaaggggacttggagtgttgcttcaccagctggaaacctccatggccagtggctccttctgcctgagtactgctcgcacccactgagcttgttctgcccactcagcccagcaggctgcactctgctcgtgctactggccttaatcccacacctgccaagggcgagcgaggcgtggagcggtgagggttgtgtgggcaagtgagcccaggttcctgccactatgcacagtcaggcacacaagctgctgcatggggtgggcagctccasrcactgataacaggtgctggctccatgcaaggctgtggctggaccagatgtactgcacacatcttccactctgtgcacccgtgactggacgaggggaacacagtggtgcccagaagcttggagaagccaggaaccagagccccaaagagggtgtcacagccctgcctcagggagcccctaggtctgggctccccagagggctgcaactcttctccttctcatcaccctcaatgtggcaagtcagggttgggggtgtttttcagctttstttgtgttactgctctttcagtccctccrtttggtgggtcctgagttcttgtcccgtgtccaggaccagtgaggtatgtggacaactggagggtgagcaaggtggaaaggactttaattgaacaacagaacagctctcaggagacccaacataggtagctcctttctgcagctagtagtcctgaagtctctccaagtctggctgagtccaggggattttatgggctcagaagggacagagtgcatgctgattggtccatgggtggccatgggcaggcccagtgaaagcaccctaagttctcactctgggccgaggtctccacatggaactggcagcccagcccccaggcttcaggctgtccatgtcttgaaggtggggtttcaccagggacccayccctttgcacccaggagcctgtctgccttctgtcaccaggaatgtgccatccatggcccccaggctgtttgtgccaaggagtgcctgaagccctatggcaaaccaccctcagccctcctcagcctccctcccatgctcaccagtgcccaaagtccagaggggttcaaggtggctgggggctggcatctcagtgtctccctgagcacaggcacacccagttgagttgtgacagcacccaggcttggccacaactttgctctgcccagagcctgcgccacaatcggagtggccagggagcaggagcagtcacttctgagcctgcaggggcaggagggcttcccaggcccccaagaacacaaggatgcctgggtgcagagtcacggctggacaactgcagtgagccccgccctcccaactcagtaggggccagggctcctgcccgttcgcagccttgacggcttggcagagcttgcaactctagccgcacctacccagtrcagcgggcgtcctcacagccgcgctccagacgggccgctgctgccatcattactcccaagtttcgggtcagaaataagtagaattttagtgctggagagattcttagagaatttgatttcttaataaaaatttggctaactagatattttacatgtaaatcttttagagaatttattcagcaacaaaaatcagttatgtgtrtattgacagtttctaatctaattttcataaatataactaaaattatgaaaatgtacttaaaaaaaaaagctagattatactcctgtctcctagaagggacagtgcaggtaaaccagaccagtgccttgtatcaataattatgtttcataccaagtaataatgtttacctttttgttatgccagtacaatttatggcctaaaagttacatgttgtttctgtttacatcaagatatttgatgacagacttagtcagaggtatgttttgttatgaaaaagacaatgataagccagttgtaaaacgagtgccttttggaaatcttgattccggaacttttttttttgtattagagtacaaaaaagaatatttgtcataggattttataaaagtatagtatattctatctaagtagaaagttgaagaaaatagaatgctaatgttggagaaggtgagcaaaattatatttttatgaatgtttaggatattttgggaatttctaagagttcagcctctttaattctatagtttggggcttaacgcatttttttttaaatatgtgtgtttttttagaggctagtagaggcctgacattttgagtttaacaactttataaggtttattcttaaattctgtatcagacttaatgtctttgaattgtgtatttaataatttgatgtccttttgctactgcatttataaaccagaattcagtctttgatgattgcattatattactaagtgatttgggtaaagacagaggggaaaaagagaaagagggaagatggaggagggtagagggaggttgaagtggtatatgtgtgtcggttgttgtatttatgttttatctttgcttgttagacaattagaattgaagttaaacactaggaaatagatgataagtttatctctatactcccaggaaaatttaacattagaattaaggcatttagctaaactaagccaagattggaaaactactgtgctctatgcctgtgtttagaaataaagttttattggaacacagccacattcattttttttctcttgtgagtgctttcacactgcaatgggagagttgaatagtgctatatagacggtatggctgacaagctgaaaatgtgtaccatctggccctttattactaattataatatggcttatagaaaggtattagtaattgttagaactaagaaatactcatatgatagatctctcttatctgaagcaataataatattgagcctcataggaaaagattatatcaatcatctgacactgtaggtgctccaacccattttctcactctgattctccatacctccttttatgctactcagctgtttttttctgagtgcttattagtgtagtgtagtgaatattattaccacatagtttacttatacacagtatttattattgtctgtctcccattgctctaatgcaagggaagcatttttgtctattttgagcaaggatttttgtcgtatttactggtatattcaggtacctggaacacatagtagcagttagtatgaaataaacctgccttcttattaactatattaatcaatttagaaagcatcagcttttcacttgctggctatattttgctaattcaaaatgcaaataatttgctgagctaaattgtatatcttttaatttgttttctctgttcttcattgagaaagttagtattttctgtttttaacttctcactttagctacatgtagttttttcttgggggtgatatgtgtttagtagaaggtagttcagtaatatatttactgaatagcaaaacgaacactaagattaaagctcatgttaactactctgatggccttgaggaagtaatgctgagagtttaatcaccattaagtaattaagaataatttctcataaaagttctcttccttccagttatattcatgactgtgttttggtgatagttgattgccctgcttacatagttgcaaaattggtaaggagaacagtattctgcagccaagtttccatgagttgatatttcacattcacatttgtgacctaaacctgtattctggcagacagtgagaaaagccaaatgttctcgtaagcagcaaggattttcttcatggaaaacaaagaagtaaaaatgtaatccaagcaaaactatcatgtatatactgaattttataggtatatctacagaaaattaatatttgcttttatgcattttattacaagtttattttgttaggtattatatttgaagtaaaaaataaaatacaaaattgaatacataaagggaaatcagaaaaacccagaaatattactctaagataataacaattattaccacttttatttgagcacatgcactataccaggcacagcacaccgtgctttatgtayataatctgtaactctcctgacaaccctgcaaagtagtacctctgtttacattttgaagatgagaaaattactgctcaaagagattaaatagcttgccatgattcaggaactagtaagtaatgaaggcagtattgtaaggcaggactttctgtctccccagataccttattctttatcccgtagcatgtcatttttctccagtattgtcatgatgtgtcatcagatgactatactttttatccatactttatttaaaaattttatgtgttagaaaacttatactctagacatttaaaatttaaattttcataacatagtatgcttctgaawaacctgagaagaatgttacacaaaaggagatggcttgctgattccgtggagtaataaatgcctacctgttttcattttgaagttgaagccattgcttctaattttaagccaacctgtatttttttttcattttacctttcacatcttcataacatgtatttggccttatatagctgtgaaaattgattgtacaaattggtttgagcatatgagacctatgaacacttgtattctgacttagcatagagttttatattttctgagtagcatagacccatatatttttggacacccctcgtattttacatttaatagaatgatgaacatgattcattaagcctttctttgatgaaagacagaaaccacagagcaatgaagatattggcatttctgataaagtttgtatattaaagtcttatggtagcctatgaaaaagagcttgtttggaaaaattgagagattcaagttttgtattatacttaagttttgtcacttcatcaaatgcctccctttctatgtcttatcatgaatttatttttttccctttaatagtagatcaaatatagatagccaggaaagagtaaaaggtcagttatggtaatatagtgaagatgtttcattcatactttaatattatacaagtattagttttgtattatacttcttcttcttcttcttcttcttattcttattattattattattttgagacagagactcaccctgtcgcccaggatggggtgcaatggcatgatctctgctcattgcaacttctgccttctgggttcaagtcattcttctgcctcagccttctgagtagctgggattacaggcatgtgccaatttttgtatttttgtgaagacagggtttcaccatgttggccaggctggtcttgaactcctgacctcaggtgatccgcctgcctcagcctcccaaagtgctgggattacaggtgtgagccaccgcacccagctatacttactattttagaagaactttatgaacactattaataataaaattgctttaaattattatctattgagtgaatgaatggctggctgactgaatgaatgcatacattcagaactctggactccaaaatcttttagagtctccctttgagtggaaactactcttccttgattttggaaatgttaaattaaaagatagcttaatattggtgttgctcctttctataattgtcaaaaagaagttatagtgtcctcataaagacaaataaggagataaagaaaaacaaaaataattgagttaaattgttaatttttgtttgttttatgtgatcctcagattcttgggattaaaattcaagcagggatgcagtcttcttttgagttacatgttagagtctgtgacattagcattctctatctcaagcagaaatgctaccaaaatggttcttgatttaaggatgtgatttcttttatagtcagtatttttaacatatcacatttgagtcttttaaaacttaactgcttccttctttcacatatcagtttctcttccatcagagagaatagtgatatggaatcattttgtctgaatggttggctaaaagtacatacygtagaaggtagaaacttaaatacaggataatgaattttttttatatctgattcccattagcattgacattttttttttctgtttccagaccataaaagcttcttccaaaagtatccacaggcacagaagctctgtttagatttttcctatgtgctttcttttcttgatattttgatttttttccaaaatgagtttgctgtttacttttgatgaagtaaatatctatataaaatctgaagatttttatttcttggatttggagggcaatttgaacattagattttaaaggcttatacttaagatgaccattagtagttaaatctggtttataactaatctagtgtaatttaattaatagaggttagtgtggagtcattcatatatttatatttcctgtttcatatgtttataaatatttgatgagtatcattggctttttttctccaatgtgtttggattcaaggaattaagggtctgtataaatacttatttttctgtgtgtgcattttcttgtgtttattttcattggttttgagtttgacttaatatacacatgtgcatttaaaaagatgatctttccaaaagctttgcttgggatctttgctaggaggatgagttaatggatggagagggctgcttgctttactgtttattttcccagacaaatccatggagacaggctgctaataggataggagaaaaacaacaaaaacaaatacagctttttggcctggaactgaattgtattatctgtactgtcagttagagcctttgctcacttacccagacgatctctacagggattaaagcttcctcctgcatttgcgataactttcagtatgctgcagcgtcatatccagttaatattaaaaaaaaaaatctggctgtaaatagttacaaaatcctcaccaaatcaacctttagcaagagtgattgtgctgattaatcaaacaagattgtcagtaattaaaggaatacagatgacttggattttattttcagttttcatatgtaaattcttgcagcccttccccaaggttgggcctgattttgttatgggatctttgggctgttgcttttctgaccagcaacctctgtggccagtggcgcctttgcctgagttcttgtcctgcatctaggaagaatgaggtacatagacaagtggagggtgagcaagacaaagaggagctttattgagttagaaaagctcagaagaggcctgcagtgagtagctcctttctgtaggcaggtcatctcgttgagtgttgagctctcagcagagaggaggcctggagtgggtggctcctctctgcaggcaggttgtccygacgaatgttcagctcttagcagagagggtagctcctctctgctgctggtcatcctgttgtctgcagctctyagcagagaggaggccctgaagagggtagactcctctctgatgttgatcatcctgacctcagcagctctcagcagagagggtagctcctctctgcagycggtccctccactggctctgctctgctctggctgagtccagggcttttatgagcctcagaggggaggaagtgcatgccgattggtccatgggcctgcggtaaaggcaccacaagtccccactctggtccgcagggctggcagcctggcccccagccttcaggcctgccctgttctgaagatgaggcctcaccagggacctgccctgccccttcccacccaggaacctgtctgcatcctgctgctgcccatcacacccaggctgctcacacccgtgccaaggagcacccacaggccagcccagagcctcattcagctccatcttggcctccctctcctacttggcatccatagtccagaagggccaaggtggcaggaggctggtgtgtcagtgctgcctggagcagcacacacctggctgggccacaacaacgctgggaccaggaagaggccaggcaatgggagcagatacccctgagtctgctgatgatgggggacccacctgggtactcgagagcaccaggagacccaggcccacagccacaacccaggcagctgcagctgtgcctggggagctctcaccctaccaactcataaggggcagagctcccgccagtccctggctctgcagagtgtgcagcattgactgtgctgccttctctgcatctcccacagtggtggcaggtgaggtgcaggtggcatagtggccctggccaacccagcacaaacaaacccgatgctcccagggctagtcctgtgagtcccagtggcagcacctttggccaggtgcttgtgggctttcaagacatggtggggcgcgaggttgaggctgcaatggcggctccgaacttagtagcaggtcctgctacctgtgcgagggtggaggtggcacagtccaccttgaggacaygggacacaggagactgttgccactgctgctctcacagttgcttctgctatcctgtctgcctccttgcagcctggagcagggctccaggccatcgctgggctgggctgccgtccaaggcaaggatgacattgccgcaagttccccctgtggacccggctctcggtggcagcctggggctcctcctcgcacagcttgagaccctgccggggggcacctctggggcrgatcgcgggccccaaacccagttgtcgggagcgccaggctgaacagtcactccgacgtggggtggatcctggggttgcagcgtcggtggcccgggctgagcctccagctgaggtgcaggaacttggagccgccagcagggtgggtgcggcgacagagtcgcttgccaggtctgggaagcgggcgccactcccgctttccaccccacacccctgaagtacggccccactgtgcgttcaggcccacctcccttcactctgtgcgcaactgcagcacccctgggtccaactctgccttgagacccctccatgccagaccgtgctcttcccccgcctgcaggtaggtcrgcccggccccacctgagtggatcccagggttgggcttccagggcagcaggccccaggtaccgttcgccttggagtccacctgaggatccacagcctgcamccccacctgcacccacacccgtgccccaccacagccggtcccggctgccaaagtggcagtgactactttggatggcccgctgctgccatcaatttgaatggtttatattttgccgtccttgttgagaagaaaaacatggatgtatagatatacagtgatggatggactagcagcttaagaatcattttggggacattttwwaaaaaattttttgagacagagtcttgttccatctcccaggctggagttcagtggggcaatcgtggctcactgcagccttgacctcatgggctcaggtgatcctcctgccttagccacccaagtagctgggactacaggcgggtgccaccactcccagctaatatttaaatttttatagagacagggtcttgctttgttgtgcaagctggtctccaactcccrggctctcacagtcctcctggcttgacctcccaaagtgccaccacacccaggctattttgaggacgtttctcttttcagaaaagttataagtattttgaccctgcatgaaagtttggaatgatggaatcatataaacaaaaacaacagaaagcctcaaaagatttttttaaaccaaacaaaaattattggaaccagcttttacctcaagcagtgaatgagctacacagaaagttgatttttcttttattaatgattgctagtaatgagaattttacactttattcttctcaacctccctccaggtcagttttggttgttacagctggaggaatgatactggcatccagtgggtagaggtcagggatgttaccagacatcctataatgcacaggaaaaccctccctgacccacaatgaaacattgttagcccaagtaatgctgagattgagaaaccctgctgtaaagtgtggatttttatcttgatgggagtttttccaaatagctacattgatgtttacaatgctttataaataaagggaagttttgttctgtttgtttgaattactaataagagataaaagaggctttagagacagattttgggatttatagatgcaataaacacataaacacagtcttcgaaaaatgttcatggagacaatatggtgatcttgtgatacagggaaatggaaaacattttattatagaagaacatgagaaatttgtattattttttactctttcatggacatgaaatgaaacttctactttgtaggtgttggtgttgtacagaattatttctatatttgtgaattaaatcatataataaagtaattgcaatatccaaaaatcaattatcttggtagaatattcaagagcctgaagctctggattcacttcccatttgtgactaaagttaatttatttaatgtccaagcctcagttaacacatctgaaaagtaaggtagtttttataaacttgtcagatgggcattagttaatttgtatttgataatttgtattgacactaaactgttatcagatgttaaaagaactgttcagtctttgattgctgaacttcagtgtaaggagtaggtatttctttgttcatttcataaaggagctcttgaacctccgttttcaagcattgtctgctcagtcacaataatttgcagtggaaggatgtatatgtaaccacacatgtgtaaacacatacacacctagtgacttgatggtagagaagttaaggatttacaaaatgtgtttacattgctttccagagattgaggttgaggtttttggaacctggcatactgatagtacccattatggaaccataatcatgtggagttagcatacgagatagagcatataacctataaacatatttaatgatactcatctattgtgctacaacagaaacagacattggagagtaaatgtaaatgatcttattcccactcttaaaaatttgcagttgattttattttttaaatgattatgttgtctgccatactacccacagtccattaactaactgaatgcatgttgtcgaaaaagttctactttctgtaaaggaggagagggagaaaaaaaaaatgcaggttggagtcacaaatcatagcaagtcactttacctttgcttccatgtttaagaaggtgtctctttggtggagacagatgagatctgtattctgtcaccaccaaaagtccttggggttatttttttaattttttttttttaactaagggaccagccagggctacgcaactaatatagagaaaaattcagacaagaaattagatctcagatggaggtggaaactgcaaagtttgatcatcttttagagattgcagtgtataaaataaattgtttcacttataaatggaagcaaagcaataaacttcatgttattctatatacaactttaattactgtttcattttttaaaagatattttgttaagatggtattttgaattggtaacatatgtatataattcagagatcaaaactgtatggaaagatatacatgctcatwccttgttccttctaccactgtaccccaacctttccaccttacttttattagtctcttgtttcttcttccaattttttaacacaaacaaaaaatatgcaaatatatatgcaaatataaatatatgtttatgtgtgtgtatatataatatatattatatataattatattatatataatatatatattatattatatatattatatatatatatatatgttttcaatacccatttctcccagttatatacaatgcaggaaactatgtatacccttcagtactttgcttttttgatttagctctgtttcttgcagatctttttctctcagtaaatgggcattttcctcatccttttgwaggatgcatggatgaagaactaccatagttattcaaccagtgccttattttatggattcttaggctattgtcagtcttttgccactattaacagtactacaaagagtaatcttgtccaggtgtcattttgtacttgtgctggtttgttgtaaaagtgggattgttgtgttatgggtaaatacatttgtaattttgttagatattatcgtatttccttttatggtgattctaccattttttactttcaccagtaattttgaatgtgtcggggtttccaggttggtatcagtagttagtagttaatttaaaagggtaagtaaataatcatttaatgttttatatttatgtttaatgattttaacataaaacataaatatacattgatttcatttgtcttagggcaaataattttttaagaatagtctgctcattggagctctgtaatacctcttttctaaaccatattttattaattttagtgtttggcatctatcaagtagagtgataacttaagatactctgaggtaccttgagtatccccattcatctacagctgttctgccaaaccaaattaacagttgagagttactcatctttattgaatctttcctatttaggtttttttttctaaaaaataatatatttatttgaatcacataatttcaatgtcaagtaattgttaaactagaattttggaatcagtattttttactcatgttttgtttaccggtaagtcaccttgcttattacagtgtctcaacgtattaagtgttyagtaaattttcattgaatggaatagaaggaaaagaggtagtatggaaatagactcaactgattctaattatgcacccaaaacaagaaagcaaaggttacgagagcaggaggagggtgcgcatagcagagggccttcttatcagccaggatatttaacctcccatggctgaagagtctaggaagtgacatattttgctttccagtctcctaactttctcttcttagacatacaaaatttatatcaaatagagacagtgtgggtccatctttttccctcattttgctgtcattttcaaacttgtttattctggaaaattataacatgtcttgccaaaattgattggctagatgtgctgcaacttacagagctttagaccagttataatgatgaaggttcagtttagatagtaatgtgctttgaggcaataattatgggatatttccttgtagtgaccagtaatttttatgtcttctgtattagtccattctcacattgctaataaagacatacctgaggctgggtaatttataaaggaaagaggtttaattgacttacagtttagcatggctgagcaggcctaaggaaacttaacaatcatggcggaaggcacctcttcacagggctgaagagagagaatgagtgcaagcaggggtaataccataaacttataaaaccatcagatctcatgagaactcactgactatcatgagaacagcatgggggaagctgcccccatgatgcaattacttccatgatgtgggaattacggagattacaattcaagatgagatttgggtgtggacacaaccaaaccatatcatcttccaaacagaatttatcatcaacactgacragccatttcagttttatcttaattattgcaaggactggtcaagagaacgtgtttggaaattggaaattaatcatctatgttgaggaaataatttataacatttgagtttctcyggtgaatcattaacatagtttccatatttaaatttctgccattatattttttcacattgtctgtcttctttccaaataacttctcagagaaactcttagaaaaagcagtaataattaagggctaaaaaaaagagcttcagtgcacttgtgacatcattttatccgttataattaaccattaaaaattagttaatattagttacctaactaaagttagttaatataatatcattatgtgtgctgcatcatctatgtgcccttctggcaagactgagttttggtgagtgagggttgttactgcagtcacattctagacacagtcatgtgctgcgtaaccatgttttggtcaacatcagactgcatgtacaaatgtgtcccataagattataatggagctgaaaaattcctatggcttagtaacactgtagccatcataatgtcataaccattatgatgtggtagcatagtgcattactcttgtggcaatgctggtgtaaacaaacctgctgtgctattagtcatataaaagtatagcacattccatttgtatagtacatcatacttgataataaacaactgtgttacaggcttatgtattacctatactatacatttttatcattgtagtgtgtactctgcttataaaaaaaaattaactgtaaaacagcctcaggcaggtcctacaggggatattccataaagaaggccttgtaaacgtacgagatgacagcttcatgcatattattgcccttgaatacctttcagggaaataagatgtagaggtggaagacagtgatattgatgatcctgacctacgggcctaggctaatatatgtgtttgtgtcttcgtttttarcaaaaaagtttaaaaagtaaaataataaataaaatttaaaaataggaaaaagcctataggataaggatataaagaagaaaatatttttgtgcagctgtataacatgttgttttaacctaagtgttattataagagtcaaaaagttaaaaaaaaaaaaawaaataaaaaatttataaagtaagttacagattaattcctgaagaaagaaaagttttaaaataagtttagcatagtcttattgtaccgtgtttattataaaatctatagtagtgtacagtaatgtcctgggccttcacattcactctttgctcacccagagcaaagagtttactcactgactcacccagagcaacttccagtcctgcaagtaccattgctggtaagtgccctatacaggcataccgttttttaatctcttatacattatttttactgtgcctgctctttgtttagatatgtttagacacaaataccattgtgttacagttgcctacagtgttgaatacagtaacatgctgtacaggtttgtagcctaaaagcaacaggctatatcatatggcctgggtagactataccatctaggtttgtgtaagtacactctgtgatgtttgcacaatgacaaaatcacttaaggatgcacttctcagaacatatccccattgttaagtgacacatgactgtattttgttctgtaactttcttggccaaatgtactattttgagtcaaattccatagacctttttgtttcctcttgaagtataatgaaccttttccttttaacttataaaaagatgagtgtattcaagattgattgttcagaaactttgtctgggcagatttgactttttattttaaattagctttgtcacaaggatattatcaccttatgtcttgaaaccctgacccagccctcattgcactctcccaatttccctgctggattttgtttgattatttgttgttttgctgcctcaccgatttacacatatcaccctgtagtttcaatatgtaaattcaaaacttacctgttttgctatctaggataatatttagataatcagttatgttgatgagaaagagatagatttgttctgagatacttaaatttattttaactgttctctccccagatatacagatactcctcaacttacaatggagttccttcctgttaaaggtatcttaagttgaaaatatcataagtcaaaaatggatttaaaacacctaacctaccaaacatcacaatttagcgtagcttaccttatatgtgctcaacacttacattagccttcagttgggcaaaatcgcctaacataaaacctgttttataataaactattgaatatattatgtaattaattgaatactgtactgaaagtgaaaaacagaatggttgtatgggtactcaaagtaaggtttcttctgaacatgtatcactttcacactatcataaagctgaaaactccaaagtcaaatcattgtaagtcagggactgttcattacttttgttttctaatgcagtggtaattaatgaaggaaaataccagaaattgacagtgtattgataaactgttctttctattcatagggctatctttttgcctttatactaatctcctttaataaatggaatagaaaactacttttttttttggccatgtcatctgtttttttgttttttttttttgacagcatattaggttgtggatagtatttggaaatccacatctgctctttatccacatgtgtttatcctacttgcagtgtagataaaaatgtgctttgtattttagattaaaaattgtgttttccattattttatcaattttcctttctgaaaattgaccttttaactttgtatttttgcagggaaagcttttgtcagaggaacttttattattgtttttcaaaaggcagttgcctcaagaaaatctattttactttagtatgaaagtggaaaactgacatttaattgcacaagctgtttaaaaatcataaaatataactactgctataaaaatgtgttcatataagagactagaggataatattcagagcataaaacaatggttggagatccacagrcaaccaacactggtagtcaaatagtgattaaattcttgataagtcttgctgcttttttttctgaaattttatttaataatatcatataatgtttttcatttgaaaaggaaaaagatgttatcaagttcctgcctatttaactttagagagaacttagtttggtttattmagttagacatgtagtcagtgtagcactttaatcttttaactttaccactttaattattttacaaatacaagttcttgatgatcttttatgtttttctaggaaatattagtgataacatctcatatcaatttttttgtaacattcagaatgtgtagtcatgaagaagaacagggcttacctcaaaatatctggtatactctgcaataaaagtatcatcactggccatcagagaaatgcaaatcaaaaccacaatgagatatcatctcacaccagttagaatggcgatcattaaaaagtcaggaaacggccgggcgcggtggctcacgcctgtaatcccagcactttgggaggccgagacgggcggatcacgaggtcaggagatcgagaccatcctggctaacacggtgaaaccccgtctctactaaaaaaaaaaatacaaaaattagccgggcatggtggcgcgcacctgtagtcccagctacacgggaggctgaggcaggagaatggcgtgaacccgggaggcggagcttgcagtgagtcgagatcacgccactgcactccagcctgggcgacagagtgaaactccgtctcaaaaaaaaaaaaaaaaaaaaaaaaagtcaggaaacaacaggtgctggagaggatgtggagaaataggaacacttttacactgttgttgggactgtaaactagttcaaccattgtggaagacagtgtggcaattcctcaaggatctagaactagaaatgccatttgacccagccattccattactgggtatatacccaaacgattataaatcatgctgctataaagacacatgcacacgtatgtttattgcagcactgttcacaatagcaaagacttggaaccaacccaaatgtccatcagtgatagactggattaagaaaatgtggcacatatataccatggaatactatgcagccataaaaaatgatgagttcatgtcctttgtagggacatggataaaactggaaaccatcattctcagcaagctattgcaaggacaaaaaaccaaacacctcatgttctaactcataggtgggaattgaacaatgagaacacttgaacacaggaaggggaacaccacataccagggcctgttgtggggtgtggggagaggggagggatagcattaggagatatacgtaatgtaaatgacgagttaatggtatagcacaccaacatggcacatgtatacatgtgtaacaaacctgcacgttgtgcacatgtaccctggaacttaaagtattaaaaaaacaacaacaaaaaaaaccatgttcttattggaccactgcatacctgacatgtatttcattatttggtgaatatgaactttaagaggaaatttctttattatgaagttttttaaaactgaaattacagtgtcacaaaatagttaacttgggtcagaggcattccaaatgatttgctctgtaagtgaatgaatgaattgaaatctaacttcgagtattatacttcttttgacagaaattattttacaaagaaaatgtaacataaaattaagaaattattatttctctggttttgtttggcgattctaaaacaatcaccaggaaacatattacttttccatgagttcttacgaacacctttaccttgggtatatgaaaatggcctgctcttgagttggatgctttattccagatgtgttcacataaacaaagtatggaaagtctatacttgtatgtataggaaacaatgggtcagctttgaaattttttatgaaatgtacatagatttttctagacacgtacagaaaaatgagaagtcgtgtctagatggagccatctcttgagactggacatctccagtagaaatttgacttctagctagaaagacagtatcaaattgttctcaaatattaatttatcattcttctttcagggcttccagatgagcttggaaactgatttacagagataattaagaccatttgccatgaacttccttatgtatccccatcattaacaagacatarcttggctctattattatctgctgctcctttcctacactgtcagagaaggacattttttgcctaaagttaattgttccatctagtttctgtagctcatctcaattttaaaaattttagctccctagtttctcctcacagaccaaatatattaaaagtgaacttgtgaaagtcaccagtgactactgaacaaaatttaatggtttcctttcttactgtgttcaattccataaattttatcctgctgagtacctgtatcttgaaaccctgtaccctattagctttgatgacatgacacttttcccttctgctgactctgagtctagtactcttttatttcagtggaatttaataatcaccttaatatggcaaatatttaaacaaaaatctgaatccagtccagcctccggttttgttttataattcaaaatttgaaatctcaattattttatctcaatttcttttttctgctctattaccattactcttctggttgagttatttcctttattactgccattgcctcttgactcgtttctctgccttcagtctctttctccaccatttcatattcattctgttttatagtattcttcctaaaggagtgatatactgttaaggaacatacagggactccttgtttgcctcatcaagtccagctcttcattctggctttttcactttgcaaaagttgcccataccccatgcagcatcttaccattatagtattttctgttttcactgaacatttaccttttatcttggcaattatgtcttctggtagtcatgtgatatgcacgtactattatacattcattattttctccaggcttttgcttattttgtctcctcctctttcatctaaaaccatgctcattacttttccttgactgcctgtcttaacagccttttccatgaattttttatttttgaggttttgtttagtttttactaaattggctctacaaatcttttttctctagcttacttgtcttctgtaccacctagcttagttcttgatgttctctaatagttcrtgtgttccaggtttttcctgtctttctaataacatgtaagtatcttgaggtcagagagattgatacagtttggctgtgtccccaccaaaatctcatctcaaattatagttcccataatccccacatgtcatgggagagacctggtgggaggtaattgaatcatgggggtgcttacctccrtgctgttctcatgatagtcagtgagttctcatgagatatgaaggttttataaggggcttttccccttttgctctcattcttctccttcctgccaccatgtgaagaaggatgtgtttgcttacttttccacaatgattgtaagtttcctgaggcctccccagccatgccaaactatgagtcaattaaacttttttcctttataaactacccagtagccttgggtatgtctttattagcagcatgagaaggaactaatacagagatcaaatcatatttttgatagccgtcagataatagttgtttcatgaattttgcccgttaattaaaaataagactacatggccaagtgcagtggcccacacctgtaatcccaacattttgggagcctggggcaggaggatcacttaaggctaggagtttgaaaccagcctgggaaactttgggagaccttgtctctacaaaaattgaaaaatcagctgtagccctggctactcaggaggttgaggcaggaggattgctagctagatccyagaggttgaggcctatggtgatccgtgatcttgccactgctctgtagcctgggtgacagggtgagactcttgtctctaaaaataaataaacataagacacagaagctaaatatttaaatctctttagttttcacaggaagtcaataatgaaaccaggatctgagtagaaacagttattttaaaatcataatatcacagttttatcatatcagtttttatagttgtaaaaatttcacatcagcagagggcagtcaaaccatagttcattcaactatcttatgggaaattaaaattttctctgtgtttttctgcttaggacacaagctgtactttatataatcagtttgtaaatacatttcaaagctcttcagttggtaagctgatagaattgtattactgtttagccayggaaggtaaacagttttttttaataaatttaaataaaaggaattaatttttttagatcatgaaatgctttattatttggtgtttttgatggatggccactttacatagaaatttgttttttctgcctcagaagcagtatttctgttaaattgcctgttattaattaggctattttttattcaaaaatattaacttttatggaatacctttattttcccctatgaacttgagaaaaatgagtttttattagaggctrtagtataacactaactaaaatgtagtttggaaagttttattgagtttttcttccttaaccttttctttggctggctgcaaacaactagtgataatgtgtttttagatgtgcttattttcacctcttcctcctggaggttaagctagtactcattaaggaaaaaatacagtttatactaaacagtgtttaacatatactgatggtattactgtatttcctgttttgtgttcacaatgagaagattctgaaaaactgtctttgtgtaaatactttactgacataccagacaagtataatcttgtctgctggtaggcaggaaagagtgatgtcctggaatgttgttgagaaggaaatctctttgtgttccacaaatgatacccttaaaccctttaagaatataattttaaaatgacagctctgaatttgcttttccttccgtttattaacttttcatgcgtttaagttcagaaatgcatttagttgggaaaaaaaccattgtgtctgagaaagaagtatctccctggtagtttgtgggaaattattggtagaagtatctcagggtaaacataaaaacagatttaataattgttgctttttgttttcttagtttaaactttttctgatacttgagtcaggcttttggtaattctctacaggcttaaaaaaatgcagcatctccaacaaccatccgaaacatctacccaagaagtaatttggggagattgttgttagaacacaaattttttttaaagttagagttggagtttttaaattttattatttaatgtgagtcattaagacatatgaaaagctgttgtgtagtgttaacattgaatattctagtgaatggatttttatatacttaattattatagctgagagttcacttaaaattatactgatgtttctgttcagtgactgaaaaaaaaatgattatggttaaacccttaaataattgacaaaacagacatcacagactagacctgtgtgtgatttctgggtcagtggttctttttcttcttcttctttagtactcccatcattattacttacagtgattttgtacttcagctctcactctaaaacccagcaaaatggagaattatctgtaagagtctccaaatacaaggtttaaaatgcttgttaataattttcaaactttagaaaagtattatatgctttttttcatcttgaagttcttgcattgttaatgcatgtcatatgttgtatcctttgttaaagtatttgcttaaaaatatgtgggacattatccttcatatagacctgttttcataaatctgctctgatgaattctgaaatatggaggctactgcattttcaattaaaaatcttaaaggsaatactttaagacaaaagagctaagtaattcaaacaagtattaactaatatggtagtttcatggtatcagaaattcagattacttctgtgccatcccttaggccacatggtaaaaagtatctcactgtcacattagttgggttctcattcaggtcaacaagaattaggagataaggtaatagctcatccctgccgtttaagagcataacccataaattgcagctatcatttacatcccattggctaatcttagctacaaggtaatattcagctgcaagagaggctgtaaaataaatatattctctattttgaggggctgggatttaaatttggctttaactcaggggtttcattactaaagagaaaaactaacagtctctgcgattacctgttagcaccatcagctgtcattgtccactccttcctctttgaaacattcctctttgttttacgtgacacagtaatacctaatttttcttctatttctttgtcctccttgactcctttacatatttattctggtctgcctagccacagaatgttgcagtttgtcaaggctgggcacrggacccatcttctctcatccacatccatggcttcagttgtcagctgtgattcagtgcctaattcagctcagatctttgctctgaccgattcaaccatctacttacatgtctcaaaggcacttgcagttcaacatgtttttaaattttgttctaaattatatatataattatataatcttaattttatgaagtaaattctattaccatccttgatcatacacgtgagaaactgaaacacagatggttaagaaacttgaccaacatagctggtaactgttatgtgaggttttttgttgttgttttgtttttgaggtagggtcttactctgttgcccagactgaagagcagtggtgcaatcatagctcattgcaacctcaaactcctgggctcaaaccatcccccacctcagtctcccaagtagcagggactataggtgcaggccacagtkcccagctaatatatatatttttttaatttatgtagatatgaggtctctctatgttgctgaggctggtttcaaactcctggcctcaagcagtcctttcacctcagcttcccaaagtactgagatgacaggcgtgagacacgatgccaggttcagttctrtcagttttgataaatgcatagaattgggtaaccaccaacacaatcacaatgcaaaacaatttatttactccaaaaatttattcttgcagccaccactggtgggatgtcttctttccaccactgacccctggcaactactgatctgtcctgtagttttgcccatttcccaaatgtcatataaatgtaatcatgcmcatgtcatctttgagtataacctcttttatttcacatgttttcgagattcgtctgtgttactgtatcagtagtttgttccttttttattattgggtattattccgctatatagatgcactacagtttgtttatacataataaacaataaaggacattttagattgtttgcagcttttgctatgaagaatgttgcagtacacattcacagactggtttttatgtgaacaaaacttcttatatctaatatgattctaggagtggatttactgaatcatagggtaattaactgtatgcttaattttatataaactgccctattactttccagattgcctgaactatattcccaccaacaatatatgagcattccaggtgccctgcatacttgctagtgcttgttattgtcagtgttttttttttctttagttttaatcattctgttagttatatagtattatcttattgtggttttaatctgcattgctcttattaccagcaatatcaggcatctcttcatttgcttatttgtaatttgaacattttgtttggtgaaatgttttctttggatcaatttttaccctttcaatgggttgttttctttacgtattctggatcaaaatcctttatcgagcatattacaaaccttctcttaatctgtagcttgtcttttctttttattaacactgtagttcacagagcaaaaaattttagttttgaagaagtacaatttccttttttaaaatcaactctttacttatgtataatgtctcctatggggatttttaaaattatttttttattgcggtaaaaaagcacataacataaaagataccatcttaactgtttatttttcttttctatcttagcagtttytaagtttacagtttagtagtattaagtatattcacattgttgcacagcctccaaaactttttcatcatggaaaacagaaaatctgtacccattaaacaactctgcattacctcctccccccagtccctttctactttgtttctatgaatttgactgctctggatacctcatataagtggaattgtgcagtatgtgtcttttgtaactggcttattttaatttagcataacgtcctcaagattattttatgttatataatgtatcagaatttcttttttgaggctgaatattttattatatgtatataccacatcttgttatccattcatctgtagatggacagttaggttgtatccacctcttggctattatgaatagtggtattacaaacatggtgtgtgaatatctatttgagatctgctttcaattttttgatatgtactcagaagtgaaattgctagatcatatagtatttctatttttaatgttttgaataactgccatactattttccacagcagctgcaccattttatattcattccaatagtgggaacaaggttttaaatttctgattcttttcttttttcttttttgatagtatgtatcctaatgggtatgaggcgacatgcattgtgattgtgatctgtacttccctaatgattagtgattttcactatattttcatgtgcttcttggccttttcccccccagatttattgaagtatgattgacaaacaaaaattgcatatctttagagtgtacaacatgatgtttatatacacagacacatatacattgttattaactgtagtcaccaccatgctctacattaggtctttaatacttattcatcttgtggctgagggtttgtatcctttgactaatatcgcacttttcccaacccttaggtcccaaccattctattctctgttaataggagttcagctgttttttagattccacatataagtgagatcatgtagtacttgtctttctgtgtttggcttatttcacttagcgtgatgttttcagagttcatccatgttgtcgcaaatggcaagatttccttcttttttatggctgaattatatttgtgtgtgtgtgtgtgtgtatacatatatgtacattcacaatagccaagctatggaaacaaccagtgttcattgatagaagaatggacaaagaaaacatgatgtgtgtacwtatatatatatatatatatatgtgcatatatatttgcatgtgtacacacacatcacattttctttattcattctctgtcaatggacacaggttgtttccatagcttggctattgtgaataatgcttcaatgaacatggaagtgaaggcatctcttccgcatctcttccgcataatgatttcaatccttttttttttttttttttgagacggagtctcgctctgtcgcccaggctgaagtgcagtggtgcgatcttggctcactgcaagccccgcctcctgggttcacgccattctcctgcctcagcctccccggtagctgggactacaggcgcccaccaccacacccggctaattttttgtagttttagtagagacggggtttcaccgtgttagccaggatggtctcgatctcctgacctcatgatccgcccgcctaggcctcccaaagtgctgggattacaggcgtgagccactgcgcccagccgatttcaatcctttgtgtatacattgccaacctaaatagcaggcagagaggttctccgaagataatgggtttgttcgagactgcatagaggatttgcagttctgggatatgcagcctatggggaccacaggcatatccaaagaggttcaggcaaggggatgcttttaaaggtaaaggagaaaagtagtagtttattttgaaacaatgacaacattggttacggggcttatcacaggagctgacaccagttctttagtggaaactgtgtcaggcaagtgttcttgtgcatctggctagctgtccttgtgactcctgtaacaatctgcagtttagaacgttgtggttacaggcatatgtgcctaagagtccttcatacagtgtctgttatagttcctatcataggcgtgtgcgtgtgtgtgtgtgtgtgtgtgtggcctccctttgtaaactcctagctttatttatatatattttttgtttgagtttgacacaggtgacttcattttgattctgataccttttacaatacccagtagtgggattgctgaatcatatggtcattctgtttttacttttttgggtaacctagacattgttttcttaaatggctatactaatttacaatatcactttatattgttttcttaaatggctttactaatttacagtgtcactaacggtggataaggattccctagttttcacatccttgccaaaacttactgtctttcatctttctgatggccagtctgacagatgtgaggtgacatctcattgtggttttaatttgcatttctcattattagagatattgagcacttgtatttgttggacttttgtgtatcttttgagaaatgtgtattgaagttctttccagtttttaatagggttatgtgttctcttgatattgagtagtttgagttccttgtatattttagatattagctctttattagatgtatgatttgcatatgtttctcccaatctggggtttttctcttcactctattgtttctttggtgtgcagaagctttttagtttaatgcagttccattggtttatttttgctttcattgcctgtgcttttgaggttatatccaagaaatctctgtctgtggagctttttctcttaggttttcttctagtagttttattttcaggtcttctgcttaagtcttcaatttattttgacttgattcatgtataaggggtgagaaaagggtccatttttattctatatgtggatattcagtttgctcgtcatcacttattgtagagactgtcctttccccattgtatgttcttggcatcatcatcaaaaatcaattgactatagacatgtggatttatttctgctctctctgtcctattccattcgttgatgtgtctgttttgatgctaggtatggctttgcagtatattttataatctgtttgtgtgatgcttccagctttgttctttttggtcaagattattttgactattctgggcctttgtgattccatatgaattttaggattttttttttttttttttgcaaaggatcmtaagaaactactatgaacaattatatgtcaacaaatcatrtaacctagaaaaatggatagaaacatttaacataacaaaactgaatcaagagattggaaatctgaacagaccaataattagtaaggagattgactcagtaagtagaagtctgtcatcagtggaaagcccagaaccacatgactttatggctgaattctaccacacgtttaaagaagggctaatactaatcctcctcaaactcttctgaaaaattgaagaggagggaatacctccagactcattttatgaggccagaatcaccctcttaccaaagccagacaaagacattacaaaacaaaactataggccagtattcctgatgatcattgatgtaaaaattctcaacaaaatactagcaaaccatagtcaatagtacattataaggatcatttaccagtagatcaagtgggatttattcctggaatgtagattgcttcaacataagcaaatcaataaatgtgacttaccatattaacagaatgaaggacaaaaactacatgatcatttcaatagatgcagaaaaagcctttaacaacattcagcatcctgtcatgattaaaaatctctttaacaaattaggtacagaaggaatgttcctccacacagtagaggccatatatggcaagtctgcagctaacagcatactcaatactgaagagctaaaggctttttttctaatatcatgaacaatacaagatgcttacctattctcaccatttcttttgaacatagttctggaagtcctagccagagcaattagacaagagaaagaaataaaaggcatcctaataggaaaggatgaagtgaaattatctttgtttgctgactacatgatcttatacagttacacctctgtatctgtgggttctgcatctttggattcaaccaaccacagattgaaaatactcagaaaaaaatggatagttatgcctgctgaatatctacagacttttttcttgtcactcttcatcaaacaatatagtataacaacgtttacatagcatttacatgtattaggtattttaagtaatctagcgatcatttaaagtatatgggataggcataggttatatgcaaatactatgccattttatataaaggacttgagcatccatggagtttagtatcctccaggttgcctggaactaatccctcatagatactgagggacagctatatatagaaaatcctaaggactccacccaaaactgctagaattcataaacccaataaagttgcagggtacaaaatcaacctacacaaaccagtagcattttgttttacactaacaacaaactgtctgaaaaaaattaagaaaacaatctcatttacaatagtatgaaaaaataagtaaaacaattagtaaacaaggaagtaaaagatttgtaatttccaaatatttggaaatttttcagtaactcagtgtctttaactaataatttaatcattctagtaagaaaacatgctttgtatgattttagtctttacatttattaatttatgtaaattaatatgtgggttttatgatcacccacgacattgtcctaacttgtcgactgttctgtgtgctcttttaaagaaggtagtctgttggccgggtgcggtggcttacgcctataatcccagcactttgggaggctgaggcaggcagatcacctgaggtcgggagttttagaccagccgaaccaacatggagaaacccggtctctactaaaaatacaaaattaggccaggtgcggtggctcacccctataatcccagcactttgggaggcctagacgggcggatcacgaggtcaggagatcgagaccatcctggctaacatggtaaaaccccgtctctactaaaaaaaaaaatacaaaaaaattagctggggtggtggcaggcgcctgtagtcccagctacctgggaggctgaggcaggagaatggcgtgaacacgagaggtrgagcttgcagtgagccgagatcgcaccactgcactccagcctgggcaacaaaagcaaaattccgtctcaaaaaaaaaawatatatattagctgggcgtggtggcacattcctgtaatcctcgctacttgggagactgaggcagaagaatcgcttgaacccaggaggcagaggttgcagtgagccgagatcatgccattacactccagcctgggcaacaaaagtgaaactccatctcaaaaaaaaaaaaaaagaaaaaaagagaatgtagtctgttgttgggtgcagtgttttatagaggtcatttagtcagtggtccccaacctttttggcaccagggaccagttttgtgaaagacaatttttccacaggtgtggggcgggggttggtttcgggatgaaactatttcacttcagatcaggcattagattctcataaggagcacacaacgtagataccttgcacgcacaattcacagtagggttcacacttctatgagtgcgcatctaacggtgcggctgatcaggcagtaatgcttgcttgcttgtctgctgctcaccttctgctgtgcagaccagttcttaataggctgcaatctggtactgatccacaacccgggggttgatgacccctgatttaggtcactttggttgattatgctgctattcatgtatttgatattcttgaagaatttctatttggtctattcttttggttcctgagagagaaatgatgaagtctccaagtgtaattgtggatttctctatttctcctttcattttcttcagctttgcttcatctgtgttgaagctctattcttagatgcattcacatttatcaattgttgcaccctctacatctcttggtaatttttgtattctgacatctaacttcctcagattttaacacaatcaatccacttttcttttgctggtgatcacgtggtctcattttacattcttttaacatgtatgtattattttattacagttgactttcatatagatagcattcaatttgtatcttgtttgctgtacagtcttaatcaggtttcttaaagttgtgtttataccatttagtataaatttccatatgtttgggtttatgtctgtgactttattgtttgctgtttgcttccgtttttcattcttcggttttcctttttctgccttcttttgaattattggaatattttttattactttaattcatttactggcattttaaaatttctttgttttgtgtgttgctctagcaattacaatattcacatctaagttttcacagtctacttagagttaatattttatcacttgaagtttctatacattagtatagaacccttacaatgatctaggtcaagaagatagggaaaatggatatttgatgacagctgggtgtctgccacaaaggacaacattaagttgccttttagcccacacttctcttaatcttttctgtactgcttgttatgcatcctttaattatttgttttattctatattaatttcagcctatagtgtgcaattatatggaaaataacgttatgtccatgcctcctttcttgggatatttcctaaattcagtatgagattgttgatatagataagaaaactgacttgcaaagagatttcattgccccaggtaacacagctaagtggsagagctgcaatttgtactctgagtctggttttggggtctgcacatttgaccacaatgctactgcctgtattttacttaagataatagttatgtttatgacaaacctctaagtatgtatgacttctaaatttacacattctttgagtgttctaatttcattgtcataaaagcttactattttctcatttttaagacatatttcatacttcttaagatagctcttaaatktattccagaaactttaaacatttttgatattgttgaactagttttggaatcaaaacaatttgtgattcccacataattgcagttaaattttttcagtgtaattttaaaaataccttatgggaaaatactactgcaagttgtgtaacactttaattatctattttttgtaatcataacagcgtacacttaacatttggaaaaaaaataaatatattcaaaatatactttttcatttttttaaggtaatatttggtatttataggtcttcaagcccaggagcctacaaccgacagactgggaaccatactttatactattagtgaataataataacaaaaataagatttacattttttcttaggataccagagttgaataaattcaaatttagaaacacatatacatgtatatgtataaaatatatgtatatcaaagaactagaatttttaatcagactcaaaccttaccagtgaaatgggaatactctttacattatccacctaaaatgttcctattaaccatgtggttttaagaggtatttaaattttggaatttttaatagctatctgtttcttctgtaactttgattatattatagcttttcttgaatgaggagataaaacagatgtaaatattaagacaaaagcttgatgcctatgaaacaaattatttccaagtacatagagtgaaaatactttaaaagcctttgaatttggcaactttctctttgcattccctttcctgattctgtagcaatcactgtcttgttcttaatgaactggtactcaaaggtcattcagaaagattcattaaaaccagtagggaaataattctacagacttcctttaaccaacctgtagttttgttttctttcttaatagcctcaggtctcagacacaaccatcttttatttattttttctttctttctggaatcaaataacttttaaagatttgagaaaatcagcaccaatatttgaagattaaaacttgatccatctgtcagttagaattttgatttggaaaagccrcaggtaacagtgtaaattctagttttacaaatgtagtaataaagaatatacttcagtggcaatttaaacttcatattagtgaattaagatactcagtaagtttcagggtattagattgataaagcaatacctggattaatgactagtcattatgaggtgtacttttatctttcatttaagtcaaaacttatgttgcattacatgctttacaaaaattgccacattattacrttatggtttggccataaataggagcaattttgggaaccatttattttgtgaatggttactgattttctgaatcattcaagttctacattctattaaattttataagcctattatttaatatgagctttttctgttttcagactgatacccattatttttcagtcatagcagagaaataggtttccaggataaaacaaattgttcaggtattcaagcagccctcaggagtaggcaaatatcaacagataggtcactgagagatcaagggatttactcttttctttggtataccatagttcttgaaggctaaaattttggtaactgtttcaggaaaataaatactgtactatatttcgtttctttccttcaatcctgwtatgtaaagtaaacaaacctgttttcagaatatctaacctttagttgagtaaatgacaggtaggaaataaagctgttgatacrggagaatgagtaagtgaaaaaatccatcctttgtcaaccactcttattttttaaattgaatctgctttcagtttcagtagttgggagtgctagatgtacatagcttaatggatttggtgcttaaaattctggttttcttcttttacttacattccaacatcacaatagaaaataatgcaaatagccttctaaatgattgatatatgatgatatgttaggcttatttattgagtcaatgcttcacacctgttctgtgtcacaacacctcccttagaggataaggttttttttttttttwaaaaagcgattctttcttgtaatgccacaggcattataaatctctcaattgaaaaatactgaattaaatttgcttcttatttaaaactacttaagggtaaccctttgtatacttgttttttaaagttgattgcttattatcacattgctctatgtgtattcccattttttaaactttgacaagatactaatttttatattcatggtaataataatcttaacattatataacattttcacaatatggagtttactgaaaacaaatctaaaattttacatttaagttcactaaagtaacacttgtaggatgagaaagattttacttgtttggtggtacatggaaatttgaccccacatggaacaaaagttaacattgtcatgaaactactaaaaaaaatgctcgtgtcattttagcctacattaattatagcatctagattgcataactaataacttcatagtattctgtcctggtgagatgacatctagaatataacacacaattttgagatttcatgatttgcaactaattttggacataacaggcaaggtccacagcatatttttaccatggataatagaatgtaaaatagttactgttttcatgtgtttaaaagtctgttctctagaaaagacatgattttaaaagaaagtttctagcaaaacaaaaagaataactttgtggtgaattggaatttttcactaggggacttgcttgttctggtaggcattgatctcccagttgttctgggtgcttttaaaaattatattacatttctgctgcattgactaggaagttaaaattagccaggcatggtggcgtgggcctgtagtcccagctactcaggagactgaggcagaagaatcgcttgaacccagaggcggaggttgcagtgagccaaaattgccccactgcactctccagtctgggtgacagagcgagactcggtctcaaaaacaaaacaaaacaaacaaacaaaaaaacagtgttactctatagtgtactgtgttgccagatttgttttgcccacctgtaggctaatgtaagtattctgagcatgtttaagttaggctgggctaagctatgatgttcagtagggtaggtatgttaaatatttttttgatttaatattttgagcttgatgggtttatcagaatggaactccgttgtaagtagaggctcgatctgcatctttggagaaacgtctatgcaagttttttgcccacttttgagctgggttgtttgttttttgtttgttgttgttgggttttaggtattccctatatattctggatattaatcccttatcagatagatgatttgcaaacattttctttcattctgtgggttgcctttttactcacttgccacttttttgtagcaaacgtgacccctcctaaaaggggggatatatgtattttaagaccattccttggcagtattgtccttagagctttaggttgactatttgaattcgtatggtctttgactcatctcatcatctaaaactccttgatgttttcctcctttctttaatgttatatagacacaactgggacagctgacagtgaatataggttatatttttgcgaagaatttagcaagagaggttggctgtttggcattaaatatctgtatcactgtgaagtttttaattgtttttggatactaattatcactgaacatgacctagaacaataccttattacatagagttactcatttgtcaaatgtaggaatgaatgtatgtatgcatgcatgtaagtacacatgcatatagccttggtagttactacagtgctatcatagatgtaaagtctttcacaggcctgggtagacagcagtcatgttttattcatggcctagtctagcatggttcctggtactcttaagttttggtgaatgttcgtcatataaataaatatatttaatttagaaagcatcagaaaaactaacatttggataaagcagatataattttgtattatatatgtgagtaattttctttcatctttaaattgtcatatttccaaggaatctattcattgttgatttcatgtccctcttaaacaacttgagatacgttaactttggtaatctgtcatagacttcacttcattctgtggcctttaatttaagagaatggtagttctttagatgctctctcagggttaatctcccaacagctggaaaaccaagaatggctgtgaaaagtacttctttacctaatacaggattgcataactacttgcttttcccttaaaaataatctgcagtatacatggatcttaaaataggaatgataactcttttgtagaaatattaggggatcagaagagataatttatacgaatcatttggcttacaatttgttgtaaagtgaggccttgagacgcaatagctattacagggtgagcattctaagttggaaaattcaagacctgaaatgctccaaaatttgaaacttttgagttctaacataatgcttgaaggaaatgctcattggagcatttaggattttggattttaaggtttgggatgctcaaccctaaaccagtaagtatgtataatgcaaatattacaaaatccaaaaaaaatctgaaatctgaaacactctggtcccaagcaattcagataaggggtattcaccctgtattattagtttttccagaaaaaaaaaaraaagattatcaaagatacacacccgactttagcactaaaatttttaagttgttgtaccttcaattgctttatttttccctttcaattctaatgttaaaaaatgtaatcctgttttacaaaatatttcagcaagttttcagcagtcgtcgctattacattaactataaataatcttttgggagacctatcaacatctactttctctttcacaatttgataattaacgtatatcacatctgtgcctttctttctagggatttccaagatctgatggaatttgcaatggttgatgtatatatggctcttatccattgtcagtaacccaccttcttatgagcttttccaattttcgggcaaataactaagtacagtatttgtgctgatataggtacaagagtttaaagaaggcatgacttaagtgttactaagaggaaataaggagaaattatgttaataaattggcattatatactaataaagttagtctccaatctgtggaaacatgaagaatagaatgtaatgctttgcatttctcggtggatgaatgattttaaaatttcatacatgggggagaaaataaaaatactcctgaacccaaagcttgacttcattcagggatatgcataaacttctctctctttttttttttttttcctttaacctgaaaggacatttagaaagctaaatctatttttccttcttttcagtcagaaagtcaggcctcaccagcaacagactactggtgttttgtaagggctatataatgttttcatcgtaatgctatataatgttttcatctttgtattcgttagcccagactttttgtttagtactaggaagtatttccacagatgttgagtgagtggataaatgaattaacttgtgtggtatacctggggaaaaggcagtaaatgggtagaaaaactcaagaataatctacacctatggggttgacaacttttccagttgctctaggaattactgtaatcattttctttctgttatactgccttatagatctgatggaaattttgaaaagagygtgttctcattgtttagctctatatatctgttggcttcatttgcttttaatatttttttctaatagatacctttctggcttgcacagcaaagttcaattaatgtaaggataaaatgtaaattatctaattcagcttatttacatgctgtaagtaatatagtaatgctaactgggctttccttggcttttgtttcattgtgatctgagctcagattatagtttgatctgctatgcrctgacctgggtgccagatgcaagggaagccagtaaataatactataaagagagatgctagctttagttttgaaaggacgatgacttgtaagtgagactgttgtaaaccacacagtaattaaaaagctccataattaaaagggatatttcctttctttaacctgtcttaaatgttagatatgattaaaagcaaaagcatttctctcaataaagttgggggaaaagtacttgtttttatagtcagtttttgaaacataggaaaagtgacctcaaagaacctgtgttgtaaaattttcagagtcataggaacttgaactttgtttcttgattacttgatgaaattggtcatactagtttatgaatagttctgaatggccttgtagtcttctgttggttttggtttcatctttcagtagatggacctgtggaaaagtggaactggctttgaaaatgtactggaagcarttattttcctaagacaataattttttttctcttttccattttctttagaacatacaggctagaagatccactcagcatttaatgcatatgactttacattgctgtttatctttttgtttatcccgaaattggaagcttctaaaaggcagagattcactctcttcctgtggtggttctagaggctgtgccttgcatagagttaatttttaaaaaataattaataattatttttcttaccatttctattactcatttttcaatttggagaataattttacctggccacactgatggaacttgcatacatgggccagctcttttactcagttgcccaatttttgaatgaaactgaaaactgtggacagatacatcagggaagaggaacatacagagtaaaagacataaaagccttaaagttgcttcagtttcttcatttcatcttgtaaattacacaggagtccttcagataaaactcactggttatatgacaaattaagcaattagattactgcacacctaataatagtagcaaataatgcactttcaatctgctaatatgttaagcacttttcattatctcttccttttacatraggggaatctgaagtttagggaatttaaaacttccacaaagttagtagtcagtagtttatatactagtattaaatctgtttaaatccaaagccggtgacattaacagtttccaaacgataataacaaaagtgaaaaatgttagtatcattccttgagaattcactacataaaattctcttccaaatatttactcattttatagattaggaaactgatccccaatgaggtatatccttttggtatattggttaaagaataatatrtctacttgagagtggcatcctaattactgaaaactggactacgaacttttaaagtttaattaacagtaatttaatgtatttttatgttatttcttaatctttggattattttttctttttggaggttgtgtatactctgaatacttatagcagtacttcagaacaatttagaacatatttgtacttctaatgcaaatttaatgtctagaatcctgttaacacatgtgataaatgccaacagaaagagattgatttgctgtcatgaattagactgacagatttctcaacaacactagatgcaagaggccactaaataggaaactaactttgaacctaagattttatccaactaacttatttaaatatgagggagaagtaaggatatttgctcatatacaagatctcagaaaacttactgtaccaacactatttctgaaaagcaccaggcaagaaaagtatgtccagaaggaactagtgagatatagttagtaaaaggaaataaagaacccaagaaagggtatagttttatagccacacaatggggagaaaaacggaaaagaaggggaagaaaagaaataagagccaagtaatttgttggcttagaattaaaactccaggtaatattagtctttcagcagttatggggacaagatgggtaaggaagtcagttagagatcagagtaggtgaaaattttgaggttcttgtattcatcagggaaagtatttatgaactttagacactaacagtgaaaaatatgcatagttatgaaactcaaaattaagctctctgtttaataatagacatcagagataacatgaacagatactgataaattgagaaaagagcttcagtaccaaaygaaacaaagaacacagatttccaggtgcttttttatctgatcatgttgcagcaccattggaaccattgtgtcactttaaccaagcctccaatatttttattctttcagatcacaaggggtggatgccaaacctctcatttttttcctcatgattacactacaaggcaaagcgcacagggtttgagttcgttgcagttgctagggacatacacctagggactgactactagggcaacctatgctgtcatgtcacattgttcataagtcttccgtsagcaaagatctgtcccaacaaatgccccatactcctttcacttccaagttattttctatcctaaacaatttttccttcctttatactggaaactccaagatctataacattttatsataaacttgatcttattttatattatatatttgtgttcccatttcactcttctgttatcttactctaacacttaaatgctgtatgatcaaagttaactaatttcttaaatttaatgaatctctttaaaccaggagatgtcatgtcttggttgtgcatggtatacataggaatgatagtttaaggaaacccatttctagatctttagtgcctaaaactgatctgcttgagaattcacttgtgatgggggtggaagtttctcttctccaaactcctctttacctctgaagcatcaaacaagtgggcagtgggaaatacaggtattacgtttgagagaatagatggcactaaagccatctattattaaactggtactcagtaccagtttactgagtgtggtctgaagatcataataattaccatttgcctttttcattcttattttctcagtagttacaattaaaaaagattttcagttgttatctgtcatcattcctgatatataatatagacagatttcaaatacttgaggaatatgattagaacagaattacttctcgcttatttgtatgaacaaggtttctctgtactttattccacaaattttttttagaaattgaaatagaatctaaaaaattgaattgtagcaataagtaatagtttacaatgtctataaaaattcactggggagggagactaataagaggattccagctgtctcattaagaaacgaactttctataaccttaatgtttaattatattttccaaaaatcattaatacatttatgtaattgtacatgaatcattgtaatgctcattcaatccagaagaaacgtaatacttagaaccttatgttcatatgagtgaacaytttttaaaatttcaaaatatgtgcatatttttctaagaattattacaagatgatcagagaaagaaggaaattctattgggatagtagagtagaagtacaaattcaaggagaaaaaaagagcagtgtaaaatttctcaaagatatcttttaaatagatggtagtgttaaatcactgtatatttaaatctgttgaatatgttgaaagagttgatgtaaaggtcttattttaaaatctcaatatttacaaaactctggaaattacatcctttaccactatttaaacatgggtacatgtgagaaggcaaaaatctcaattttcttttttaagtatacatacagttcctttttagcactaagagctacgtgtgcataatgattgagaccagaactccacattttgttgaaaagtggggagtgagggggagagagagaaatgcttttaaaattaaacaatgaaacttttccggggagtagtgaagagtgggtggttataaaatgacttggaagcagatcagctggaaaggtgaaagaatcagaaagcaaatatagcagtggataatggagttgatctgtagctagcctatagcaactgcctttactatattttaatatgtgccattaagtgtgtctcttgattgcttctgctttctgccagtatggcttactgttgtaactagagttagttagctggcccactgataccaccaccagagccttttctaatctattatagatttctaacgtgggataggaggccaacaatgtttctttgattacaaataggaggtacataccttgccaaaaatttgcaacatgatagaattgaagtcagtacagaacacacacacactctatttttttttttttttttgagacagagtctcgctctgtcgaccaggctggagtgcagtggcacgatcttggctcactgcaacctctgtctcccgggctcaagcaattctcttgcctcagcctcccgagtagctgggattacaggcaggtgccaccatgcccggctaatttttgtatttttagtagagacaaggtttcaccatgttggccaggctggtctcgaattcctgacctcaggtaatccgcctgcctcggcctcccaaagtgctgggattataggcgtgagccacggcgcctggcacacacacactgtttttataccactgttactttacagtttgcccaagttatgacagagatggcacttatacttagtaaataaatttgataagttacaggcttacaaatggagaaatcaagaatcaggtgactaaagtgagatggagataaaactagataagatgagtctttgctgcaacacttgacaaaatcctgggagaaaggataaaaccatctaattcataaaatttataataggccaatggactggaaagaaaaagaaatacaggaaagatactgtggaagagaaattacagaaaaaggtgaggaaaaagttaatgtctggggatgggaataaaatgagaaatggggtttagctgtctataataaaacaaatagaaaatgaagaccraagctttttctctgcttcgatttgtacttttcaatttcataatatgtttgtctaaatcagtgattatcaaaagggctctaaggtgtgcatctgagaattatgcatgtacatcagaatatgcaaatgttctcttttcttcataagattctggtacaacttaatgatcttaaaaaatgcttacccaatcccacctcacataggcacacacaaaaaccactggatatttagatggaactgtgctgttcatttcaatggtgttgaagcctaactaatgtgattttcatcatgtagcaaacatttaaaacttttgaatttcctaagcattattttaggaaatagcttttttttttggtcagagtctcactctgtcgcccagtttggagtgcaatgacatgatctctgctcactgcaacctccgtctcctaggatcaagcaattcttctgcctcagcctcccaagttagctgggactacaggcacacgcctgtagttcaacatatgcaaatcaataaacataatacatcacataaacagaaccaatgacaaaaaccacatgattatctcagtagatacagaaaaggcctccgataaagctcaacacccctttatgctaaaaatactcaataaactaggtattgatggaacatatctcaaaataataagagctattcatgacaaacccacagccagtatcatactgaataggcaaaagctggaagcattccctttgaaaactggcacaagamaaggatgccctctctcaccactcctgttcaacatagtaytggaagttctggccagggcaatcaggcaagagaaagaaataaagcgtatttaaataggaagagaggaagtcaaattgtctctgtttgcagatgacatgattgtatatttagaaaaccccatcatctcagcccaaaaactccttaagctgataagcaacttcagcaaagtcccaggatacaaaatcaatgtgcaaagatcacaagcattcctatacaccaataataaacagagagccaaatcatcagtgaactcccattcacaattgctaaaaagagaatacctaggaatccaacttacaagggatgtgaaggacctctttaaggagaactacaaacsactgctcaaggaaataagataggacacaaacaaatgaaaaaatatcccatgtgctcatggatatgaagaatcaatatcatgaaagtggccatactgcccaaagtaatttgtagattcaatgctattcccatcaagctaccattgacttccttcacagaattagaagaaactactttaagtttcatatggaaccaaaaaatagcccatatagccaagacaatcctaagcaaaaagaacaaagctggagacgtcacactacctgacttcaaactatactgcaaggctacagtaaccaaagcagcatggtactggtaccaaaacagatatatagaccaatgaaacagaacagaggcctcagaaataacaccacacatctacaatcacctgatctttgacaaacctgacaaaaacaagcaatggggaaaggattccctgtttagtaaatggtgttggaaaaactggctagctatatgcagaaaaaatgaaactggactccttccttacaccttatacaaaaattaactcaagatggattaaagacttaaacataagacctaaaaccataaagaccctagaagaaaacctaggcattaccgttcaggaagtaggcatgggcaaagacttcatgactaaaacaccaaaagcaaaggcaccaaaagccaaaattgacaaatgggatctaattaaactaaagagcttctgcacagcaaaagaactatcatcagagtgaacaggcaacctacagagtgggagaaaatttttacagtctatgcatcttacaaaggcctaatatccagaatctacaaagaacttaaacaaatttacaagaaaaaaacaaacattcccatcaaaaagtgggtgaaaaagtgggcgaaggatatcaacagacactcctcaaagaaagacgtttatgcaaccaacaaacataagaaaaaaaggtcatcactggtcatkagagaaatgcaaatcaaaaccacaatgagataccatctctcaccagttagaatggtgatcattaaaaagtccagaaacaacagatgctggagaggatgtggagaaataggaaygcttttacactgttggtgggagtataaattagttcaaccattgtggaagacagtgtggcgattcctcaaggayctagaaacagaaagaccatttgacctagcaattccattactgggtatatacccaaatgattatgaatcattctataaagacacatgcacacgtatgtttattgcagcactattcacaatagtaaaaacttggaaccaacccatatgcccatsaatgatagactgaaataaagaaaatgtggcacatatacaccatgaaatactatgcagccataaaaaagaatgagttcatgtcctttgtagggacatggttgaaactggaaaccatcattcccagcaaactaacacaggaacagaaaaccaaacacctcacattctcattcataagtgggagttgaacaatgagaacacatggacacagggaggggaacataacacactggggcctgtygggggatgggggtgggaaaggggagggataacattaggagaaatacctmatgtaaatgatgggctgatgggtgcagcaaacccaccatggcacatgtatacctatgtaacaaacctgcacacctatgtaacaaacctgcacattctgcacacgtatcccagaacttaaagtataataataagmaaagataattagaagacaagctacaggctgggggagaatatttgcaaaagacacatctgataaaggactgttatccaaaatacacaaagagcttttgaaattcaacaataagaaatctaacaactggatttaaaaatgggtgaaagaccttaacagacacctcaccaaagaagatatccacatatcaaataagcatatgaaaagataatctacattatacatcaaaagagaaatgcaaattaaaacgagacatcactacacacttgttagaatggtcaaattccagaacactgacaacaccaaattctggcaaggatgtggagcatcaagaactttcattcactgctggtgggactataaaatggtacagccactttggaagacagttggatagtttaaaaaactaaacactcttaccacatgatccaacagttgcgctccttggtacttaccaaaaggagttgaaaacatgtccacacaaaaacctgcatacaatgtttataggagctttattcataattgccaaaagttggaagcaagggatagctgacatctgatggataaaataataaatagaagagaaacttgggagactgagatttctttaacagcggttataatagctaacatttattgaatacttaagtggcatgcagtgtcttgaatgcttatgttaaattatatatcttcccaatarcaaccacatgtatctgattatcaaagaattttcctcttgattacttttgtcattcagatatttattaattcttccattatctcagtgggcaattgagtcatgtcctagcttcctcttttaggtggaaacttgacaggcctagaatgtccacagtggctcacctatrtgtctggcttatctgggactttctcctgtagcaccttcgaactcttccacatggcctttctacagcatgggcttctcacagcatggcagccgagttccaaggcagaacatttcaagccttggaaaggaaaagctgcagatcyctgaaggctcactctgaatttatactatgtcactttgccaattctcttgtcctttgttttgatagagcatctcacagggctagcccaaatttcatgtagattcaacctcttgatgggtagagaagaaaactttttgtacccattttttttcttcgacatttattttaagttccaggggacatgtgcaggatgtgcagatttgttacataggtaaacgtgtttgcacccgtctttaacccactacagatattatgatagtttcctgtgttgttattattactgtaaaattatatttataagggttaactgccttttttacttgtaataacatgaacataaaaaataccaatgcaacatgtaaaggtagctccaaaaattagtaagcacaaagaaaatcaagcaaaataagcacaataaaaccacagtagggcatatcctaatgaaactgttgaaaaccagtgataaaaagaaaactttaaaagcagtcaaatggaaaaagaaaaaacaaacccacacattaaatacaaaggaaaaaaagtaataattgtcattaacttcttggcagaaacagtgcaaaccaggaggcagtggaatgctgtctttaragttcttaaagaaaaaactgttaatctagaattccctttcaagcaaaaatatcccttaacatatgaaagtgtagtaaagacatttgtctttcaaagacttytgaaagacaaaattatcggacaaattaaacttgtgagaatttcttgttagccaacttgaacaacaccatgagaaatgataccaagttcttgaggctggaggaaaatgaagcagatgggaacctgaatccattcactagatggaagcttgaaagaaatggaggagagggttagacaatgtgaagatttgaataaaaataagggagcttttttttttctcattttccagtttatttaaagatactttactgtttaatgttaaaaccgatattatagagttctgtaatattcatcaaagtatatacatgacaatattgccacagatgacaagagaaaggaaaatggaaacatatccttataagctcttaaagtgataaaataatatttgtagacaggtcaacagtttaaagtagcagagtacagcatctagctcccaagacaattgactgcacatctaaggtgatactgccctatacaggctaccaaaagtgtatgataagtgtccatagtgagattttaagagtaaaaactgtctgaatttaaggattaaaaactaaaaaaatagaaacagttgaatttttgaaacagtgaatattcaaccaatcctagctttgtcagttagtagctgtgtaaccacagcacttaaatttctttggaccttaatttccaaaaggagatcattgatatcaactctataaggaaggttatgggatggattagagaaaaaaatatattaagagaaaagcatagtgcctagtgcttgacatatatataagaaatttaacaaatgtaacacgtattgttaaagaaatttaaaaggtcaaagttagttactttggagacctcagtaaaggtgaggaagcaatacaacagatgattttgacaaacattagaaaatctgaatctcttgccaacatttttttctgtccacttctgcccctgcctgcttccctctttccctcttttcttccctccctctctgcccctcctccttattgttctcttgatctgtgaacattctcttgaatgtttctttcctgttgagtatctatccctatttctgtttatttgtttgtttatttatttagacacagagtctcactctcgcccaggctggagtacagtggcatgatcatggctcactgcagcctcgaactcctgggttcaagcagttctctcacttcagcctcccgagtagcgtggactacaggtgcacaccaccagacctggctaagttttatatttttatagagacaaagttttgccatgttgtccaggctggtcttgaatgcctgagctcaagccttcctcccaccttgaccagtgctagggttacaagcataagccactgcacccagtcttatccctattatgtaattttttttctcctttcttctcattgtctttttttccctgtcttcttttcctccacattccttcttgctagtcaaaatagtgaacagagttacattttttagtatatgcaattggccttgtgtatcttttgcttttgcatctacagtttcaaccaactatgaattgaaaatatttggggtcggggaacaaaaattaacaatacagcattttcaaaatttaaattgttaaaaaaatagtataactatctgtagcatttacattgtattaggtattataagtaatctagaaatgatttaaagtatacaagaggatgtgcgtaggtcataatcaagtagataccattttatataagagacttraacatcctcagattttggtatctgcaggargtcctggaaccaatccctcatgaataccagagaatagtattttattttttgagcaactaaaatgttgtttttctgttagttttaaagcatagtttgattttgttttaaacaaaagttcatcttggtacctgtattagtccgttcttgcactgctctaaagaaatgcctaaaattgggtaatttataagaaaagagattgaattggctcatggttctgcaggctgtacaggaagcatggcagcttctacctctgaggaggcctcagggagcttttacttacggtagaaggcagagtgggaacagatattataaatgttaaactcgtgtatgtaatttaaagggactaacacccaggatatggctagaccttaagttaggactctcagctacatggctgtgtttagtttgcaagtttatctcttcatcatagttccttcaagtatgcttgtcatttctgttttgaacagaaaaaaaaaatggagcaaaatcttgaagttgtaatatrgaagtttgaaccaggggtagaatactgaaacaaacatgttaaaagatggggtctaggcttcacattacgtacgtaacccttcaagggcctattctctatgctgtagcttttcaattaatgtcaataatagaattcttagtacaaaattcctagatacctagtcaccatttttaaacattagcttgtcaggaaaatgtgccaaaaagttccaaaacatgaaattacaaataaaaacttagaaaataatccctttagcaattgggaactgcctcagtacctactcagattggaaaccctcaacttggtcatgttttttatcaccaagacagctggtattgtttacaacatatgtctgagtattatttttaagtttctaattgccagtatctccagtttttaaaaggacacaaaccaacctctttgtaaaacttctgccctccaaaggctttatgttctctaagatagttaagaagattaaaaaaaaaaaaaaagaaaaamaaagaaactcctgttcttaatgatcccatgckgatagtttttttttggataaagtgtaggctgctgttcatagagatgccaagtacatatgaaaggagggactcatatggaaggtgaacttattaccagaaatcctaacctgcaggtagggtttctttcttcctcaaaataaaaattaacccatggggtgagacgcaaatttggcaacaacactgaatgatctctctacaagcttttttttttcttttttgagacagagtcttgctctgttgctcaggctggagtgcagtggtgcaatcttggctcactgcaacctccacctcccaggttcaagcaattctcctgtctcagcctcccgagtagctgggattacaggtgcctgccaccacgcccagctaatttttgtattttttttttttaagtagagacagggtttcaccatgttggccaagctggtcttgaactctcaacctcaagtgatccacccaccttggcctcccgaagtgctgggattactggtgtgagccaccgcacccagcctctacaagcttttattcatcataaccatacacatttattgttgcataccataagaagcrtaaagctttaaaagccttttctggactaggccacctctaccccctactttgtatggtttacattggtttctatgtgaatcatttgattattgcattcatgttttatctcccaaatactgctagctcccttaggatgaggttattgttttatataaaagatccctttcaaaaaagtagtctcaaaaaaagattgtaactcttgatttacatagcaaagtattaattaacagcatcttccaagatcagacgagattgagcgtgttcggggtggtatggcagtagacaagtaacagcatcttaattagttcacgtaaaacaaatctctagccacattcactccaactttcaatatcacaaaatgtgtggtatttcctaaaaacatagctttctatgtcatcatcaagtgaaagtaaatacctcccccctctataaaagaacaaaacctattcaacttaaataatgaaatatgttattgttaaaagaatcctagagtcacagaaactggatactgaaaaggaagtttgaactaagtcgatagcattgggagtgggtgtaaagagtggctaggaatgacatcttccttgttccccatacgcacatataccactctattttgccagatacaccaggcagctttttcaaatacacacacacacacccacctttacaccttaacctctcactgtggcattactagggtagtgagcctctgtgaatgatgaaagtgagtagtgtctttggtgtgttgagccaaaaaatagattgaaatcactgacaataccaatcctcatttgacacatatgaccattacagctttgagaagataaaatgacttgttccaaattacttttggcagagaaaataacctgaatctcaggtcaagttgtgctctatttcttytgtacatttaaaagtgtggggatcctcttggaattagcctgtgaaatgtatttgcattgaaaggtcaatctcaggaatttcagagcaaaggttttgtttgtatgtatgggtgaaaggacacttacagttttagtatcaatgcaatttgatataaactcattagaaagtctaagtttactaagctatgtattaatttaaataggtataacaatagtagagatgaataaaacatcacttcagtatttcatctctcttcatcttgacaagtgaagttcaggtgtggtaatatctattatgtaggggctccccaaagaacttcgggtcaagaaatacagagtacataggcagtatataaacatacttattattgcatctagtctatggaaaaaaaatacagaaagaacatttgagcacaataaatctcccctaaagagagttattacttgctgcaacctgtctgcagcagtcagaggaaggaagtcagcaagaaagggaaagaatgccaggttgcaaataccaaacggtcccatcatttgcaattcaagactaagagcagattcctaaaactcaaagttcaaattcagctgctaaaattacaatggtctcctagattttagaatcaatttttctaccagtaaaggtgatcttaatctaaaatattaatagcgaaaaccacagaggatatgtggtaaaagagactgcagaaattatgtctaaccttcttattttcagatgaggttaacatggattagagagtgtttatttgactcctagtccagtgttctgtccattacattttgttaggaagaattataattctaacaaattacttccaaatgccaggtaaatcaggcccgattaaaagtatgtcttttatagctgttaaatggttctgaaaaactaattctgaaggatttatagataatttattatttcrttttcttttgtaaaagttttggcaagtttttaatctgatattatgatgcttttggaagctaacagatgttgctctgaaagtcatatttctcacttaattacagttttaataaagcagcctgggtaatgttagttgggggagtatttaggacacataggagccaagtcagatagaagtcatagaagtgttgcagtcaagaggcgtttgattataaggtgcatcattactttgtagactactaagaaagaaaatgcagccaattaaactatgatatgcattgtctctgatttctgcatttaaaaaatgaagaaatatgtttcctatagtcattgaaatayagtaagtcgttggttaggaaaggtaaggacctttctaaaggggaagaagcagagtagaggtgagagtgcatagcatgtagagcctgggttacaggctcctctgggaagcagtgggatattaactggaaggctgcaggacctaggaccgggaggtgcaggaagtgaggacagtgcccagacctaagccaattgtcctgagtctcctggttccatttagttagtgaacaggataatgtatcagaatcaatcttaacaatttaagtgggagagcagcattcaaaatcttgagactctcctagaatttagaagagaaatgaagtgattaaatgccagccaaaagcatttcagctttattttttaggcaacagtgggcctctgaaaagcaatgaaataaacaagtttttagaatatgaatctaacatgggtgtgaataattatggtctgccaaaaatcttgtctttttgttgttgttgttgttgttgttgttcagagactccttctagagtaacaatattggtgtgatgactagccttttttctttctattttaccaagttgtgctacttctctgagaaaaatccaagttttacacttaatagtaaagaagccagtggttatttatatgagatttttacccaccctaaccttagactcagtgccacaacacagcatgctaaattaggttacatccttaaaaaataataataataattcacttkgggtggagtacagacctgcccgtagccatcagttttactgcaggcaaaataaagacacacctcttcctgaaaacacagacaacacaaattactgtggccagcttcttatattataatttttacatcagctcatccctaactgctaatcacctaatactacaatgtaaacactgccccttccaaagaccaggcttcctttggtggtattctgtgataacctgtcattctgtagtatccttgacatgtctccctcttacaagattctctcatctctgcctgtgttttatcacctctgtcctatcactgtgaacaagaaaatgccttcctatttgtcccttgctaaattcctactcatcttttaagaatcagaccttccgaccacctccagcaggagtttgggcttctatgcatagagcagttacctctttctttttcttttgttttttttaaatacaagtagtatccccttatctgcagcggatacattccaagacccccagtggatgtctgaaaccatgggttatattaactgctatatataggtttttttcttatacatacatacctatgatgacatttaatttataaattaggcatggttagagattaacagcaataattaataataaagtagaacaattataacaatatgctataataaaagttatgtaaatgtgttctctgtctctctcaaaatttcttattgtactatactcaccgattttcagactgaggttgaccttgggcagctgaaactgcggaaagagaaactgagtctaggatgactttctrtctcaattcttgcattgtattgtacactccttaaggataaaagccatgtttcttcagaatcttatcccaaaaacttagcagagtgcctggtacataatcagtggtcactgaattttttttgattgattagatgatggagatttatgtatgtctagctataaagtttatgtttatcatatacaatattggcttaataagatattctttggcctcaaaattagaacctaataggaagcttaagacataaaactaatttgatgacaaggaagcatgaaataagtgctctaaaaagaaactcaagaacatttaggaaggatataccgcatccagcaggggtgactaagtgataataattacactaagtcttggggaagaaaggatgctatttcaggaggtggaggagaggaataggtagttattccatatggaaataatactctaggcaagggatacagacatgaaagcaaggaatgtatttgaaggatggtatcttctaattgcatagttcaaaattctaaataggaggtcagtggctaatagagctaggcaaggaagttgaaatcacattatggaaaagtttagaatttagtaggcagtagagagacgtaatttctgartagaaaaaaatactgtcatgagattttacaaagrttaatccctgctctgactggattagaagaaacagaaactgtaggccaggggtgcagggttcttmaggaaagaaatataagacaagaagttaaactaaataaaaataagacaaggatatatatgagtgatattgtaatgtataaagaaaagtgtctcattagacttgcaagctggtccatttacatttgatcatatttttagagaaacatgaacaagccaaggcaagtccaaaggagagtaatcaggatttgacggggagggagggatgagggtctgcaagtggtgagttcctggttaatcagctggggaaaaaaaaagaccaggaaggaggaatgtgataggcagcttcagttattcaaaggactgtcctctagaagagacaacatccttattctgttacttcagagaggcaagaagagacactataaaagtggattgtgtccggaagagtgtgaccaagatatggaatgatttggaaactgtgtcacacaagaagaataaaagtattttttatgataaaggagaattttaaggaacttgaacaccaccttcaaatacatgcaaggaaaaatgggacttttgaacattcagttaactccatataacagaaccatctaatttatagataagcaacttttctctttaccaattatagtgggccatctgtcaaatattatagagtacatgagtatgttggaaggaaatgttgacagtgacaaatgtttttaaaagggaaaattaatagtgtacactacatttattttattagtatctctaatatcagatggaaaagaaaggagaatcaatgggcccactgatggcttagaacttatgtctataaaatttactcatattattgcattaatatttcagaattcatagtctcaaataaatacaaaatatagagagacatatcaggaagtttaggttacctatgtataaataattaaatctctttattaaaatgaataccaataccaaattttattttataaggagtcatcatggcatagtatgaagagctgtgggttgacatcaggcataccyaaatttgaaaccagctctgctacttactmgctattttaactttagcatgttatttggcccctctgggtcatggtttaatcatctataaaacaaggatataattcctctctctagggttattatacagattaataataatgtttatgtagtatataaaaagaacctcatacatatttgatatttaaaatggcaattattaatgttattatctgaaaaggttttaacaagcatgctacatagatgcaaatggtaaagtggaaacaatgtggactttggaatcagactgacctagctttgaaggctagcattgtcactcactagctgtacatccatagtaacgtgattaaccaagctgaactcagattatctgtaaaataaaaacactgcctgggccaggtgcagtggctcacgcctttaattccagcactttgggaggccgaggcgggtggatcacaaggtcaggagttcaagactagcctggccaacatggtgaaaccccgtctctactaaaaatacaaaaaaattagctgggcatggtggcgcgtgcctgtaatcccaactactcgggaggctgaggcaggagaattgcttgaaccgggacccaggaggcagaggttgcagtgagctgagattgcacggctgcattccagcctgggctacagagtgagactccatctcaaaaaaacaaacaaaaaaaacccaacactgcctgtctactccacaagttcagagtagtaaattaggtcatgcttattatttttgtttttaggatagtctggtatgtagtaaaacctcagtgttaatttcattttatttccccaaatatatgaacaggctgtaccccacttatgacctcttaacatgtattttacagacttacgtggattggaagtcctggctgggctccacagtccctgagggaagggagagcttcccttttttgaacatccaaaccccagggactgattcacctaactgctctctattaggcaacccttgaaaggaaacttctgagttttagtaaatgaagagaggacagagacccatctcttgttttatgcagaagtaaagagtttaagtgactaatgtccaggcacacttactgtaattactcctctctaaaccttatgtaatacttctaaagccctacatctttcaagagggtgtagtgatcagaggtaaggtttaaagtctaccacttagacctggtttttaacttctcatcaaaataccacagtctgcattgagtgttctgatcaggcttgtttycttattattgaggtaacttactttgctctttctctgcacatttaaccatggtgttctttttattgagaaaaccaccccttttgggctcttatataaattcagagctatacttcaagtcaccccaagatctgccttctttgtgacctctagtgatccttctaacccatagtgatttttccctaccttgagctttcacagccccagttcttccatattttgtcacttactttgtattttgagttattttctaattatttcatgtgtgtaacttactttcccaatagaaatttaagtctttgaagagaggaaactgtattattggatattttttgttttattttttgtttttgagacagagtctcgccctgtcacccaggctggmgtgcagtgacacgatctcggctcactacaacctccgcctcttgggttcaagtgattctcctgcctcagcctcctgagtagctgggattccaggcacctgccaccacgcccagctaattttttatttttgtatttttagtagagatggggtttcaccatgttggccaggcttttatatcccccactatgtctagcaaaaaatgtaattgtataattatctaattaagatttattgaaatgctttaagtttttagattctaattgaagtctctatgccaatactttattactttttttggttcatttgcctttgagaattttcttagcatttttaatttacttyaataattgagcgattatgacaggaaatcatttcatgtaaaaaacagaccaagtattctggttcctagccagttttctttcatttagatatgatggtactaaagcaaacaacaaatgacacctctacttaattagtgattccgctattctgaatatatatttcatggcaataagagtttgttgaagtttgaaggcctttttacagtctctaaaaagacttaaaattagtgttttcattcaagttatagatggttataatctcagacagctgagacttttcattttcaccttaaggttaattttatttggagtgaactgtaaaaaaaaaatactttggctttacaaaaattccttttagtgtaaaaatgactgaaaatattattattccctttatatgaaatgtccagctaaggaaaattatagagaaaaaaggtagattattagttgccttgggctagagttaggagatgccttggggattaagtataaatggacatgaggcaacttttgggttagtgaaaatgttctaatactacattatggtggaggttgcacaattttgtatatttcctaaaaattattgaatcgtatgcttaaataattcatgaattttgtggtatgtaaattatgtcttaataaagttattaaaaataatttatgaaattacagggttaaattttattttataataaacataataaattgtccttagtatccatttatgaaagtaaatatgttgcttgaaattatttcattagaaaaactattgctactctttagttgtatggctatctgtaggtcttgtatgtgatttatttattaataaatttatattgaactaagtagaatttttaaaaatatggctactcatatgtaaaagttactggaatggtcttcttatttttctgacctttttatatccatataaattcggatgatttctcattgatatttatgatatyctgctctgaaaataatataatcaattacttgcctttttaagtcaagtattctaccctagttgactataaagtgaattttttcaaaggaagtcttaaatttttcatatatctcttaagattaaatttgagagatgttcacattggggggaaaatcaaatttagtaagctgtgaactttggcaatgcaagattgaactactgccttaaatatttgttaatatctgctcactattccattcacatagcataagaatttcccctatgcctgatatttttggcttcatatttttaatttctatttctggatttgttttcttatgtccaatggagcattgatgctgatttttttacttcataaatacatagtatctgtgatggttaatactgagtgtcaacttgatggcattgaatgatgcaaagtattgaccctgagtgtgtctgttaaggtgttgacaaaggagattaacatttgagtcactgggctggaaaaggcagacccacccttaatctgtgtgggcacaatctaatcagcttcagacacagccaggatataaagcaggaagaaaaacgtgaaaaggtttgactggcttagcctcccagcctacatctttctctcgtgctttatgcttcctgccctcaaacactggactccaagttcttcagctttggaactcgaactggcttccttttgctcctcagattatgtgagttaatattacttaataaactcccctttatgtatatatctatcctgttagttctgcccctctagtatcaatcaaaatttgaagtatcaatcaaaatttgaagctacaagagaatttagaaatcatccagtgcaacttattaaattatacttttgataggggatgctaaatggttagggaacttgtttggatctrtggatttcgttggttatatactcagctcttaattgccaaggaatagtcatgatgaaccagcagactttcctcacctagttggggagaaaagaattagattaattttcggttccttgaactctagaaktctataaatctatcaactgtaactatgtcaaatataatgctatggatgttactcttcttaattaactatgtctaccttcactttctcatagtccagctatcattaatcttggattataacgtatggatcctatctgcctggctccctgaactttttatagaaaggagtatatactatattagtaaaagcacacactctggatttaaactccctgggtttgggtattggttctgccactcatttacactgtgtccttggacaggttattatcccctcaatatggggagaataaaatgcttcataaactggtgaggattaaatgaattaatacatgcttgaaatagtccactgaatataataggaactcataataagatgaataattaatataactcaaaccaactggtttcagggccttatagtatatataagtatatcattatatatttatatattatatatatttgatatatatacttacatatagatatctatatataatatacttatatgtaggtatctatatatatagctttttggggggtcctrcttagcctttctttctccataggtttaattgtagagctgtgtttcttttttttgtttgtttgtttgtttttgagacggagtctcgctctgttgcccaggctggagtgcagtggcrcgatttcggctctctgcaacctccgcctcctggtttcacgccattctccttcctcagtctcccaagtagctgggagtacaggcgcccgccaccatgcccagctaattttttgtatttttagtagagacggggtttcaccatgttagccaggatggtctcgctctcctgacctcgtgatccacccacctcggcctcccaaagtgctgggattacaggcgtgagccactgtgcccggccacagctgtgtttcttaaacttaagtaatgaataaatgtattgtaaagaaaatacctcaaacttctatgaatatacctacaaattccagttgaagaactacattaattaaatgctgccaccttccatggtagcttggttccaacacaatcagaaactctaatgcaatttttgatgttgaaatcaggtaaccagtactttattgtaagatcttcagctgattgagcattttaattttgttaggtcatcatcaaaacaaaaacagaaattttaagcatatgaaatatcttgagactatttcagcagaccctagttgagaactgttgcttcaaaagtaaaaataacacacctatgcacaccaaactgattgttttatattcaaaactccagtatcactatttgttttgatcagttgaaattacttaagagtaataacaggcctgctgccagtggtggtagcaactgaagctgatttttatcagatcaagagtgagccaggataatgccagtttggggccagctctaggtagaatgctaaaagttgttgagacttctgtcttccttctgttaccctactacattctgtcatccttcctcctgtctgtgccctttgtcagtgcccttacccctaaccccaaaagctcctcactgagatgcttgacatgttacttttcccagcatatttgtgttttaataaagcaaatctaagtccctgaaatacctcaagacttgttagaatctcttaaagtgaaatttctaacactctgagttcaataagaagaaataaaagtacatatatttttatataattttttatgtttgcaaaccaagaaacatgccatttctcctagtaaaaatgggggaagtgaggactactttgccttttctcctggasagagtagtcctcatttcccccttttttctttataaaaaggaaatgatgataaaaaattgttaattggataccacttcaaatggggattagttatgcatagaatatttcagatatattagtatagaagtcatttaagatacaagcattttatccttttgtaagttcttttgtctaaagtttgttaagaggaaagccaaagattattttgttgtatactaaaagctgtaaatattattaatttatgtcctakacttccctatggaaaagggaaactcagtattaccatgaacaggatccattctttatatgagtagttagaagctaattgtaggttattgagatttaatttagtctctggttatcatgtttagaatcttatgacatgatttgttttagagaaataacctgcttgcagttaagtacattccttagatgtcagcctggttaactagtgtctgtcctgagttggtaaatgtctacttagatgccagtgatgcgaatagaaactgtcgtgtcagcttataacattctcagagggttgcactttcaatgcagrtggggggaaggacaaagtaatagcttcttgttgggattacagtaagtgagggctcaagtgaagatctcttagttccttgaatgatcctttaaaaggtaatagttttccatttttttgctttcagttcttgcatatgtaatgaaaataacgtgaacttagaaatatgggcttagtaaattcttagtaaattatgttcacatgctataagattttaatcaatgagtttcaaatggggaagggaatttatatttaataccaacctacggcatgcctatattttaaactattaatcatccagtaacccataagcctaggaaggattagtccgasgtattacagtctcaaagagatagagcctggctatgcgcattgttctgtctgattatttttcattttctcttttgttttgtttttttgtttctagcctaggcagagtgcagtggcatgatctcagctcactgcaacctctgcttcccgggcttcaagcagttctcttgcctcagcctcccaagtagctgggattacaggcgtgtgccaccatgcccagctaatttttttgtatttttaatagagacggggtttcaccatattggtcaggctggtcttgaacttctgacctcaaatgatccgtccgcctctgcctcccaaagtgctgggattacagttgtgagccaccgcgcccggcctgttctatattattttaaaacctaaaccctttcctcttaaacaagcagacatctgtaatatatgtaacctaattgtaaaatagataaacgtaacagagagtatggttggtatagtttctggttagtgctaaatgattggaacaaagaaaggagagattactctggactggaatgatcaagaaaagctatataaggatacaacttgaggtggactgtgaactctgkgtagaaacagagttagggttcgttttggaggttctaacaattgtaatatttttagtagttacaagtagagctctgtcattcccatcatctaattataatgtgcaaagactgattgcatgtactctttgactacagttcttggcactaataaccctaaacaaagctggaggcgctaattacctccttttcctaatctgaattttgatgtgcttttgaactagtaagtcttctggcattctaagaagacttaccccatcactggggagacatttacttcagcattcagaaaactagatttttgaattaaagttttttagaggagtttttcacgcagtagcacaaataaattaatcagtgtctttatttttctatacccctatcgtcattgcctgcatataagaaggagataagtataacagtttactcatgggatatgtgtactttttgatagaaaacatggagactatgaaaagcattcattttgtctcctggttgtcagattctgtctgtaactgacagtatgatcctatatcttttaaatgtgctattacctgagtttcttttggtaacactaaaggtagaaagaaaaaaagttaacttagggtaaaggctatttgttcctttttcattaaaaaaccaggaaattcttttttgattggtgacatcgtattaatatttagtctgatttattagcatgaggcaaacagcttttttccccagagtgttgacttagagaatgtggacttatataaaaataaagataatttagtttatgatttttcttcttttttcaaaattcagtttctttcttaactttttgttggactttttctcactttttaaaaaaaccgttagttttgtgacttgggcaacctactcggcctcaattttcttatccctaaaatggggttattaacccacctatttaacagggtggttggtaggattaaatgagatcatatctgtggaatgattcaaacagttagaacggtacctcatagttacttagtgagtaagtattagctattgttttaaataaaaccagtaggatttcaaccacactggcaggtgtgcccagctctgccctttgctagctgtgtgaccctaaaaatgttacttagcctctttgtatttcagtttccatgtctggaacacggaagtaatactgatgcctcccttgtagatttttgtaacaattaaagcagttaatgcttataaaagttctcagaacaccctggcacatagtaagtctgttgttataaatattttcaacattatgactgtttttgtcaggatgggtttttttaaagcaatgcataaaagtactataaatatacatttgttctatrtaatggccaactaaggaaacaaaagcagataaggtaaaagcacaagaaatgaggaaacagaaagaaggcaaacaggaataggcagaaggataagtactaaaaaacatacatacacttccagggagagaggacagatcagaaagttcttcctatttctaaaatttgtttatacacacacacacatgaaatgaaattctagactatagtaagtgatctttgggctatttcctatatcatagcattttcacattgtattttgtttgctcagttaattatccatcttcccctgcaagctcttgagggtaagaaacattatgtcttgttcatctttggaaccctactgtctagcatgtagaaagctctcaatatttaaattgaatttaaaaatagggttttgcaatactaacttgtatttttccataaatgcttttctaatattttccataaattttccacaaatatgccttgatattttatatatatatagrattccttgactgtgtgtgacgtagtttaaaattttcctttttctaaaatttttattttctttttaatttggaagtctccattcttattaaaattaagtgcttatgctatttaatataataatacttgttacacctttaggaaaacatagttgttcaccatgctttatataccatgtgtgaacttttctatatttttttcctttcagagtgtatygttctttttgtttgtaaagcagcatacttgatgctgcaaccagtgactttttgccatgcattcttaatacttcttggaatatttggtttaggaagtggggtaattagtacataaacactgtgtagcagaactaccctaattagtgccttttggcctggcttcaatgataaacaaagtaagatgtgtgtcagcattcatcctaacactttataaaaattgttatagccctatggggcagcatacacaagataagttaaataatgtagtagttgagaccatgagaaggagttttgtctgtctatttaatagtctttgcatgataaattagcttcctagctttgaaggcttcattagtcttaattatccagaaagcataaacttagccatcaaagtgtatccctaataacgttttacatctttagtgaaatgttgcctctttaatctgtacctaaaccaatttcactatcttyctataatctataggcgaaaaagagcattagcttagaccatcaaaatgaaatgattcaggaactgggttcagaggcaaaacatttctcacccattttatggggcctttaggaaattttctttcatttagttcactgttacttaagtctgttatttcagaagaccactacttcctatttttgaagtataaatactttaaagattttcccattaagatgttgctttgttggtttacaatactgggactactatataggaacagatcattttttctagagacaaggaacagaactttctgctagacagctcatttcttagagacactctaagcttaaaatttgggactcattatgaagtctaggtacagtttctgaagaatctcatctgtattaagaactggttgttcaaaacctctttgtaattaattttcttacattaaatcacaaggccgaaaatggaaagtaaatatgtaaaaatgtagaaaacttaaataggttaataattgtcaaagatattgaaatggtagtcaaagccctccccaaaaactaaacacaaacacttgaataaacagacacactttcctaagccaaatagattttataggacattgttaccagattttcaggggatgtaactcctgtctcatatggatgctttaaaaataaaaaaaagccaggatactatctggctaattttgcaaggcttgtacaaccctaattccaaaagatagcacaagaacagaaaagtataggtccaccacacttatcattacaagtgtgggaattytaaatcaaatttagtgaataagtccaatggtttttttttttttttttttttttttttgagtcggattctcaccctgtcacccaggctggagtgcaatggtgcaatctctgctcactgcaacctytgcctcccaggttcaaatgattcttctgcctcagcctcccgcgtagctgggcttacaggcgcccaccaccacgcccagctaatttttgtatttttagtagagacagggtttcaccatgttggccaggctggtctcaaactcctgacctcatgatccgcctgtctcagcctcccaaagtgctgggattataggcctgtgccactgcacccagctggtaattttttaatatagtattttatctaaggaagttaaggatggtttaacatttaaaaaatcaaagaaattcactatattaatggtgaaaatatgtaataggcaaaaaaattatataattgtctaaaagtatgctttgaaaagcatttgataaactttaactatataattaaaagtttagaaaattaggaatagaaggaaactttacaaactagttatatacaaaagcctacaacaaatatcaataccaaagctttaatcaaactttatacaaagcaagacaaatayatattcttgatatagatctgactagtccaataagaaaaaaaaagtgaaataaaggtggacagagaaatggtggagcagaaaagagaaactaaaatagataaaatagtccttacttggaagttatacattgtctatgtgggcaaattattagaactagaagaagcaagctatatactgtcaatagtttcaagctatatactttcaagcaagctatatactttgagtatactttcagtagttttgtttttccagatttagcagtgactacacttcaaaattcacagcaattacaaaaagtataatgcatttaaacattaacctaacaaaaaattataatagctttatggaacaaattacagaactttactaaaggacgtaaatgaaaacttggttaaatgaagagctataacatgtctattggtggggcacataacarcataaagataccaattctccccaaatccaattccaattaaaattataataagacttttggggagcctcagttaactgactctgatgtagaaaaagtttcttagatagctaagtctattttgaaatgtatcaggaagagggatgatttttttcaaccacattttaatccatatttgtaaaagtaatatggaactggcatagaaacagatgattacactaatgaaacagaagagacaggtcaaaaacagaaccatggtggggaaaaggaatgttgcttagtaggttcttgaagactggtttacaaaattttaaaaataaagttgggcccctacttcacatcacataccatgtgaactccacagagaacaaggacttaaaagtgacaggtataaccacagagctaatagaagaaaatgtaagagaatatttttctgatctttttttaaaaaaaaatatatatatatatattattttgagacacagtcttgctttgtcatccaggttggagtgcagtggcacgatcacggctcactgcaccctcaacctcctgggcccaagcaatcctcccacctcatccccctcaggtagctgggacaacagctgcatgccaccatgcttggctgatttttgtrgagatggggtttcaccattttgcccaggctggtcttgaactcctggggtcaggcaagccatcatgcccagcctattttctaatcttgatatgaggaagaacttcttaaaccctactgcaaaagcacaaactatcagggatacatttttttttgctttacattgtcaaaactaaagatttttgttcaatgattaaagagtaaaaaaattaacagaatagtgacagattggaagaagatatctgcagtgtcataagcagacgagataaatatgtagaccataagaaaaatgctttcaaatcaagaagaaaccaatatatacaaaagcaaaagttgttactagacaattcatggaagggactccttactgtctaagtgtataaagagagatgttcaaccttatgaggaattagagaaatgctaattgaaacaacataccacttcccatctatttgggaagaagtttttgaaaaatcagttggtaaatcaaaatataggtgaggatttggggtaatgaggacattcatgcactgctggttgaaatgcaggctgacacagctggtctgaagagcaatgtcacagtcctttgtaaaagtaaatatgtttataacttgtcacccagaagtgccatttcgtgtacatattctattgaaacacatttcagcttgataatgttgtgtatcccaggatgtttactgtggaagtgtttctggtagtgtggggttgaggacaacttaagtgtccatcactatgagaatggtcaagtaaaatgcaacggatgcatcctgtggaacgttctgtaacagagcaataaaataaatgttcaggcaatgccctccagccagagactcctgggaacatacacctggagtggaacaagttgggtttattcctccttgtatggaggggtaatgcacaccttgcagaactgggrgtgtcttagcaagaggatgttaggagggaattataagagctgagcttgtatgagatgatatgggggagagcttaagaaagtgggcattgtactggattgcttactttcaggaggcagagacaacgccatgattgrttatcttaattaaatcatctgtaaggagggaagaattgagtgaagctaatggtgtarttggtraagaagyagtcactcttactagctggaactgggaatatatgtttattttgtggcttggagagtgttcatattttgtccatacctgaatatgcagcggtcttgtttttgtcttgatctgttactgtcacagagtggcctcgtctaatgttgctgttctgtgaaattgttcatgttcaacagaataccaagtgagtctcagaccagctcatgataacataaaggccatgctagtaatacaataccagagcagctctcaaatatcccttctgtttttcagtactacaacaatacacaagatcttaaaaatgtagtagtgattattaaaaagggcttacagcaagwcctataacataatattatttatataaattacagacataataaataaaacagtagtatgtattattcaaggatgaatatatgtatacaagaccctataccaaatacaagggttttcatctctagtgtggtcggasggaaggggccagtagccaatattgggggtgaaaggaaatattaaataagagaagagccttgtatggaccaatgtgatagtgtgctatgtagattgaaaactatgataattcattttcagcagctaaagtcttaaaacaagtctacacttctgcagaaaagtggtaagggaaagagtgggagaggacctgtagcccagcatcttatctatatttactactcttgccttgtgggaggtgggggaagggggaggaggaggaataccttctttaagcttttcctaaatgtcttacatttcccccaaaaggaatgagctgttgtaatgatagcatgttgatgctggttaaaataaaacatgcccaccagtgtaaaatgatagcattaatatttcttgtgggaacttgatttagctttaaatgtacccaaaagctttcgaagtacaaaagccctcatattagctccagagaaaccaagtttattatatcttaaggaaaagatttcttcatgaaccttaaatttagtgtctgtgtaatcatgttattttgtcatttactttttaactgtagaaaagagcttgatttgatttttttttttttttttttgagacggagtcttactctgtcaccaggctggagtgcagtggcacgrtctcggctcactgcagcctccgcctcccaggttcaagcaattctcctgcctcagcctcccgagtagctgggactacaggcgtgcaccaccatgcacagctaatttttgtatttttagtagagacggggtttcaccgtgttggctgggatggtctcaatctcttgaccttgtgatccacccaaagtgctctgatttgggagaccttggcctcccaaagtgctgggattacaggcgtgagccaccgtgctggccagaccttgatttttttaggagtaaagagacttcctacctccactctagtcctcttatcagtgatttctttttaaaaaagtaaatgtccttgtgtcttcacttcatcttccttaataagtatttagaggcagtattttcgatattaacagcatagattctttaatttaggaaagaagaaaacttaaytttgatttttctaactttctgctcagctcttccaacgtgaatatgtaggtctctgtctcccggggtcctcattatgctttactttgccctttccagtgccctttccagtgtttcaaccacattgagccgcatggccgcataggggactatgaagatcagctcatgcatttgtgaagcactgcctccttgtgtcttactgttctctttcttaatkggctgtgttctggaatggtgtcttggtgttatgttttaaaacattattttgcgtaatttatgtcattttatagtcagccaggagaaagtacactacattagttttatgtcatcaaattgtttaatcatctctataatttacatgaatcttcattaataatacaggaggaaatacaagactctttctataaagctttgaaaatgctgagtttttttgaaatagatttagagggtacaaatgcacttgttacatggctatactctagtggtaaagtctgggcttttagtgtaaccatcactggaatactgtaccttgaacccattaggtaatttctcatcccttacccgtctccttctctgccatctttccaagtctctgatgtctgttattccactctgtagccgacattaatttttaaggatagttactctttatatactacttctgtaaatccataacagatccccaggttttttccttgtctattaggaactgtttaaaaaattttgtttaagaaacaaatgtatctccattcatattcttgaacaacacytctaattaatgaattactcagaaattttgctgatgaaaacatgttatgaaatctgtatattgtataagacctttgcttccctgagagaaatcactcccattgtttcttcaggaacttattctttcagacttgcaggtttgaactcttgaaaatttctatgtgttttctctctgaatatgtagaaattccatgtttgttctatgtagataggattaagatggaactgtgttctaaaaattgggytgttttttataaattgtccaaatttacattttcctaaaaaatatattaagaatgttagcttgcaacctcttttaaatccataatatgctgacatattatctttgcaataaagaatattggaaaaacaatactgctgcaagtgtacaaatggtatttaattccacatgctcctgtgcttccatcagtccctgcacataggcttctctactcctgattctaaagctcatttacactaaaaaggttattgaaaggtacttgatctgtttttgagcttaagaaatagagctaatggacagtgtcacaattgtacatgcacatgcagcccattttccattcctagatatatcatttacgttttctacatcacctacactcttgggtccagggttatagagcatagtaagaagccgaaaagaatgaataccttttgaagaactattttcaagctagtgtacctaattagatgaggaccataggcagtttttccttcagatgccagcaatctagaaggaggagtaggatgggagcagacaggttgcctccccacctggataactgagtgtggttttctgcagttcttaaaattgtcagctcacacatactacttacttacttacttacttacttacttacttacttatatatgtctgtaagtacgtgacagagtctcactgtggcacccaggctggagtgcagtatnatgatcttggcttactgtaacctctgcctcctgggtccaagtgattcttgattctcatgcctcagtctcccaggtagctggcaatacacgtgtgcacagtcacacctggctaatttatttcattttattttatttgtattttagtagagatagagtttcaccatgttgcccaggctggtctggaactcttgagctcaggcagtcngcccacctcagcctcccaaactgctgggattacaggcgtgagccactgcccccaaccaactcacacatactttaagtgggactttatttaatatcttcatatcagcgatagaacttgatgtggttttccatacatgtacacacacataataaatatcatccctttgacaatactataagaattagtgcctttatcattggatattctcttaaaatcattaacagaaaatgtgttctttctagaggaattttatcaaaaaatttataaggtgtttgaacatgtgattacaaaggaaagggaaagctaataaagaacttagtagtataaccatggccaggcacagtgactcctgcctgtaatccccgcactttaggaggctgaggcgggaagatcacttgaggtaaggcattcgagaccagcctggccaacctggtgaaatctcatctttactaaaaatacaaaaattagctgggcatggtggcaagtgcctgtaatcccagctactcggcagagtgaggcacgagaatcgctcgaacccaggaggcagaggtcacagtaagccacgatcatgccactgcactccagcctgggcgacagagtgagactctgtctcagaaaaaacaacaacaacaacaaaacttagtatgtaactatttatttagctatttttcaggcacattttagaacaaaagtgattttttttcaaacctctttaccctctttggtggtaggagacagatttcatattcatagaggtccatatgtggtacatatgttacttaaaacttgtggttgacactgtagtgggaagtaacagtagggtcactactgatatctaaatccctgatgtttctagtaggtataaactagagtgtgatttgtttttgtgaggagggaattatatctctgttaggtaagctaaattcttatttttggcattcatactgtaattctctatcctgattcttgtgtttttgcacattgtagacaaatattaaaaatcccacttgacatgattctaaatcagaaattcctgagaatagagatgtttaaaagatgaactaaagctaccttaaaacatttcagtattttgaaagagaaaaggatattgtatttaattcctcctttataaagaagttttaactaaactttaaaattattttttattatctggtgtaccaggattgtgtgggtaatattctttttrtttttaggtctcattcagtatctctgtttttttgataaaacaagggtcagcaaactttctctgtaaaggtctgggtagtaaatattttaggctatgcaggccacatataatctctgtggaatctcctctctcaccaccctctatactctcttcctcctccccctctttttttttttttttttttttatttgagacggagtctcactctgtcgcccaggctggagtgcagtggcgcgatctcggctcactgcaaactccgcctcccaggttcrcgccattcttctgcctcagcctcccaagtaggtgggactacaggcacccgccaccgcgcctggctaattttttgtatttttagtagagacggggtttcactgtgttagccaggatggtctcgatctcctgacctcatgatccgcccaccttggcctcccaaagtgctgggattacaggtgtgagccactgcgcctggccctcctcctctattttttttttacagccctttaaaaatgtagaagctggccaascacggtgattcacacatggtagttccggcactttgggaggcaaggtggacagattgcttgatcccaggagctcaagaccagcctcggcaacatggcaaaaccctgtttctacaaaaaaatacaaaaattagttggacatggtcacatgcacctgtagtcccagctactcaggaggctgaggtgggtggattgcttgagcccatgggatcaaggctgagattgtgccactgcacttcatcctgggtggcagagagtcagaccctgtctcaaagaaaatagtaataataaataataataaattaataaaaatgtagaaatgattccaagctaaagtgctctatgaaaataggtttggcccactggctgttttggggcctagttctagaycaagttctgccccaaactaattgtgtgctttggggtagtttgtataattggttttatcttctctggctattttatgaagataatctagtagtcacttcatatgtgaagaatttatgaaatacctatatatttgcttttgttttctaattttagatacacactttactacagaaaataatttagtcatgttaagtttgattaatgctaagattagtatcatctgaggtcaagctatatggcatgtgaattcagtgtcagaaagtctgaatttgggtccttgatttgctacttactagactctctggttgcaggtaagctctgaaactctgagtttctacttcctgttcatcaaattgatgaaatgacactaactctgcctacctcttaaaattctttaattattttttaattgaaatgtgaaactaagataccgttataaagcacaaaacattaaatcatcattaggagtcattcttttaaactacatgttttcataactgaatttccccttataaattttattatggagaaaaaattttaatttaaaaaccactaactagtaaggccaataattcttcatagtatagcatctggcaaatagacactcagtggctagttatctaaggtaagtcagtagcttttccaactagaacttatacctaggttttaattatattgttcctttctaactaacccaatggtatcaaatgctctctggaatatagataatgaagctcttaacatagtgcctcccacatagtaggcactcagaaatttgctgactaattctaggacttccatctgcctaggtattagatgtttccatttacctctcagctgtaaatactgcattttttgtgcttaaagtataaaactgttgtctttccttcttagtttgcatttgctccattccctcagtagttctctttatctcctttgtcagtgacagaagaataaaaagaaaaatattccctggggactggataggttctgtccaattgaaagatagttaattcccagtttacttttttcttgacccttcttccctcagttagttatttccaacaaaagccacttgaaaccaaatttcatataataaaagctgtgctttggctagtggtagctcatctgttggggagaaggaagcaaagaaggaagctccctagaaatctaagatggatttttcagttttatttggttttgcgttatacacagtttaaggggggaagaaaacagaaataacttagtacagtactttccaaatctagctgtacatcagaatcaccagataagctttgaaaaaccaaggatttcctggccatgaaccagacttattaaatcagaatcttggagggggtcagagctatcaatctataatttcagaagattcagccaggtttgagaaccagtcagtaccatggtttttagagtaagacagatgtgagtttgaaatctggttctgttacttactacctgtatgaatttcagcaatttatttaaccacccttcaaaaaagtaaaggtaatacaggtagtaaagcttcatttcattgaggtattttgagattaaatgaaataatataacatgtaaatgcttgctacataacaatcactcagtaaatcattgtttattgttttacatgattgtattatcattttctgacagatggtatttccttaggaaaaaagttagactaaatttaaattttaaatagaattctttaaaatagaacgtgaataaaagtttatttcatgacagtctcaaattagttatgctacatgtgcattatcagcattttattaatagaaatatgcaggtatagagtattcactctgtagttttcttacaagacttgacactttttagagtattatgtacatgttgcacataggccaagatgatagtcacattcatttggcaaaaactatttagatttctaatctaacacaataaaagaaaaatggaaaagaaagagtataaaatttttttatgttggctgcttgatttacatgaggcccaacctggtttttcttgtttgttagttttgtttttttgagatagggtctggctctgtcacacaggctgggatgtggtggcatgatctcagctcactgcagcctccacctcccagactcaagccatcctcccaccccagcctcctgaatagctgggactacagacattcaccaccatgcccagcttgcttatttattcattcattcattcattcattcattcattcattcatttatggtagagatggggtcttgccatgttgcccagactggtcttgaactcctgggctcaagtgatcctcccaacttggcttcccaaagtgtggggattataggcgtgagccaccatacctggccccgacctgattttttttttaaactaaagccataactaagtaaagggaagctggtgtatgtaaaaatatgagatatacatgttgattttagcgaacatttaggtttctctgaaaatctgatatcaaataactctacctgaaacaaatgatactggtctgttttgtgttaaaataagtatctatacacactactatgattttggcattctaagtattctgagatcttttaaaaatattttttagacttttatgtttgtacatattttgagaaaataagtctgattgtggttcatgttccactcctcatacttttctaaagtgctgtccgacttaagaagaaaaatcttttgcccaatgttttggaattgttctatgatatttctgccagttatatatataaagtgcattccttttagtaaggtccagcatgatcatttctttttttttttttttttttttttttgagacggagtctcgctctgtcgcccaggctggagtgcagtggcgggatctcggctcactgcaagctccgcctcccgggttcacgccattctcctgcctcagcctcccaagtagctgggactacaggcgcccgccactacgcccggctaattttttgtatttttagtagagacggggtttcaccgttttagccgggatggtctcgatctcctgacctcgtgatccgcccgcctaggcctcccaaagtgctgggattacaggcgtgagccaccgcgcccggccccagcatgatcatttctaaagtgaaaataaacagtgaaaagccattagtaasttgccartaatgttgattctttggttagcgtgataaatcaaatttcccagaggcagtcacataaattatagcattatgttgctaagatgaatttggccaaattatgcttcatttgtagcagagtcaatcttaaaactcaggtctcgtaactgcctgccaagactatccctttattttgtaggtgaaacctaggcaaagccaatttggtgctcactcaccccttcccagaaatgaagttggttgatggctcttttgaaagtattaagttcaggtatctgaaaaattggaggaatattagtaatagttaacctttagctactgagttggtgctgtacctgtttatctcgtttaatttttattctatctcatatgaggtagatgttgttatgcccattttactgtkttttattatctatctagtattcaaagrttcataacatcaaaaaagtcataataactgttacaatagctactgtagatccttatttttgacactaccctttactctgttttacatatcattttatttgtcatgcaactctgtgagagtctaagtatgaatgtctacattttaaatatgtaccaccttacactaaataggttgaagtaattttgcccaaactcacacagctaatagctgaaataagtgaagttttaactcaggtctgatttcaaatttcatttctttcctgctactttatcttacttcacatatataattttacctcttaccaaaataagactagtgttacctaggaagtggggtaggcatgatagatatgtttttttcttatacatgaaggagttcttatgattctcacgctctgattttctaaactaaaaatatgttcctgttccattgttatcaaaatgtaaaaatcagttaagtaccacaatatatgggggctttaaaaagttacttagaaaatatgcattgtacagtgagccgagatcgcgccactgcactccagcctgagcaacagagcgagactccgtctaaaaaaaaaaaagaaagaaagaaaatatgcattgtattgatgtttctaattattagaaatctcccactatgtttcaaggggacttttgttaggtcaagttggaacatggatatttacggactatatcatggtgtcacataggtaattatttgttttctttgaagctaaacgaaattacaacagtatatcattcaaagtgctaagctttggatcataagtagttaatctgattaaacagcttagtcatgcattcatgataaggatataatgacaaaaattctataggttttaataataatatcttagtctaggaattctggcataagaattattttggaaatagatcatttatgtgtttctgttttcgtttacaactgaaaatagtgtagtaatattgattcatctaatatgaatattatgactacagaataattagaatcccagcaatggaaagtttgaataaaaattattaagtgtaaaagttttacttcttaagatagtgccttttcagaatgaggcaatttgacatcattgtttttgcctaagacagcttttagagtttagtctagaagttgttcaaatagaagttggtgacaygttgaagctgaatgccttcttttcttaaaaggtaggaaatgctcttctcatttgtaagttttagttttctacagtctaataatcttataaaaggtacatcgttttaaatttgaaatgtagttggaatgtcttattgaatgtcttcagtgatgacttctggttttctaaggtttcatttttgaaaaatatgacttttagggtcataaaaggaaaaaataaaaactgtatatacagttttgtgataaaagaactgaatatatatgaggttggtggtgtgcagtgtaaagctggcgggtggggagggttgtttctaagaagttaccttaattaaaaagagaataccctattcattggccattcaaagtgggaatatagatatgtggggtggagagggggacagctttgtacctgcaaagctctaatgaatgccactacatggtggagcttgagaactcactgagctacccaaaagactagtttgtcattgcagtggctcctagacattgctttaygaggaaagaaaagaggaaagaggatgagcctagatacaaagggaaaggcttgggaaaaagaaactacatccatgatttttatagtgcctcttttgttactattgttttgtaaataarataggtagcaaatccagtcattcaaaattataaataaccactaaagggagaagtcaatgctcactttagcttggtttctgctgttgttctttatggtgtgcatttgtgtttacggtactctccgaaatagctcttcacagctactttatgtataagctctttgtcacatctaatggaacttttttgaagttgtttgcatcaacttgaatctttagttgttccctaagttcattctggaatggctgaaaccacttataaagaagaaagtattaagggcattgagttacccaacgtattarttgttatcgctgaattctacttttaaccaggaatatactttggtcttcgttcaaaagcacatcatttttttgtaattaaaatatatatggagacaatatagtctttaatttagttattaagaatattggtattctgtttgaaacttggaaattctgacatcaaaattatatttattactgattagacataattgtatcatttggttatttttatatctaagctaaagtgatcctctctaatcctttatactctaggttttttttgtaaggatataatgccaaaaattttgaaaaaaagaaaacaggcactgtggctcacacctgtaatccctgcactttgggaggctgaggtgggagratctcttgaaccaaggagttsaagaccagcctgggcaacatggcaaaaccccatctgtccaaaaaatacaaaaattagctgggtatagtggcacatgcttgtagtcccagctactctgcaggctgaggcaggaggatcacttgagcactggggaggttgaggctgcagtgagccatgatcataccactgtactttagcctaggtgacagagtgaggccctatctcaaaaaaaaaaaaaagactgaactttagtcttttaatgttatatttctggatttaaataaaaacagaagaaagataatgaagtgtgctctttcattcttaatctttcatttttattcttatcattaaacatatggaacacatcttaggtagaccatatatatttttataattctatattttgttaaagatttatatattttagtattgcctccttaatagatgcattcctacaaagtttgttctgtaagaacttcctatttattgtagtgattttttcccagtgattttcattataatattaaaactataagccatttttctacttttgacatctaaatgtcataaaaccttatttgcttgtaaatatctatattcttaaaagtagtatatcttccataaaatattaacagtaacttgaaatattaataacatttctgcagtgtaccctaaagaacaaccagaatctttgactagaaggaggctcattctcatttttcttcacaaactgttcgtcgatcatagagcaatcacataagcttagtgattagactacacttgttttttgctagtgtggaactacattattgcttcaaatttatttccaagttagcaatatttcccccgtagcttttttctttccttgagatgtactgatcttttccaaaagtcttgattgacatcacttctgttttaaaatgctgatcataaaagatgattattgttttaatgtttgttttatctattataaataggattaatcataaaaggatagaatcatgaaggcatcatttggtaggtagacgtcttaatagtattggtttattgggcccgagaattctataaatatgctagtcattgtagggtaatgttgaagcagttgtcaaagtcattaaacttacaagtttatcaagtgaatttcttttgattatttctaaatgcattttcttcttagtacccaaatttctcacaattgaaaagcaactgggtgttgggacagaaatatagtatttggacattagagggtctggccttgacatttgatgctactacttaactggctcttatctaaaactggtatcctaaaagccttaatttcttagtgccagtgctgtctgtctatctcgcaggttcattataagtatatgaggtaatatgtgtgcaacaggaaagaactggcccaaaatgttagtgttgctgggattaagaaaccctgctctgcggaattctctctttgatatttccctgccttttataggaactctttttcacctaagattttccatttatgttttgttcattctttatcatctgctcagagttgtaagtttaccacaagtggagacctgggatgtacacccagggaccagagtcaccccataactcattttctcataaattgtttcctagagaagcctcctttttcagctagagccctttggatgccttttttcttttcttttttttaatttgactyttccaacktagttgaaacacagaatctccgttaaccctcaatgtacactggtcttaatcagatcaagtttttaaccacaaggtaaaatgtttcactttgctcatgaatcttaagaatgggccatccagagtggctgtacccagaacaacaggtttactgttgtttgtttcactccagttccctgactttgactgctctctttgagtattgccttagctttcatttctaatctgtgaaaagatgccttccatttgcctacagccacttttgcatagattaattgtactagtttagtctgagttaattttaatttaatccatttgctaaggtcatttgctttttttttttttttttttttttttggagacagggtcttgctgtcacccaggctggagtgcagtggcaagatcatggctcactgcagcccgggttcaggtgatcatcccacctcagcttcccaagtagctggaaccacaggcgtgcaccacacctggctaatttattttttttaagagacagggtctccctrtgttgcccaggctggtcttgaacttctggaatcaattgatcctcccactgcagcctcccaaagtgctgggattacaggtgtgagacaccacgcccagcttcatttgaatattggaaatacactgttcctaagtaatggtcctgggaactttacaacartactgtgactattctcttttcaaaaatgtgtatcggcttaaatatttaagagatgggaaagagaagttcctgatgacattgtatgcaccacggtagcaggtgatgtggtgactgtatctctgtttaggtaataacacttttggcctcatactagcgtttgaattagttccggaaacatatgtgtcacattttgtttcatcagctttccatctcagcattaatgatcaaggcaaaaaataaagcagtgtgctttttgtatctaacctcatctgatttcatggttgtggtgagattgcacagagatgaatagaggactttgaagtatcacttttctagttagattttcatctttcctgtgcatatttaatcgagccagaagaatgagaaaggcctgaagggtacctctatcttctcttcctacttcagtgaaaggacttcctctaatagattaatggacagaggttaataataaaggtattcacaggaatgaaagaagaattgactaagacagaaggagattaggtgctactatggggtaggtttatcagaattatgacttccatagtgtactgtatattgaggcatttcattattcatattttttaacaaaacactctatttggttttgtgagtattgtgaagaatgttattaagccagtttgtaggtaaacactgcctcaggtttcatcaaacttggcacttaaagttaggattcaactctttcactgcagtattacagaggggctccatctatttgttacctgaaaattgcctggaacagtgtagagattttaaaaactacttccaagcaaaacttgcagtgatgtcactcattacccattgctctaagaaatgccctcatcttgctgtctaggaagcacttttcatggactgctaacttctgttagagctgtatcaattacaagcagtttggcagggtaattctgatatgtaaagctggggaggaacattgtttggttaattaattcatttggttaattaaaaagtgaaattatactttgattcatataagtgataccatgtagaagaaatataaatctgtgtttagatattactgtcaaatattaccaattctgaaatataaggatattcctattccttctcatattcctatgagaaggaatgtcatagctggtttaggtaaagaaattgagcatatgcagctaaacccactctggactcttttttttttttggcaactacctagacgcacagtggttccatagtgcctgctctaccatgctataagcttagggarggctttgctccagaaaaggaacctgtaattagctcatgtgagtgagtagatagccacatctaataaaaggttaagtattaggaaattcttgtgactatacatacaaggtacattctccagtaataaaatttgtattttgatatttttatcttcgtatttctttctcttctgtattctcattctctcatctatccatattctctctccctgtcttcatctttctctctctcttctatcctacccatcacctattgtatttagataaggaaaacagggttattttgtggcctccctataactttaacaacacccttctccattttttgttttccatgagtggttgtcattttcctactaatttgtagttctttatataatctgactactaatcctttgtcagttatatgttcacacatatcctctcccagtcctatttcttatctttatactttgtttatgttccatgtggccttttattgtaggagygtttaacatcatcagatttatcagtctgtttccttatgatttgtgggttttatgtcttcctaaagaaatccttcagtacacacaaaatcatatagtcttttcttcttttttttttttcttgagtcagagtctcagtctgttgcccaagctggagtgcagtggtgtgatcttagctcactgcaacctccgcctcctggactcaagcgattctcgtgcctcagcttcctgagtagctgggactacaggtacccaccaccacacccagctaatttttgtatttttggtagagacagggtttcaccatgttggccaggctggtgtctaactcctgagcttaagcaatctacctgccttggcctcccaaagtgctgggattacaggtgtgagccaccaccgctgctaaaatcgtattttattttaagtactttaaagtcttaccttttatatttaggtccttatctgaagttttcgacctgacattcagtgtacagtgaacacactcatacatctcctcatgcagatatgcaccrtctaaagatggaggctactagctacatttaactgtttaattttcaactgattataattaaatagaatttaaaattcagttccttagtttcacagtagccatattttaagtgctccatagccacggtagtgaatgactactctatcgaataatgcaggtaaagaacatctccttcactgaagtaagcagtcttttgtggtcccctaggacctttaccaggactctcctcttagcgggctttgagtctagcttctctccccctgtggcccagaagtgtattgaaaagtcagctgccttcctattcctcaatagcttcttcaaggaatttttgcccacaggcagtatatttttcttcccagatccaaatctagcttttattctacctttgatttggtctatcaagtaaataaactggcttatttaaaaatatgtcatattcagtgttaactttaaacaaattataaaagaaagtttgttgtatgtatctaaggtactcatgtgaataaatgagaaataagtaggcattaacttgttatctcttgtttatttatttgtatatgttttgcttgctcgatcatcaagtggctttaattcttctgagaatattagtaaactccttgtgtatctgagagttcttagaaacctgaagcttctagtacaactttgctgaaacatgatttgtcaggagaattataaacattgcacattaacccagtgagaacaacccaactttaagaattaaagctaaattgcctgatagtgatttcagtaaggctgttgtttatgcacgtacacattagcatccatagtgctaccaactttaaaaaatgctccagatttgagtacactcagaaagtttctaagatattgaaaacagtattcttaaagttcctctgttttctgaacattccctagtgtacaagattttatatatttatccaaatgaaacgttgaccttcaatgtaatattgaatataagattgcagataaactattattacaggttattcctaataaacttttagttgctgaatgttaacaataacaatctttacttttaaagcactatagacaaaagtktaatttttatttagcaccaataaataaatgatttaacattttaaagtatttaataagactgaaacccacagcaaagctgttctctggtgtacaattactggagaagttcactaggtcagagtaaaagcgaagaagatgtattttaacatctaatatgcaatgtactttttgtttcttaatcaaaatgtgaaaaagaacataaaatacagaattttattttcattacaacttaaaccagagtttaacatctataaaatatgcttcaaaaattagaagtttaagaatgtcatcacttatataagacaaaaataacacatgtatagcccatctaaatcattcttgaaaacagaccacacacagccttacatttttaagacaagagggctttaaaatgtaaaaggggagaaaatgagacttaatgacatattagaactaacatcccctgagtattgattgaaaggaaaggtattgtgtaataaggaacatgttcttccaattcttccatcagtctcagtttactttccactgcgtcctagggtgagaaagtaattaattctctgtacttattgaattataagtgtttatgaagcaacaacttgaaatgacttcaatccctacttaccggccataggaagcagtagtattggcagggagaaagcaagtttggacataaggactagacttcagggctgtccaatcttttggtttccctgggccatgctggaagaagaatggtcttgggccacacataaaaaacaaaataactctgacgatagctgatgagctttttaaaaaattgcaaaaatctcagtgttttaagaaagcttgctaatttgttttgggcccaggttcaaagccatgttgggcccaattcaaagccatcctgagccacatgttggatgaccttggactagagaaaaaaactcactgaagcctccatattttttatagtatcttttctgtgggatacttattaaattaaggttgagccatttttaaaaaacgtattttctctgtgaggaaaagcaaatctgtcttaatgagttacatgaaatkatwtgaagttatatgaaatctaagggatttgaaaatttcaaaaagatttaaaggaaatacatcagaattttggttgcatttcagttaacagatttatttatctagatttttgaataaagtgtttttgaatacttaattcagaattgatgatctgcccatgaccttaataaaatttcctggtttcatggcaatggcaaaaacagtttctaggtacttgggtgagacacatactagcaggtgtagaagtagtaataaaaataatgatttattatcagaacaacacttcttacacctattcaccaattttctttcaggatatccccataatattattattcctaaatagcaaataaagaaaataagccaaatgcaagtcaagtcactttatatcttcctcatccttccattcatttcctcattcgttcattcattaccctccttgtttcttaaacatcaaatggtgccttgaggcattaaacaagttgataaaataaaacaaaagcatgaatacttgacatatttctctcatcactaagacaacatgccagttagtcaattaaaaaacaaaaataaatgtatcaaamcacgtggtattatgtggagaagacttgatcccaaatgttcccttttctcgaagttatttgctgttgtccatactatccacgctatccaagtttacctggataaatagaatgcaatcagaattatgttgaagctaatttattgataaaatatataccaaaatgtattacaaacataaaacttcatgaggtcagtattattaatttcaaattttgggtttttttctaacattaaattattyaaaacttttatttaaaaatgccacattcaggtaaaaggtagtagatgggaaaatttcagcagtagatatttcagaatacaatggttgtagaaaaagggattatgagtttatttatgtgcagatatacagttatgtttttaaaatctagattataaaactgatataaaattcgagtttaacaacatatcttattaagataagaatcttaatgcactatgaaaagaaaaacaaaacaaagcccagataacaggtttcttttggtagtgatctacaaggtattagggatatgatttccctcttgttctgctgtctctctgtccctcagtgattacaggtagagcatcacttcaataactcttccagtcagtattggtggtgwcagccagtctgacctgaaaagaaaccaataccccttcccaacctggaaatgctggtaatttatttcaccatccccagcttccctatatttttccccatcctaccagcaaactttgtttatataaaatgcagccaaatacaattaagccaaatacaagtcaaatcttcctcatcmttccattcatttcctcattctttcatttgttaccatccttgtttttttttttttattgagacggagtctctgtcacccaggctggagtgcagtggtgcattctcagctcactgcaagctccgcctcccaggttcacgccattctcctgcctcagcctccctagtagctgggactacaggcgcccaccaccatgcccagctaatttttttttttttttttttttttttagtagggatggagtttcaccatgtgagccaggatggtcttgatatcctgacctcgtgatccgcccaccttggcctcccaaagtgctgggattacaggtgtgagccaccgcgcccggccacatccttgtttcttaaacatcaaatggtgacttgaggagttaaacaagttaataaaacaaaagcattaatacttgacatatttctcttatcactaagwcatcatgccagttagtcaaaaaacaaaaataaattcagagtacctctttcacatgttaaactcattggattatttaaatactaagtgatttaacatagtttttctgagcatttcacacacaaaacattttttttttccacatgagaccattacttctgaatwttaaggaatttcatatggtgcatgtttgaggaatttcgtatggtgcctgctgtaataggatcttggcttatttgcatttgttgatcagatgsaactaggtatagagattggatgagggaagagtaaagtaaaattacagaaaacttttaaggcttcccaagtttgttaccgtttgatagtattagaaacaatgtcactgtaatttccattttcaggcctatgtatagtgttaataagattcttgccatgagtctctttactatttatagattagtaggagccatttttatggcaatccaaagctctctgttaaacttaaaacactgtataaaatgagttgaaaagattattaataatcttacacagaatgatgtccttcagttcaaagatgttaccagtattaacagtggcacttgttttaaaagartaaatatcctactcttgtttttcattagaactctaagcaagactacaaacaaagttttcattgcaataataaatctttttgaaagggttttctgaaaccactggatttacatactttacatttgccctacctaagtttacggtaaggagccaaattcatttagcataaatattacaacccatgaatccagacatacagcaatttatgggggacattagtcttcttattatagaaaacgtttgtttaaataatgtgaataactaccaatgtttattataattttatattttttccttattcatctctaataacaatttccgttacttcttaaatcatccccgggttaagagaacataggcatttgtaagtagcaagtattacaaaaacaaataagattttttacaaaaagagaaacatcaaatttcctgttaggctcactgaccatgctctctagtgtcactctagttcctctttataagcatacgtacttaggctgcgcacagtggctcacgcctgtaatccgagcactttgggaggccgagatgggcaaatcatgaggtcaggagttcgagaccagcctggccaacgtagtgaaaccccgtctctactaaaaatacaaaaaattagccgggcacagtggcggcgcctgtaatcccagctacttgggaggctgaggcaggaaaatggcttaaacccgggaggcggaggttgcagtgagcttagatcacgccattgcactccagcctgggtgacggagtaagactccatctcaaaaaataaataaataaataaataaataaataagcatacatactttaccttcatggatgttttaaggggaaggcaggtgttaagaacttataaaaaatacaaagtgttaactttagaaattaagagtttttgaatgctgaacaacacattccatttaaataacgttaatagaaacagattttgaagcctctaacatcatggtgcattaagagcataagagaaacgagccgggcgtgatggcttacgcttgyaatcccagcactttgggaggctgaggtgggcagatcatgaggtcaggagttcaagaccagcctggcgaacacagtgaaatcccgtatctgctaaaattacaaaaattagctgggcatggtggtgggtgcctgtaatcccagctactcagaaggctgaggcaggagaatcgcttgagcccgggaggtgcaggttgcagtgagccaagattgtgccactgcactccagcctaaacgacagagctacactccgtctcaaaaaaaaaaaaagagcaaccagctggagtcaccgagcatgtagctgcccagagcctcctccctacatcatgtgtgtagcttgttccatattgtgaagggtgtgtatatgtatatgtgcacacactggcacacaaattcgtatgcatttgtcttactaaagtgtttttgtctcccctacggtctttaactgcctggttgaaccccttctgagaccactactctgtttgaagggatcttgccagcctctccctagaattgcatctctgattctgtttcttctcagatacacattcttaattgaagctaggacttaacacagtcctaaaaattaccattaattaggaccattaaaagccaaaacatcttcctgccttaggattgggtcctttaattgaagctaggacttaaccctaaaagttcccaatgattaggaccattaaaatccaaaatatcttcctgccctagcctttccttgacctgaaattacctttgctaaaattgacctgcaatgtatttcttaatatattttctgttactcgttatataatggagtaagattgtggtgggaagaaacagactcaggaatgtgttgacatttgcaaggtttagaatctagatgaggcatgaacttgaattctggagcttcttgtggtagcctgatttaacatagttaaaggccaacataaaattaatactggcagacttgaggcacaatagtactggtgatgctgtgagtgagtggtagagaaggagtggtctcttgagcccattgatgaagsctggcggtctggggaagtgaatctaagtccaagtgtacagaattcatacttaacctctttggaaaagggcagactcctccacatcagagctactccttgacctctgtgagttcctgatattctgggtcagtaaatagatgatatagatacagatatagacatagtcataggcatagacatagagcctggttaggagtatgaagtagatccaaatcctgatttttaaatataaaataatgttaattacattatgcaaaatgatttttatgcagtatacatttggaaaatttaatgacccacagaaattgattttcagaatcattgataacatcattgttttggatttatgaaaggaacatagcagtaatgaaagaaactaaattatggaatcttttcaatgatatactcagaggtttttttttttttttttttttttttttgagatggagccttgctctgtcgcccaggctggagtgtaatggcacgatctcggctaactgcaacctctgtctcccgggttcaagcgattctcccacctcagcctcctgagtagctgggactacaggcacgtgccaccacacctggctaatttttgtatttttagtagagacggggtttcgccatgttggccaggctggtctccarctcctgacctcgtggtctgcccgcctcaggctcccaaagtgctgggattacaggcatgagccaccacacccggccgatatactcagagttctaatgttttatctgttatcttttcatataaatccagagctatatacagattagttaatcccatggcagaatgtataaaaatatctgctttcatgtagtttttattttatgtggaatatttacctaaaccaggatttagttttcatctttactaaatttttcagatatacatatgtatgtatgtatttacttaattataaaacatgttctaaggaagtaaaagatatctttggatgcctttgcagaacgtagaactacttttgtttaattctgtgcccttacatattttttgtttttcttaattcataatgtggaacaaggccttctttttttctctgttccaaattttgaggtaagaggtatggcaattcacatattatgattgttttagagatgaacttaaattcacagggctttaataaacatcagccctgaataaactgaatatgtaaaacactagcactgattactctattccaaaaggaaagtccacattttctatgttaatacattttctactgcaattatttcatatggtactcagaatcatgcgggaagttgcatttcttttctctactcttcctgtatgtcatcttgggagcccaagcgaattttatattcaaaagagcaatttatgctacttattaatacatgttttttaacaatctttagggataataagttgacatagctgagagtagctgagggactgatggcatacgcaatctgttaaaacatttctttgaagagaaagcttgtgcttgaccatggttgctcggtggagagtgctcctatgcataccacaagcttggccttcagtttggaatagctcttttcattgtttgagtttggttgcactgagaaggcaagcttgttactttactgtaaaaaataaagtgcttgtccaagcttgttgcatgttggcagttgagaggctgctcttttgctggctggaacgtggacaactttttaacctctccaaggcaacgtagctgtgacaagatgtcagttaccttcaaaaagtaaataaatcacagcctttgagtttcagcataataataaagatccaatgtcctcacatgagtttctcattccacaattttgaatcatatttttttgtggcaaatgctctaccttcaaagtaaagcgttttaaaaatacagtttagagagccaggttccctgagaggaagattattaactcacaaggaaagaacagtgaattatctttaataaaataagctaagaaacaaaaacattaaagttttgtttgaaatttaaccttccttgcctatgttctttaccaaatcaggaaatactagtgtagctgtagtgtgaacatccttgtatttaagagagtgaatttaaatgtttcaaatactttgtaagacaattaaacatttgctatatgtaagttcaccttagacttacaaatttccaggaattattctaaattcattctatagaacactacctgacaagttggaaaatatggacgtaagagtctttatggcttaactgtgttaactggctgatgtttaacaacaatctacgtttcccaagtttcactccaaacccgtaagttgtactgtttcagaacatcgacaaaaacaccaatcactagatgaatagagatatttgattgaaaacaaactgttctacaaatatattaagcttgaatttgctaatctttatcaagtaattcccagtgctcaaatgtgttttgtagagtgacatactttgctgagcaaaaatggggtgtttgagttttagtttcaggtgttcttttaaccttcaaaaatagtggccgagttaatcttgggtaacaagttatcttaaaaaaatgaagaagaggccaggcacggtggctcatgcctataatcacagcactctgggaggccaaggcgggcagattgcttgaatccaggagttcaataccagcctgggcaacatagtgaaactttgtctttactaaaaatacaaaaaaatttagctgggcatggtggcatatgcctgtaatcccagctactcgagagactgaggtgggaagaccatctgagctggtgaggtcgaggctgcagtgggctgagatgatgccgctgcactccagcctgggcaaccagagtgagaccctgtctcaaaaaaaaaagtgaataagaatatacaaaacaataataataacagaaacagtgcattagatgaaagttcaaagtcttttgtggctgattgaaaaatgtaataggacygctaatgccttttatggaaagaagcaatataaactagtaatttaatgctttactccatttctacatagcatcttttaaaatttatttttagtatatcttgtcttagtggtttatgctggkgttaatattctggagataatattacatcagaattctatatcacacattttgtttttcactgtttaagaaaggtaagtaaataatacttcagaacagtgatctctgaactttttcattgcatatacctgagtactttttagcatatactactaatatgtgcatatttatttattttattatatgcaggttttatgcaatgtatataaacatataaaacaggaatttaaaaggatgtgattttatgtcttaaaaatctattctaataattttatggccagcagatgacttttttctttcctcttattttgtaacttttaattttgacatatgatacgtacacataaagttgaaaaaaatagtacrtagtaccccataagccatagcccagcacccccaatggtgatatcttatatctgtagaacaatatcaaaaccaggaaattgtcattagtacaatattattaattagactacatagcttattcagttcttatcagtttttacctgcactctcatgtttttctgtgtgtgcaatgcaatttgacccctattacagattcatataatcactactacaatcaaggtagagcattatatatttgatcaccacaaggaaactctcttgtgtactcctttatagttggattctcccatcttcttttctctgtcctctggcaaccactagtctgtgtccatctccacagttttgtcattctaaaaatgtcacagctgggcaygatggmttgcatctgtagtcctagctactcgggaggctggggtgggaggatcccttgagcctaggggttcgaggctgcagtgagccgtgatcgtactgctgcactccaacctggatgacagagcgagactccatctctaagtaaatacataaatcaaaatgtcacataaatacaatcatgcaatgagtattaatcttccaagattggcttttatcactaagcacgttgttctttagatctagccaagctgtatgtatcaatagttgtacttttttttttttttagaaggaattcttgctcttatcgcccaggctggagtgcagtggcatgatctcagctcactgcaacctccgctcccaggttcaagtgattctcctgccccagcctcctgagtagctgggattacaggtgcgctccaccacgcccagctratttttgtatttatttatttatttgagacggaatcttgctctgtcacccaggctagagtccaatggcgcagtcttggctcactgcaacctccgcctcctgggttcaagtgattctcctgcctcagcctcctgagtagctgggattacaggcacccaccaccgtgttggccaggctggtcttgaactcctgacctcaggtgatgcacctgcctcggcctcctaaagtgctgggattatargcgtgagccactgcgcccagccagttgtaccttttttattcctgagtagttacactgctttatggatgtaccagagtttaaccatttatctgtctaaggacatttaggttgtttccagttttggactattatgaataaagctgctgtgaccatccacatacaaacttttatgtgaacataagttttcatttctttagaataaagagtacaattgttgaatcatatgatatattagtttcctgttgctgctakaacaaattaccacaggctggaagcttaaacaacacaaatgtatcacagttgtatagcttaacaatccaacatatgtctcatcgggctaaaatcaaagtgttggcaaggttgcattcctttctgaaggctttagagaagaatctattcctttcctagtttctcctgttattcttggcttgtagtctcttccttcatcttcaaaggagcaatgttgcatctctctgtgcctttccttcgaagtcacatcttcatctgctaactttcttctgcctcccttttccacttttaattcttgtgtaatgttacataaggtagttctgttttaaggtcaactgatcaacgacctggatttcatctacgacctttatttctctttgctatgtaaagtaacatattttcaggttccaggggttagaatatgaacatctaggggttggtaatgttgttctgcctactgcatatgataaattcatgtttagttctattttagaaactaccaaactatcttccagagtggcatgtgactttatattcccaccagtaatgaatgagaaatctagtttctctacatccctgccagcatttcatattctagtaggtatgtagtgatacctcattgtgattttaatttgcatttctctaatggttaatgatgttgaactttttttatgtgcttctttgccatacatatttcttctttggtgaaatgtccgctcatgacttttgcacattttcctttggatatgtggtttatacaagtcctctgaatatgtggtttgcaaatattttctctcattctgtagcttgtttttaattctcttaacagggacttttgcttgtgagaaaccttataaaatttcagttcttgccttacatgagtgatgccacatgctacagtcatgaatatctcatagggttttaaagaaaacattcatatgagacagtagtcattacttaaagctgtgtttgaagtaagactttgtgctgatttggatgtagttagagttggacccagtgatgtgcttgaactggctcttcccagtttgcaagaggcaygttytgaagtccaagaatgttgcaagttagtttttaaacagtcagtagccatgttgggagtatgtatacaatggaaattggcaatcactataaatcagtgctcccctcctcactggagagtgggtagttaaatatttaccaactctctaccagtgagactggcaaagaatttgtcaagaaattgagtatttttttcctttaagtcagtgcccattgagatatatcataaataaatatgtcagggtattctcttcaccagcttataatatttgctttgtattttttgctattttatttttatttgtgtttcatcaattttgtcctgttctaattacaatttttcagaatgtcagggagtacagtggtatataagtagtatagtttaatggtgtagattagaccatacatttcagaatcagatagacttagcttacatcccacctcaatttagtagctgtatgaacctggcaatattgtcttatatgtaaaattatgacagttattatacataatrcagtcagccccccaaatttacaggtttcaaatccgtggattcaacgaatcaagggtcaaaaaaaattttaagaaaaaaaaacagtaaaaaataatgcaacaatcaaaaatttaaatgttaacacaaatgttgacaatacagtatagtaactatttacatggcatttacattgtgttagctattacaagcaatctagagatgattttaagtatagggaggatatgcagaggtyatacgcaaataactacaccattttatataaaaaggacttgagcatctgtggaatttggtatcctggtgggggttagggaggggattggaaccaatcctctgcagataccaagacaactgtatatactttgtaaagcttgtataagatgatactcataaagcatttaacagataatgtctcaataagtgttttaattgttatatcattacaactatcaccattataatctcaacagggaaagcctttcataatcacagctgattaaaatacctttttagtattcaggcatcccctgcttaacacttaatatcctaggaaatcagatgtcctacttgaaaattctaaccaggaacccattcccccaaatccccaaccaatttcctaaaagctaactaaatgcagtgaawtatytttaaagtaataaattataatttggggatgtaaaatgcttaaacagtggtttcctgatgacctaacaaatctagccttaaggaaccattgctaggttgatacactcagaggacttttcgaaatgtctacayatgatcagacctttctaccagttgtgtttggaatgtaacaggagacttccctccatacattcttttgtttaaaatgttatgttaaatttgaggaatgtaagtataaatttttcccatataaacatcagcaggaaaatgttgaatttagagacatatattgcctgagttatgggtgttaaaaccaagaggaattctatcagaaaatgttaaccacggagactctgtaagtgtgcccgatttttatttcctggtttatttactagatgaagtggatrtaactaacaggaaaacacctgattagtgctgcagactctgtgttcttatttaattctcatacaactttggaagttaaaagaccttaaattaattttgcaaagctgtacaactccttcatttctgagttgaaattcagttctactgcagtagctaatagctgtccaggaacagctattagaaaactggaaaagcatcaaggaaagcctactgaagtgtgttttcctttcgatccagtgtcttcttttctagtaaatgtcctgtctatccccccttcccctataggaagttttcttctctttcttcagatgctattatatgagatacaatttataaattcttttttttctcatctgacagtagcttttttctatacaatcagttacctttcactgtgtttttcacccatcctttttaaaatatttctgatrtcaggatttgctgcaaaagaattaacgaaaagtatcaagaagtttgctagagctttctttctactcttgcttctctcatggaatcaagtgraaaattgggctttcttattttatttcattcactgagtaactactcacaagaatgtctacttcagtaaggtagttgaaccaagcatatcctgacagcctcatggaagcaatgaatcttttaatttatattagagaggaaaacgaattaatgaggaagaaaatcataagtagatggttaggcattctagagaattatatttaaaattagctactaggtcacttctgcatcagttgttctacgtaaaagtgatagggtatcccctcaaatgttaagtcacattctggccatcctttttcataggttgcactcaaattactttcaggttagttgtgtttccttttttttttttttttttttttgtgagacacggtctagctctgtcgtctggggtggagtgtagtggcacaaggctggagtgtagtggcgcaatcacacggcacattgccacctctgccacctggacgcaagccatcctcccacttcagcctcctgggtagctaggactacaggcacacgccaccacacccagctaatttttggtttagtttgttttgttttggtagaaatgagtttcgccatgttacccagggtggtctcgaactcctggactcaagtgatcctggcctcccaaagtgctgaaattacaggtgtgagccaccacgcctagcccagttgtgtttctgtacaccagaagtgaataatctgaaaatgaaattaagaaaacagttgcatttacactgtcatccagaagaatagaatacatagcagtaaatttacccaaggtgagatacttgtatactgaaaactacaaaacatttcagaaagaaattaagaaaatctaaataaatggaaagatatcctgtgttcatggattgaaagacttaatattgttaagatgtaggcactaaccaaagtgatctatgggttcagtgcagttcctatccaaatttcagtgacattttttgcggaagtgagaaggccaattctcaaacccatatggaatgcaaggggccccaaatagccaaaacaatattgaaaaagaacacagctgaaggactttcactttgcaatttcaaaacttactacaaagttaccatattcaaaatagtgtgctactagcataagaatagactatatgtagaccaatggaattagaattaagagtctggaactaaatccatgaatacatggatttatgaattaatcgaatatccacaaggatactaagaccattcattggggaaataatagattcttcaattaatgctgctgggacaactggattttcacatacaaaaattgaagttggacccctaccttataccatatataaaagttaactccaaatggatcagtggcctaaatataacagttgccataaaattcttagaggaaatcatggggtagggatcttaaagactttggatttggccatgggttcttagatatgacaccaaaagcacaaggaaggaacacatttaatggaacctcttggcttataaaccataaacccagaccactatgtcaaaactattataaaaatcaaattagacccatgtaagcagactatatagccactgatttggatagtaatatgagaccaaatttttatttgttgacaattaacctatatacagtaactaacctgtagagtctgcatctaagaagttttgtcaaactttccaaagctaaccatcaatgtcgttatggatagaaggtaccaaagtctttagtgtaacatatttagacaatagaggtgttaggaatagtctccagatggatactaaattggttcttatccaacaacattaagaaatagccattcttctgtagttcattgtgcatgttattctcctctataatatagtaaaatatatattttgtcttccagctctgttttcctggcatgcaactcctaaaatccttagaatttccaaagtagtatctttttctatgctgatgagttgactagtggcttcagggtggggtcacaggagagaacaaggcatgattataggactgggacttgaagtccatcccacaaactccagggaggggagaggggctaaagattgagttgatcactgatgaccaatgatttagtcatctgtatcctttgtgatatctttaataataacctggtaaattaagtgtttttgctgagttatgtgagccactctagaaattaattgaacccaagcaggggtcatgggaaccctgatttatagctcatcagtcagaaacataggtaaaacaacctggggcttgtggttgttgctgtcgggtgtcagtctcctggggtcctgacactgtctctaggtagacagtttcagaactgaattggaggacacctatcaggtgtatgttgcagaaatgaatgattacttggtagtagggagaaatcccccatatatttagggttataaagtcttctgtattgattgctgtggtatgagagcagagggaaaaaaatttttttttcaactcatatcctcccactccccatagctgctcttgcctttatcagtgttgtgtgtgaaagtctgtataaggatagaaaaggagattgaggtggccctatgaactgcgtagccctggattccattccattgagttcagccaacgggatgcatcaagaattttttttttttttttttttttttgagataggtttcactgtcacccaggctggagtgcagtggtgcaatcatagctcgctgcagccttaaattcctgggcttaagcgatcttccacctcagcttcctgagtagctgggactaccagcatgtgcccctgcacctggctatcaacaggaacttagaaggtggaaggagaaagaggtcaggatatgtattccckctccctccctgccctagaacctcaattctagtattggctgtatccctttataactgtatctcttgtcctttgagccttcaccccacttcttcaacagcttcagctttgggttttgataatactgtctcctcccacttactccttccaggtcctaagcagtaatagcttcctgcagtccctagactttggttccgtcagcatgccttaacctttccagcactttgggaaatattccctaagttgatttrtcttcagagtctctaacaggaccctgactaattttctattttatttttacaagtaaaaattgtatatatttatggtgtgtatgatgttttgatatatatacacatttagaatggctaaatcaagctacctaatatatgttttacctcacatacttattttggaagatgagaacatttaaaatctactgccttagcaattttcaaatacatgatatattgttaactgtagtcatcatgacatacaataggtttcttgaacttattgctcctgtctaactgaaattttgtgccctttggccagcactacctaatcyctctgctaaccaccatttactctctctgagttcaacttttttacactccacatataagtgagatcatgggatatttgaatttctgtgcctggtttatttcactttatgtgatgtcctccagggtcatccatgttgtcaaaacataacagactttccttctttttttaggctgaatagtattccattttgttgcacattttctttatccrttcatttgttgatggacgcttaggttgatttcatatcttggctattgtgaatagtgctacaataaacatgggagtacagatagctctttgatatactgatttcttttcttttcttttagatatatacccagcagtgggtttgctagactayataatagttatattttttattttttgaggaccctctgtgctgttttctgtaattgcttatagaaattgactagttgacattcccatgtagaaaaagggaycccttttttctacatccttgccaaccctaatttttttatcttccaacttaatttttttttcctgttggctaatacaactttggcctgtcaaatcatggtagacattctgtgaatagtatcactgtagtagaagccagaatgttttatagaggaaatgtagaacagaaattaaatctggggagtcagataaatagaggtagattaaaaggatctttcatattagtgttattgcatttttctcagtgtctccaaagagtttgaaatgttgtatacgttatttagaattgtactcagaagataaagtattttaccaacaactgagcttaatttttatagtttattagtatcttcatttcctagtctccgaagaccatcttctcataaaagtgcttatatatgtaaaagtttgtttgcattttcaacctgtatcccttgatactcatccagaaacctagggtgagaatacctgtgttaactgtttttaaaaatttccatgacatgtttggtcaggggagaagaatgttctgtgacaagtgccagttttaytggtgaggtagaaaaggccttagaaggtgctagtaagacagaaaaagaactgtaggaagaaatcagtatcggagagcacagagatcctcaatccttggatatataccacccagtgaagcagatcagaaagacctatattttatagtgctgtcacaacatacaagctggaaagcaccctattatatgtgaattggccacagctaagagtaaatgattgaaatcttttaaaacttttagttacattgtttacaatttggggtaaatgtctagataagtcatktaaattttttcacctaaactcataattttgcttctagagtcctaacgagtagtgaaatggagattaatcttgaaaatcccattascttacatcactagaagcactttgtccacctgcttcctggacctagaagagtaaacctgtggttgtccagttctaggtggtagctttaagatactgcaggcgaagacatatatttgtgaccagcagattacaaacaagcaagaaagtgtaatcccattctgctatatttttaatggacaggattggatatatctttctaatcatagaagacgtctggaagaaaatggtttctgcagagggaaattaatgtattgaaggtgggaacaagattttggtttttacatacacatttctgtactgtttgttgttgctattgttttaccatgagtttgtattactcaataaaataacaaaaatggtgagatcaggaaggacaccttttcttgctatgtagattatttttgcctcatccttggttccttagtttccatttccttacagtattttccagttactcgtttttaacaatctgtggggtctgtccatagtttttcctttttcttgtcctgattaatagcctcccaatttattttctcatcgcctgcatacaactcagaccctcctattgaacgtgaaaccttctacctattcacccctctacacagatcacgcatcattttcttgtcttaactgtttcagttgttccgtgatttttgttctatgcctttgaggatttattgtttacaaagaactaaagtatttttagtttatttgtttaagctaccctcaaaagataataataggcaaaagaaacaccgtaagaacataccaaaattccactgaaagctaactagggaatgttggcttccaatcttagctagaaaatgatcaaaattcgatactggttgattttttaaaatatgaattgtgagtcatattcaaaaagagccacagcttgcagttgtagtcccaaactaaagtaggtatagatagatagttccaagagatcatctgtattacagggatcaggcaaaattgctttcacctggagagccgtttgcatggaaatacagcatggttagaggtagccctctggatccgactgcttgcttcaaatcaaactgcactttcactgtgcttaacctcagtcaagttacttgcttcttttggctttaatgttatcttgcataaaaatcagkatatttaaaatacctcactagtttgttacatgattaaatgagacaatgyatataaaataacacagagcctgttatatggttacttttagccattaacagcataatcataaaatatcacattataaagttgcaagagattctttccatacctcctcaaaagagtttttacttggaccttccagcatttgaagctatgtcaccagtggcagtctttttgacttcatataccttccaaataagtagttttattttcaaaaagctgaatgctatagtartggtgtttatcaaatatgttaccaatatttgaagttttgataccatttcttatatgcagattgatcttcgtgtacaagctaaagctaaaccrtgctaacaatatttaatgggtatayatcctgtatagaataaaatatttcctgaatttcattttccttttccagaattttatacatacatgctcatggaaacacacacaagcacacctctctgtgccctaacaacaacaaaaatcttataagtttagacttcttttgattaaaatcatatggttagtcccaaaactacaaatatatttttaatttaagtaaaagaggacactccaacaaaactagtattcactgcacctctgagcatagcacacatcctttctgagttcaggtgggtacaattagctgctastaaaaatgaaccattagtgaagtcagtgaatattaaatgtgggacttacaaggctaggaatgacaaataatgggaaaaaacattttgtactctaattttaaaaagaactatttaggagacagctgtagctggggtagctttctcttgtagaggcatttgctccattgttgagggttggtactgtctaaagttaaaccatttcagtgatgcctagcatggaacacttgacaaccaaccttccagstaggaaatgagacktccttgccagcaagtccatataatactacaatttttatgactagactatttttgcagaagtacttattgcttaattgacattaaacttaagtaagtctatctctttctcttaaaaataatcttaataacaaatagaaatctttagtatcccagtctaactcagtttagtcctatttagtttgggataagaaagtaatgtatcagttattttggcaaattatttatagaagctatgtggaataagctgtatctatttagattttatataatttggtaattagcatacaatagcttacatgaaataaattcttkaaatagtagaaattatgagtaattccactgggcttactcttgtcttagattacatagatataagtattcttgggcattttgatgctagaccaatgatttataatatcaaatacatttatttttaataccaacaaaggtcactggggttcaaagaagtaagattaagcagtcaaggaaacgtgtgggacaatagtaacacaaatactacttttaatgccctcagttgctttactgttagtagaaagtttagtaaataaaacagatgacagatctcatatcagagtaaacctagcaatagggcattaacattgatcttattaaaatacagttgaccctttgaacaccacaggtttgaattgcacaggttcacttatatgtggatttttttcaataaatatattggaaaaatttttggacatttttgataatgaggaaaaaccatgtggcctagaaatataaaaaaaattaagaaaaaatgtcatgaatgtattaaatatgtatrtactagtctattttaccatttactaacatgaaatatacacaaatctattataaaaagttaaaattatcaaaacctacacacacaaacactactcagccttaagacgataaggatgaagacatgaagacctttatgatctgcttccacttaatgaatagtaaatatattttatcttctttatgattttattaaccttttttctctagctcactttattataagaatacagtatataatacatataaaatacaaaatatgtgtcaggctatgttattggtaaggcttccagtcaataataggctattagtagttaaattttttggagagtctcaggttaaaggagaatttttgatgtgtgtagggtttggcacctctagcccccatgctttttgtgcatcaactgtaattcattttgcctgcatgataactgcttattttttaagatatattttgaagactcaaaataatatcatgttgatatagaaacattccatttccatttgtaattaaaattgaaaaaattttaattcttccatttaccttgactatcacaaatacatgtaatgattttttaaacccagtctagagctgaaccarttaagacaaaattgacataacagatttgcccacttttccattaaatatttttatccctaatcaggccctcaagttacctgctaatgctaattgtatgacttggggtaatatggatcaattattgtattttttaaaggctagaaattattggataaattgtggaaattttaattatttctagacctcatttgtagaataaagtttaatcagaatgtttgagctaaaggaaatcctagatgtcatggtccagtccctctccttttacagataagaaaacgtgaagctctagaaattaatatctttgccattatcatcagtatatgagaacagacctgcaaaagtgaactcatttatttcaatagcccatccttttttcccccttatgccacaatgcctcttaacttttaatttcctaccagttcactcttcttcccaaagtgctccttctgttaattactatttttcctaccttccctccacaccaactaaagaaaaattcctagtgcctatttcctctcagcctctagggatatttattgcctgaatgaatctcttcagtagcattttcaaaagtgtgacaagatgaaaaggacattctaatgtcagaggaactctttagggctttactaatacgaaaggtattctgtctatgaatctgccctagttacagtctttcttcttctctcttgttttttacttcactcttgaactacatgggttctctaaaaacttaggttatttttggttttaactatatgatctcctagtagggcaagtataaaaggacaaggtatacatatgtttaaagtcttgtccttttatgcctgccttacctactgaatctaaaattggtaattaagtattatagacattgaggtcccagaattttatatctcaagacaaaaaaagaatataggcagcacaatgtcatgagatttgacctatgacaggtttttcttgaatgtttctaggaggtattccactggctttttttcaatatcagacatcaccatattatgcttttttaaacgtatgtagataaaagtgaatgtggaacataaatttgcacagtcttcctggaargtggttaatatataatataaaaacttcaagtactcaccttttgtcctataaattctatttttaaaactttgtccyagataataagacaaataatccaagattgaatctgccttagagagttgctttaaggattattgcatatacactatatctacataacagaatgagaaactattaaaatggtgatacatatatctgtatgcattaacattaaaagaagttcatgcatttattaactggaaaagtagattacaaaactataaataacacaacatttatgtaaaactatgtatgttacaatggtctggaaaattrttccccaaactgctaacagagccatcacgtttattatttttactttttttttttttttttaaagaaacaaagcctcactctgtcacccaggccagagcacagtggtgcagtcatagttcagtgtagcttcagactcctagtcttttgcctcagccttctgagtagctgggactgcaggtgcacaccactttgccttgccagttttttcaaattttttttgtagaggtggggaagtggaggggctcactttgttgcccagactggtctcatgtctcctggcttcaagtggtccttccaccttggcttcccaaaatgctgggatacaggtatgagccaccatgtccagacaatttttactttttaattaatgttaatcaacattatagcaatattgtatataataaatatgaaccacttttatagtcagagaaagcaatgaaattatttttattttaaaaacaaaccaaatgtacatagccttggtatttactagcagtatgacttttaacttgttacacacttcctcatttgtaaaagggtgtaaatgtcagtcatattcccatcccatcttcctccccatttatgaatcctgagcccctgttggctccattaacagctggagtaaatgccttttgacagatgtgagggtcagatttctcatcagcaacttccttagcagaagcagtgttgttaaatagaaaaggtggagggaaaccaagatgttgacagagcctagaagagaagttagcatgatgatctaaaggagtatttgcaaagtccagaattatgtggctattttaagactgtctttagttttattgtcattaacttaatgagtttcaggaaagagggaatgtctcttttgattcattttgattcaacagttttatttttaggtatatacagaggagaattctcttggttaaaaataaaaaaggaaaacttacacagctgaagtgaatggtactctgaagtatctgtggggagactgtagttagtgacttgtgtcataccccttccacccataccagatcctttcctttgagacatgggtgcttttccctggctagtcttagaagcaatcacatttttatataatgaactctgaggggtttaaaaatgagtgagacatggtatcctggagtgcagcatatgwctgctcagcatttacaggtttgtttgtttttttcctctctttacttttccatttagtagacactaggccataaacccgttttaatttattcactgagaaggaaatgacataatattcactgctgtggctgcataggtcatcaattccctgggactcaggattacatctgagctgatatcagactscctcttcccaggatagtaaaatttgaagtctgtgtgtcaggggcctgcagtgtaagtattcgagaaagtttgttcaaagtatttcctttccaaaaagcaggaattagagaagcaagaatacaggagcaggatggtgtattaggaattttagcttaagattcctttacaatttcttctcctaagaaattttagctctctttaacagtgtggttgtcaagtatgctagtgaatcttacaaaaattatgcaactggagaaatgaaattatttgctatttgtactggcttatgtgcaggcaaaataaaagtaggcaatggatggaagaaaacagagacttttgctttattaaggtgaagtgaatttcacctccttttatcgtttgaagtattgagaggtttttgttagagtgttttgtttggaaaagttatacagattttgcctttaagaacaaaattttaaatctctctaagaggtttagtattgagtggcaattattttgtttacttgtctgtcttctctgttgactatgaactccttcgtggtrgagatggtgttgcttatgtttgataagtccaatcccagactcataaatgtttatttggttggataattagcaaattaattaattttgcctgttaatgcagataattttgcttaaaaatagttttacataaacacatatacatacatacatacatacatacatacatacatacatacatacatacagtgggcctaccttctattttctgctgctttcaacttaagcttgggaatatttttgctatagctatttacaaagtttttgcattaaaggattaaatcactctaagttgagtgggaattggaaggagcaataatattggggctatttttaaaatgtctgtatgctggagaataggaaatggttaactatggccagacctataccctagcatatctaaatctattacaaaagtgaattaaccactgtattaaagktttctagagagacagatccaataggagccatttattatctagatctatatatgagtttattagggagcactggctcatgtgataacactgtgaagtcccatgataggctatctacaagctgggggaagacaaaagctgatagggggcccagtccaagtcataaagccttaaaaccagggaatccgacagtgcagttatcagtctgtggctgaaagcctgagagcctccaggaggccgctggtacaattccacagtccaaaggctggataacctggagtatgatgttcaggagtagtaagagaggaggcaagcgtctgacacaggtagaaagagaaagccagaagtctcagcaaactgcttataccccttctcctgcctgttttgttgtagctgctggcrgccattggatggcacctgcattgaagggtattgctttcagtccatcaactcaaatgtcagtctcctctgacaacaccctcacagacacacccagtaacaattctttaccagccatctaggcatccctcggttcagtcacacctaatattaactaaccgtcacaaccgccattccccatattagtacttagtgtgctaagtcagtgcaaaatgtgggacamttaatttacataatttctttttatattttaattcctgtgaataatatgtgtgctcttaagtatttataaacataaacatagaaaaacaaacacttgtgatttttatattcttgagtttaaggaaatatatttaatctatttcaggcagttaaaatataattttacttgtgcatgtgtataaaatatttctcaaagtagtactctgtaacaagaaaaccttgaccctgtttcttcaaatgaatataagctctaataaatagacatttgttcaawctctgaactatttaactgtaatgagttgaaaaaaaatttttttttttttgagacagagtttcgctcttgttgcccaggctggagtgcagtggtgagatcttggctcactgcaacctccgcctttctgtttcaagcgattctcctgcctcagcctcccgagtagctgagactacaggcacatgccaccatgcccagctaattttttgtatttttagtagagacggggtttcaccatgttggccgggatggtctcgatctcttgaccttgtggtccacctgcctcggcctcccaaggtgctgggattacaggcgtgagccactgcacccggcagaaaatcttaaatctatactatagagtctgacaagaatttgggacccaaaagcaatataattctattacatatttatcttaacaagtaacattttaaaagtccatgtaatttatagatttatttgctttctctaacaagtaatgcttytaataaaaatctgggcctggtggggtggctcatgcctgttatcccagcattttgggaggctgaggtggacgcatcacaagatcaggagttccagaccagcctggccgatgtggtgaaaccctgcctctactaaaaatagaaaaaaaaattagctgggtgtggtggtgcacgcctgtaatcccagctgcttgggaggctgagacaaaggaagtgctagaacccgggaggcaggggttgcagtgagctgagatggcagcactgcactccagcctaggcaacagagcaagactccaactcaaaaaaaaaaaaaaaaaaaaaaaacctggagttaaaattaaatttagcatataacttaacaacaacttaaaattacctctgttgtcacatattctagttgctagtgatttttagcagtgattcttgtgttattaatgagctaaaaacttcttcagcttataatggttaatcagtttttaaatgaatttaccaattttgtaattaaacaaaatcaatcattttggaggctcaggtagtcataatattgtgtaagattggcacatgtttttatgaggttaatttatgtggtgtcctaacttcataaatttgatacatgaacgacataggacattttaaaaaacctacatagtgtcttacatcaactatgtagtatcctatgtagtgtgtatctctgggaaatttctttagtgattgtctccgtagcactgcagctgcctgtctagttggtagccactggccacatgtggctattgagcacctgaaatgtggcttttccagcacctgaagtggggcttttccaaatggagatgtgagttttttgttgttgttttgtttattttgagacagggtctcactctgtcacccaggctggggtgcggtggcacaatcatagctcactgcagcctagacctcctgggctcaagcaatcctcccacctaagcctcttgagtagctggaactacaggcatgcatcaccatactcgggaaattttttaatttttatttttttgtagagatgtggtctcattgtgttgcccaagctggtctcaaactcgtaggctcaagcaatcttcctccctcagcctcccaaagtgctagaactacaggcgtgagccactgcacctggcctgagatgtcttttrtacaccagattttgaagactattcaaaaacaatgtaaaatatttttaaacaattgttaacattgatttttaaatgatgatattctggaatattggattgaatatattacatttgttttacttttttaaaaacctttaaaatatagtttcttaaaaaatgtaaaaatggccaggcrcagtggctcacacttgtaatcctagcactttgggagaccgaggtgagcagatcacctgaagtcaggagttcgagaccagcctggccaacatggtgaaaccccgtctctactaaaaatacaaaaaaattagacrggcatagtggcacgtgcttgtaatcccagctactcaggaggctraggcaggagaatcatttgaacccgggaggcggaggttgcagtgagccaaaattgcgccactgcattccagcctgrgcaacaagaacaaaaactccatctcaaaaaaaaaaagtaaaattatatttgtagctcatactatatttcttttgaacaacactgatctaaagtgctatgtttttcattgtccgtttaaatggattatgatgtaattagactagagatctcatgggttttagaactaaaatgttctggggtcagatgtggcttctggcttttacttatttgtatttctggcctcagttgtacccgaaaataaatttttgttggaaatacagtttgtcctgagctaatagaggaacatgatttaccttcaattctggagagctagtaaaataatttagaacactatgtcaagaatgattctttctcactcataacactttcttgtgtgtctgttattttaagtatcaaaattctcctttaaaactctgggatagatgtttcacatgtttcttcttgacctaaaaggtgtcattttcaggcaccaaaagttcttaaacactaatattctggtatgtagctgctgatgaaaaatgtacttcttagcaaatcctaagctggatacacataaaatcacacaaggcatagcatgataaaattgtataaaaccaatgataaagaggaaaatttttttagttatgttatggtaagaacatttaacatgaggtctacctttaaaaattttttttcagtgtataatacagtattaccaactgtaggtgtaatgtcatacagtagatgtgtagaacttaactgaagcattgcttcactgaagcattatgcctgttgattagtaactcctcatttccccctctccccagcacctggtaaccatctttctactctttgattctatgaatttatctattttagatacctcagttaagtagaatcatgctatttgtctttgtgtgactggtttatattacttagcataatgccttcaagtttcatccatgttatcccatatggcagaatttccttctttttaaagactgaataatataccatcatatgtatatgccacattttctttaatccattcatctgtagatggacatttaagttgtttccacatcttggctcttgtgaatagtgctgcatgaacgtgagggtgctaatatgtctttgagatcctggttttrattcttcttgacaaatacccagaagtgggattgctggattaatatggtaattctattttaattttttgaggaacgttcttactcttttccatagcaggtgcatcattttgcagtctcatcaacagtgtgcaaggattccagtttttccacatcctcaccaacttttattgccttttatttctttgattatagccatgctgacaggtctgaggtgaaggctcattgtaagtttgatttacattccctcagtgagtactgacattgagtaatttttcatatacctgttgcccatttgtatattttctttggaaaaatgtctgctcaactccttagcccatttttaatttgggttgtattggtccactctcacactgctataaaaaaatacctgagatggggtaatttataaagaaaaaaaggtttaattcattaatggttccacaagctatccaggaaacatggctggggaggcctcaggaaacttccaatcatggcagaaggcaaaggggaagcaggcacatcttcatatggccagagcaagaggaagagagaggcagaaggtgccacatacatttgagcaaccaaatctcacagctaccacaagagcagcaccaaggggaacattctcccccatggtccaatcacctcccaccaggccccacctccaacactagggattatgatttaacatgagatttgggcrgggacccaaaccatatcatgggttattggggtattttttaaattgagttgtaggggttccttatatattttggagactaacccctaatattggatacatggtttgcaaatgttttctccaattcagtaggttgctttttcactctgtcgattgtttcctttgccttgcagaaactttttagtttgatacagccccactagtttatttctatttttgcattctgtgcttttactgtcatattcatgaaattatcaccaggaccaatgtcattaagcttttcccttatgatttctgtaggagttttacagctttaagtcatatgtttaaatctttaatcctttttgagttgatttttgtatatgatgtaagataagggtccaatttcattgttttgtttktgggtatctagttttcccagcaccatttatttatttatttgttttgttgagtcatctctcctttttctttttttcttttctttttttaaattatactttaagttttagggcacatgtgcacaacgtgcaggtttgttacatatgtatacatgtgccatgttggtgtgctgcacccattaactcgtcatttaatttaggtatatctcctaatgctatccctccaccctccccccatcccacaacaggccccggtgtgtgatgttccccttcctgtgtccatgtgttctyattgttcatttcccacctgtgagtgagaacatgcggtgtttggttttttgtccttgcgatagtttgctgagaatgatggtttccagcttcatccatgtccctacaaaggacatgaactcatcattttttatggctacatagtattccatggtgaatatgtgccacattttcttaatccagtctatcattgttggacctttgggttggttccaggtctttgctattgtgaatagtgccgcaataaacatacstgtgcmtgtgtctttatagcagcatgatttataatcatttgggtatatacccagtaatgggatggctgggtcaaatggtatttctagttctagatccctgaggaatcrccacactgacttccacaatggttgaactagtttacagtcccaccaacagtgtaaaagtgctcctatttctccacatcctctccagcacctgttgtttcctgactttataatgatcgccattctaactgttgtgagatggtatctcattgtggttttgatttgcatttctctgatggccagtgatgatgaccattttttcatgtgtcttttggctgcataaatgtcttcttttgagaagtgtctgttcatatccttcacccacttgttgatggagttgtttgtttttttcttgtaaatttgtttgagttcattgtaaattctggatattagccctttgtcagatgagtagattgcaaaaattttctcccattctgtaggttgcctgttcacgctgatggtagtttcttttgctgtgcagaagttctttagtttattagatccyatttgtcaattttggcttttgttgccattgcttttggtgttttagacatgaagttcttgcacatgcctatgtcctgaatggtgttgcctaggttttcctctagggtttttatggttttaggtctaacatttaagtctttaatccatcttgaattaatttttgtataaggtgtaaggaagggatccagtttcagctttctacatatggctagccagttttcccagcaccatttattaactaaggaatcctttccccatttcttgtttttgtcaggtttgtcaaagatcagatagttatagatatgtggcattatttctgagggctctgttctgttccattggtctatatctctgttttgataccagtaccatgctgttttggttactgtagccttgtagtatagtttgaagtcaggtagcatgatgcctccagctttgttcttttggcttaggattgacttggcaatgtaggctcttttttggttccatatgaactttcaagtagttttttccaattctgtgaagaaagtcattggtagtttgatggggatggcattgaatctgtaaattaccttgggcagtgtggccattttcacgatatygattcttcctacccatgagcatggaatgttcttccatttgttcgtatcctcttttatttcattgagcagtggtttgtagttctccttgaagaggtccttyacatcctttgtaagttggattcctaggtattttattctctttgaagaaattgtgaatgggagttcactcatgatttggttctctgtttgtctgttattggtgtataagaacgcttgtgatttttgcacattgattttgtatcctgagagtttgctgaagttgcttatcagcttaaggagactttgggctgagacgaaggggttttctagatatacagtcatgtcatctgcaaacagggacaatttgacttcctcttttcctaattgaataccctttatttccttctccttcctgattgccctggccagaacttccaacactatgttgaataggagtggtgacagagggcatccctgtcttgtgccagttttcaaagggaatgcttccagtttttgcccattcagtatgatattggctgtgggtttgtcatagatagctcttactattttgagatacgtcccatcaatacctaatttattgagagtttttagcatgaagsgttgttgaattttgtcaaaggccttttctgcatctattgagataatcgtggtttttgtctttggttctgtttatatgctggattacatttactgatttgtgtatgttgaaccagccttgcatcccaggaatgaagcccacttgatcatggtggataagctttttgatgggctgctggattcggtttgccagtattttattgaagatttttgcatcgatgttcatcagggatattagtctaaaattctctttttttgttgtgtctctgccagtctttggtatyaggatgatgctggcctcataaaatgagttaggaaggattccctctcttcctgttgattggaatagtttcagaaggaatggtaccagctcctccttgtacctctggtagaatttggctgtgaatccatctggtcctggactttttttcgttggtaagctattaattattgcctcaatttcagagcctgttattggtctattcagagattcaacttcttcctgktttagtcttgggagggtgtatgtgtcgaggaatgtacccatttcttctagattttccagtttatttgcatagaggtgtttataatattctctgatggtagtttgtatttctgtgggatcggtggtgatatcccctttatcattttttattgcatctatttgattcttctctcttttcttctttattagtcttgctagcggtctatcaattttgttgatcttttcagaaaaccagctcctggattcattgattttttgaaaggttttttgtgtgtctatttccttcagttctgctctgatcttagttatttcttgccttctgctagcttttgaatgtgtttgctctttcttctctagttcttttaattgtgatgtcagggtatcaattttagatctttcctgctttctcttgtgggcatttagtgctataaatttccctctacacactgctttgaatgtgtcccagagattctggtacgttgtgtctttgttctcgttggtttcaaagaacatctgtatttctgccttcatttcattatgtacccagtagtcattcaggagcaggttgttcagtttccatgtagttgagcggttttgagtgagtttcttaatcctgagttctagtttgattgcactgtggtctgagagacagtctgttataatttctgttcttttacatttgctgaggagagctttacttccaactatgtggtcaattttggaataggtatggtgtggtgctgaaaagaatgtatattcggttgatttgaggtggagagttctgtagwtgtctattaggtccacttggttaagagctgagttcaattcctgggtatccttgttaactttctgtctcgttgatctgtctaatgttgacagtggggtgttaaagtctcccattattattgtgtgggagtctaagtctctttgtaggtccctaaggacttgctttgtgaatctgggtgctcttgtattgtgtgcatatatatttaggatagttagctcttcttgttgaattgatccctttaccattatgtaatggccttctttgtctcttttgatctttgttggtttaaagtctgttttatcagagactaggattgcaacccctgcctttttttgttttccatttgcttggtagatcttcctccatctctttgttttgagcctatgtgtgtctctgtacatgagattttgagaykagtttcctgaatacagcacactgatgggtcttgactctttatccagtttgccagtccgtgtattttaattggagcatttagcccatttmcatttaaggttaatattgttatgtgtgaatttgatcctgtcattatgatgttagctggttattttgctcgttagttgatgcagtttcttcctagccttgatggtctttacaatttggcatgtttttgcagtggctggkaccggttgttcctttccatgtttagtcccagcaccatttattaaagaggaaaatcttaaaagcaactggagaaaaaaaaaagataagatacagattaataaggtaataattcttattccctatagaarccatgcaaagcagaacacaaggaaatgacatatttcaagtgctaagtggatgaatctcagtcagattattcggaatactaatagcgttcatttatttagtacatattgtaaaccagaaattatgctgattattttaatatgcattatctcatttaatccttacagcaacccggagaggcarctagaattaacacattttagaggtgaagaaaatgaggctaagagaagccaagggacttggctaataaatgttacacacttagcaaatggaaaattcaggatttcaaaccagatatgattaacataagccatgtctcctctyactattaaccataactggtagaacatatacataacttaaatttgataggtaagctgattggaggctatttgttgtggtacgaatgtttgaaaattgctgtcagtcagcaagtatttatcaagcacattagatattccaggctggaactggaatggaatcatgaacaatacaagtatggttctttatccttatggagcttataaatgtctaaggaaaagaaatgtggtaattctaggtacttctgaggatggttctaaggattaaatgatatattaaaaaraaccagcacaatttctggcatataacatttatgttcaataattttaagtatttaaaaaaatagttataagtagtctaagtgttctgaataagtgccaagtgctgtggaaggacattggagggaaaaagctaacatagtctgggagattaggaaaggcttccctgagttattgatttttaagcagaatctgatgagtgaataatctgttagccagagcaaagagattggacacaaaagatcattatattcaaagggctgcacatttgataagacattgcagaggttgaagagagcatagtatgttcttattctaaagacagtgggaaacaaatgaagctttttaaggatgtgggtggagggttgctggcaataatcatgttagccttaaaaaatcatttcatcattccagcaacctctaagaacagtctttgaggaatgtggcaagagtagacacgaggataaatgtgaggaagtggttcaaacagtgggaacagaacaaagtggacaaagctacttacatggaatatacaaaatttggcaattttggatgtaggaaaggagaaagaagatgcacagttcttaggtttctgggatgatggaaatgccgtttcctgagaatggaaatatcgcaagttttgagagaaaattattagatatctttatttggatatacctgtatgctgtgtcagttagagagatatcaagtaggcagtttgacacactggtgctctgaggagaaatttggacccaatatctagattttgggaatcatttatatgcatactttagagatatcgtatgttcggttccagatcagcaaaataaagtgagtttctcaatctattaaatgtgcaaaagaattatgtctaaaaaaacaattttttttattgtttcagaatactttattgctaaaaaaatgctagcaatcatctgagccttcagcaaatcatagtctttgctggtgggtcttgcctccataaagatgactgctgactgatcagggtggtggttgctgaaggttgaagtggctatggcagtttcttaagattaacagtgaagtttgccacatccattgactcttgttttcaggaaagatttctccatagcatgtgatgctgcttggcaacattttacccacaatataacttttaaaactggagtcaattctctctgccactgctttatcaactaagtttatgtaatatcctgaattatttgttgacatttcagtaaggttcacagcgtcttcaccaggagtagatttcatcgcaagaaaccactttcttggctcatccataagaaacaattcttcattcaagttttttcatgagattcctgcaattcagtcataatttcaggctccacttctaatcctagttctattcctattttcaccccatttgcagttacttccctccactgaagtcttaaacccctcaaagttattcgtgagggttggaatcaacttcttccacacccctgttaatgttgatattttgacctcccctgaatcatgaattgaccttctcccctgagtcatgaatgttcttaatgacatctagaatagtgaatcctttccagaaagttttccgtttactttgcccatattcattagaggaatcactatctatgactgctgtagccctacaagatgtatttcttaataagacttggragtctaaattattctttaattcatgagttgcagaatggatgttgtgttaacaaggcttgaaaacaacactaatctacatctccatcagagttgttggctgactaggtacactgaaaatgatcagtaatattttgaaaggaatcattttatctgagtagtaagtttcaacagtgggcttaaaatatccagtaatcatgctataaacaaagtgttgtcttgcaggcttggttgttccatttatagagacaggaagagtagacttagcatattcttaagagccctaggattttcagaagggtaaatgagcactggcttcaacttatatttaccaactgcattagcccccaacaagagagtcagcctatcctttgaagttttgaagccaggcattgatttctctctagctatgaaagtcctagatgacatcttcttccaatataaggctgtttcatctacattgaatatctgttgtttagtgtggccaccttcctcaattaccttagcaacatgttttaaataacttgctgcaatttctgtatcatcacttgctgcctgaccatgcacttttatgttataaagactgcttcttttcttaaacttcatcaaccaacctctgctagcttcaaactttcttctgcagcttcttcacctctctcagccttcacagaattgaagagggttagggccttgctttggattaggctttggcttcaaggaatgttgtggttggtttgatcttttatccagatcactcgaagtttctccatatcatcagtaagactgttttgctctcttagtattcatgtgttcactagagtagcacaattyccttsaagagtttttccttagcattcacaatttgcttactgattggcagaggaggcctagcttttggcctttctcagttttcaatgcacctgcttcacaaagcttcatcacttctagctttttatgtaaagtgagagatgtgggactcttcctttcacttaaatacttaaaggccrttgtagggttattcattggcctaatttcattattattgtgwctcagggcataggaaggcccaaggagaggragaaaagcagggaacaaccagttggtggaacaatcagaatacacacaacatttgtcagttaagtttaccatcttatatgggcatggtttgtggtgacccaaaataattacagtaaaaacatcaaagaacagtgatcacaggtcaccataataaatattataataatgaaaagtttaaaatgttgcaaaattaccaaaatgtgacacaaagacaagaagtgagcacatgctgttggaaaaatggctgcagtagacttgctcaatgcagggttgccacaatttacaatataatacattgtattataaaaaatacaatatctgcagagcccagtaaagcatagtgcaataaaatgaggtgtgcttgtatttatagatgatatctaaagtcaaagaatgggtggaacagtgaagacgaagaaaaagaagaaagttaagtataagctctgaggcacttcaacttttaaatttagccagagggggaggagccagcaagtaacaatgcatgaataggaatatctagagaaataagaggtataatgtggagygtcagaagccaaaagcgaagtgtgttaagaacaaargtgtagttcatcttttccaatcctgctgaaaattagggcaagatacagacagaaaaggcatttcttaaaattttaacaacctggaattcattcrtgattttaacaagaatcattttggtggagtgagagggacagatttgagtcagctgagaaaagtgtgacaaatgaggaaccagagacagagcttaaacaattctttagctatgagtgtggaagaaagagattgggcaatagctaagacaggataatgtgttgaacgagggtttttagtaggcaggagatatctgatggaaaagagcaaatagagaacttgaagatactgcattgggggatgattgcagtgcaatgttatgtcgtggcagaatgaggtgggattgggagagattgctcttagataagaagaattgctggtctgatgtaaagttaggcaaaatattttaaaacatactattaaagctaactgtcaattcttagcatcacaatgaaatcatgaaaaccccgcaggtgcttcgcagttcctacagggaatcttccttgttacaacaacaacaaagcaaaagaagacaccaaaccgaccaacagcaaggagtaatattgaatattcaaaaataaaatctattccttgacttcaaatcattaaagtagarctgcctatttaagaacttttatttgcacagtcctrttaattttaatgcctaaagcagtgttaatcgcatgacccacgtgaaaagattttaaaaattgctttgttagaaaatgtaatagacttgtcgttaaagttttcaaactcttttttaaagatttgtaatatttggctagagttccatttattttctttaaaaaaattatgtacacacacacacgcacacacacacacacacacagtcactcctatcccgcaccctcagagaaagtttgagattatacagccacatctgtcagagctgtgctaacctatgtcatccatctgttctggttatattttccttccctttcctctctttttcttccattctccccagcctttaaaagaaaaaaagttgagagtaaaaacaaatcacctctttttatattgaaatttaaggtggaagaaaagtggttataaaagcatctatcatcatagcactgacttgccaagttaagtatttaggttggaaatcatgcctttccaactgcttaaaaacaggaagtatctctgctaagtgataaatagctccctgttgctggaaaggaaggcctcttttatttctttctacatttttgagcaataataaatgagttctgcattttcatacatgggtgtatgtgtgtgtgtgtgtgtgtgtataatgcagaaatccatttgcagtgtttatgtatacatatatacctcagtatatgtaaatatatgtgaaaatactttccaagactttaagcatagaatctcttctcataagccagcccaggcacatcttactcaacaattcaagcaaaacctttggatctgtcagaaacagcttataggtckgcattaggtgattaattgccaggagaatctggttctatattttgttacatataattattttcttttctaaaggtgttcttttattaagctcccaccataaaagaggggaaaataagcacrcgtcttacatgcctgatgtttagcacttcttacaaaagaaagaggaaaactttaacataatccactgataaaagcatatttgtcttggcttcagacagttttctcctcatttttaccaaaactttaataatattttaacttgcttagaaattagtcttgggatagcagtatggaataatggaatatactttggttatacaatctgacggtataaaattaaaccttagttcacattctatccttaatgcttactaccactctgaccttttacaattacttaacgtcttcaagcttttatttccctttttgtaaattgactataagaatacatatctccttttgagtgttactgtgaggattgcactaattaccatagtaaagcacttattacagttctgaaaatatagtaggaacccaataacattaccattttaaacattattagtttgcttattctaagctctgccacttaatcatgtatgactcaatatcaatattacctccatgggcctcagtcttctcagtaaatacaggagtttagaaatggaagaattttttgtgagactaatgtcctgtgattctctaattatcttcatatcaaatgaagaaaaagtattttcattttagatacaaattattcttatccccataactgacaaagcaaggaatatggcttctacaatgtaatttctgctttacttttgactgagtattcataagacttcttttggtgttgattatggtctctagagcgagactgccaatatttcaattctggctccccaccacttaccagctatgtaactttaggcaaattatttaacctctctctaactcagttttattatctataaagtgagactaataatagtacctcgccttccgggctgttgtgcagattaaaggagttttatgtaaactcattcatgaattttatgtaaaagagtttgaacaatatcaagcatattgtacatttcacatgcacatattattgttgtcatcattgtcattgtctggaataacatcaattgcctctaaccatagcatgggaatactgtaatagatgaataagagtttgactatctgaaatgcagttctagcaccataggctttgataagtatcttactaatgacagatctctaaatatgcatgcacataccaatagagtgagggaagaaaatttagaaacatactcatgactattttatgtaccattctttttaatgtacacttttgtgttgtatacaatataytaatacaagaaggcatgtgtatgctttctgactaaacattaaaaaatgggggaaaagtgctcacatagtttttactaatatgaatgaatgatcaaaaaactttggagacagctgtcctaggagacagtgtcttccaaaggtggtgttaacttgacctcgccatcagtctcagttgtctgccctgtactagatggagatgaacatgtattgaagaagcaaatcaaactttcatgactccagagagtctggaaagaccacaacgagtagtcctttgctaaagatagaataagtgtagtatggaatccaagttattctgactatgtcaactacttggtgtgactgaataatcaaatacctgagagatgtcaaataaatcattccttttcagtactcatatttggacttcaccatggaagaaaatactgctgttctcagtgcccagggactacaaaaccacattcccacagaataaccaaattccttttctgcttatgtttaacagcagtgcaactgggcttttctaatagattttaaactttttgttataaatattgttacctccacggaagtgaggaaattatattttttaactattctgcttagaaaataccacaaataaaggaaaatcaataaatttctttcttaagtggatacattttaaagcagagttaccagtatttgaaaataactcaaaatgaacttctttctctctaagaagttctcataatgggttgatatgacccatgtgttagtacatagatacctaggagtaaatgcccccacctcctttgggtaatgtatttttggggggaatctgatagatacactctcctgaaaatacaaatacaaaatttttacacgtaaaatttagcctacagtttcaaggcttcatagatactgttttccctaaacgcattcaagaacctttaggtaactgagatcttctggatgtgaaagggatgtagctacatatacattccaacccataagccactgtgtcatcattgcagtttatgataagctttctgtaaacccttcattttctaggtttggcttcaaaagtcattggtgcaattcttaattacatagttacgtcttgttttttaacgcttgaaatagtgttaaaatgatggcatctgcattatctctttgctgtgtgatatttgcttattatgttttaattatttaaatttttatgaggccaccatgtaagttataatctgaatcttcccaaagatatattgtcttacattctgccacagaattaaaatgacaaaaatagtgcatctcatagcaaagacatagagttccactttacagatgagaaagctaaggcttaagagcacttagagtgatttgattcatttatgaggtaagggactgtccacgttcacctatgaggcttttttaaactaacttgtacaagccatatctctcaaagtctagtctaggaactttctctgtcagagtcagctggcaagcttattaaacatgcagggtctgacctctccctccagaccaaatgggatgtaaatggggaacaagattcttctagatgagcagataagccagatgattcctgtgcacattgaggtttgagaaaccctgaaaattggtttaactttaactgcacattagaatcgaagaaaataatttgcctggacctagactgattgattgtcactggagcaaggaggtggaggtaacctaggttcttaaagttcaccaagtgattgtgatgcacagtgaaggttaaaaaccactactctaaagtatttagaaagttttcctgtaaaaggccagatggtaaatattttagactttataggctacatctgttattccttgtagctactcaactttgctgacttagaatggaaatagccatagataatatgcaaatggctgaacagggccatgttctaacacttcatttataaaaacagctggtgggacagattgtagtttgccaaaccctacagaggggggtacagtccctgccatgtgcctcaaaggtgctgttagactgtgttctaaacctgagatgtttctagttgtttgaagtaaaggtggaaaactaccatattaaaattcaattacgggctgggcatgatggctataatcccagcactttgggaggagatcatagtgacgccacttgaggccaggagttcaagaccagcctggccaacatggtgaaactgtgtctctactaaaagtacaaaaattagccaggtgtggtggtgcmtgcctgtaatcacaactacttgggaggttgaggcatgagaatcgcttgaacctaggaggtggagkttgcagtgagctgagatcatgccactgcactccagcctgggcgacagagtgaaaccttgtctcaaaaaaaaaaaaaaaaaaaaaaaggagttccattccaagagggccaaataggaacagctctggtctgcagctcccagcatgatcgacacagaagwtgggtgatttctgcgtttccaactggggtgactagttcatctcattgggactggttggacagtgggtgcagcccacggagagtgaactgaaatagggtggggcattgcctcacccaggaactggaaggggttgtgggatttccctctcctagccaagggaagccatgacagacrgtacctggaatatcgctacactcctgcccaaatactgcgcttttcccatggtcttarcaactggcagacaaggagattctctcccgtgcctggcttggcagatccaacacccacggagccttgcttgctgctagtgcagcagtttgagatcgacctgcgaggctgcagcctggcagggggaggggcatccgccattgctgaagcttaagtaggtaaacaaagtggccaggaagctcaaactgggtggagcccactgcagctcaggaaggcctactgcctccatgwactgtacctctgtagacagggcatagctgaacaaaaggcagcagtaacttctgcagacttaaacgtccctgtgtgacagctctgaagacagcagtggttctcccagcacggcatttgagctctgagaacggacagactgcctcctcaagtgggtccctgacccccatgtagcctaactgggagacatctcccagtaggggctgacagacacctcatacaggcgggtttccctctgcgatgaagyttccagaggaaggatcaggcagtaatatttgctgctcggcagcctccgctggtgatacccaggcaaacagggtctggagtggacctccagcaaactccaacagacctgttgcttagggacctgactgttagaagaaaaactaacaaaccaaaaggaatagcatcaacatcaacagaaaggacttccacacaaaaaccccatctgtaggtcaccaacatcaaagaccaaaggtagataaaaccacaaagatggggagaaaccagaacagaaaagctgaaaattctaaaaaccagagckcctcttctcctccaaaggatcacagctccttgccagcaacagaacaaagctggatggagaatgactttgacgagctgacagaagtgggattcagaaggtcaataataacaaacttctccaagctaaagaagcgtgttctaacccattgcgaggaagctaaaaaccttgaaaaaaggtgagacaaatggctaactagaataaacagtgtagagaagaccttaaatgacctgatggagctgaaaaccatggtatgagaacttcgtgacacatgcacaaacttcagtagccaattcaatcaagtggaagaaaggatatcagtgattgaagatcaaatgaaagaaatgaagcgagaagagaagtttagagaaaaaagagtaaaaagaacaaagcctccaagaaatatgggactatgtgaaaagaccaaatctacatttgattggtgtacctgaaagtcacggggagaatggaaccaagttagaaaacactcttcaggatattatccaggagaacttccccaacatagcaaggcaggccaacattcaaattcaggaaatacagagaacaccacaaagatactcctcaagaagagcaaccccaagacacataattctcagattcaccaaggttgaaatgaaggaaaaaatgttaagggtagcctgagagaaaggtcagattacccactaacrgaagcccatcagactaacagcggctctctcgggcagaaatcatacaagccagaagagagtgggggtcaagattcaacattcttaaaagaattttcaacccagaatttgatatccagccaaactaagcttcataagtgaaggataaataaaatccattacagacaagcaaatgctgagagattttgtcaccaccaggcctgccttacaagagctcctgaaggaagcactaaacaaggaaaggaacaaccagtaccagccactgcaaaaacatgccaaattgtaaagaccatcgatgctttgaagaaactgcatcaattaacaggcaaaatacccatctaacatcataatgacaggattaaattcacacataacaatactaaccttaartgtaaatgggctaaatgckccaattaaaagacacagactggcaaattggatagagtcaagacccatcagtgtgctgtattcaggagacccatctcatgtacagagacacatacaggctcaaaataaaggaatggaggaagatctcacaagcaaaaggaaagcaagaaaaatcataggttgcaatcctagtctctgataaagcaggctttaaaccaacaaagatcaaaagaracaaagaaggtcattacataatggtaaagggatcaattcaacaagaagagctaactatcctaaatatatatgcacccaatacaggagcacccagattcataaagcaatctgggagactttaacacaccactgtcaatattagatcaacgtgacagaagtttaacaaggatatccaggacttgaactcagctctgcaccaagcagacttaatagatatctacagaactctccaccccaaatcaacagaatatacattcttctcagcaccacgtcgcaattactctaaaatcgaccacataattggaagtaaagcactcctcagcaaatgtaaaaacaggaatcacaacaaactstctctctgaccacagtgcaatgaaattagaactcaggattaagaaactcactcaaaaccgcacaactacatggaaactgaacagaacagcctgcccctgaatgactactgagtaaataacaaaataaggcagaaataaggatgttgtttgaaaccagtgagaacaaagacacaacgtaccagaatctctgggacacatttaaagcagtgtgtagagggaaatttatagcactaaatgcccacaagagaaagcaggaaagatctaaaattgacaccctgacatcacaattaaaagaactagagaagaaagaggaaacatacaaaagctagcagaaggcaagaaataactaagatcagagcagaactgaaggagatagasacacacaaaaaacccttcaaaaaatcaatgaatccaggagctggttttttgaaaagatcaacaaaattgatagactgctagcaagactaataaagaagaaaagggagaagaatgaaatagacgcaataaaaaatgataaaggggatatcaccaccgatcccacagaaatacaaactaccatcagagaatactataaacacctttactcaaataaactagaaaatctagaagaaatggataaattcctggacatatacaccctcccaagactaaaccaggaagaagttgaatctctgaatagaccaataacaggttctgaaattgaggcaataattaatagcctaccaaccaaaaaagtccaggaccagacagattcacagccaaattctaccataggtacaaagaggagctgttaccattccttctgaaactattccaatcaatagaacaagaaggaatcctccctaactcattttatgaggccagcatcatcctaataccaaagcctggcagagacaaaacaaaaaaagagaattttagaccaatatccctgatgaacatcgatgcgagaatcctcaataaaatactggcaaaccgaatccagcagcacatccaaaagcttatccactatgatcaagtcagcttcatccctgggatgcaaggctgtttcaacatacgcaaatcaataaatgtaatccatcacataaacagaaccaatgacaaaaaccacatgattatctcaatagatgcagaaaaggccttcgaaaaaattcaacagccgttcatgctaaaaactctcaataaactaggtattgatggaaatatctcaaaataataagagctatttatgacaaacccacagccaatatcatactgaatgggcaaaaactggaagcgttccctttgaaaaccggcagaagacaaggatgccctctctcaccactcctactcaacatagtgttagaagttctagcctgggcagtcaggcaagagaaagaaacaaaggttattcaatttagaaaagcggaagtcaaattgtccctgtctgcagatgacatgattgtatatttaaaaaccccatcgtctcagcccaaaatctccttatgctgataagcaacttcagcaaagtctcaggatacaaaatcaatgtgcaaaaatcacaagcattcctatacaccaataacagacaaacagccaaattgtgagtgaactcccattcacaattgctacaaagaaaataagatacctaggaatccaacttacaagggatgggaaggacctcttcaaggagaactacaagccactgctcaacaaaataaaagaggacacaaacaaatggaagatgggaagaatcaatattgtgaaaatatccatactgcccaaggtaatgtacagattcaatgctatctccatcaagctaccaatgattttcttcacagaattggaaaaaactactttaaaattcatatgaaaccaaaaaggagcccgcatagccaagacagtactaagcaaaaacaacaaagctggaggcatcacactacctgacttcaaagtatactacaaggctatagtaaccaaaacagtatggtactggtaccaaaacagatatgtagagaacagaggcctcagaaataacaccatgcatctacaaccatctgatctttgacaaacctgacaaaaacaagaagtggggaaaggattccctatttaatacatggtgctgggaaaactggctagccatatgcagaaagctgaaactggatcccttccttacaccttatacaaaaattaattcaagatgtattaaagacttaaatgtaagacctaaaaccataaaaaccctagaagaaaacgtaggcagtaccattcaggacataggcctagtcaaggacttcatgactgaaacaccgaaagaaatggcaacaaaagccaaaattgacaaatgggatctaattaatctaaagagcttctgcacagcgaaagaaactaccatcagagtgaataggcaacctacagaaggggagaaaatttttgcaatctacccatctgacaaagggctaatatccagaatctacaatgaactcaaacaaatttacaagaaaaaaaacaaccccatcaaaaagtgggcaaaaggtatgaatagacatccctcaaaagaagacatttatgcagccaacagacacatgaaaaaatgctcatcatcactggccatcagagaaatgcaaatcaaaaccacaatgagataccatctcacrccagttagaatggtgatcattaaaaagttgggaaacaacagatgctggagaggatgtggagaagtaggaacgcctttacactgttggtgggagtgtaaattagttcaatcattgtggaagacagtgtggtgattcctcaaggatctagaactagaaataccatttgacccagccatcccattactgggtatatacccaaaggattataaatcatgctgctataaagacacatgcacacgtatgtttattgcagcactattcacratagtaaagacttggaaccaacccaaatttccatcagtgatagactagattaagaaaatgtggcacagatacaccatggaatactatgcagccataaaaaaggatgagttcatgtcctttgttgggacatggatgaagctgggaaccatcattctcagcaaactatcagaaggacagaaarccaaacaccacatgttctcactcataggtgggaattgaacaatgagaacacttggacgcagggcagggaacatcacacactggggcctgtcaggtggtggggggctgggggagggatagcattaggagacatacctaatgtaaatgatgagttaatgggggaagcaaaccaacatggctcatgtatacctatgtaataaacctgcacgttgtgcacatgtaccctgtaattaaaaaaaaaattcagttacaaccaggtgtggtggttcacacctgtaatctgagcaggaggatcacttgagtcctggagtttagaccagcctgggcaccgtagggagacccgtctgtccaaaaaaataaaatttaaatgttagccagatgtggtagcacacacctgtggtcccacctattcgggaggctgaggtgggaggaccgcttggaccctggaggtcaagtctgtagtgagccatgatcgcgctactgcagtccagcatgggcaacagagcaagaccccatctcaaataaataaataaaactcagtaagtaatagagccagaattttgaactatgaataggtaagattaaaaaaaaagacattattttgtaatgtcttgtattatcagacaaggtaycagagacaaggaaaaagaaaggtgcactgaacagccaaagcaggactgacggaactcagaaatgggctgggaccagcctgggagaaagaaaacgcaaggcaaagaaaaggataaaacagccctgctgcactctggtgggactgataagaaatagcttctgtatcttggtattttgtaccttaaaaaaaattgaggagtggcaggaatagaaaacagaaacaatgtctctttggggtgagagacagaaacacgctgttcctctcagaggatgtggaaacattgatgacctctgcaagtgcaggcaggcagtatccacagctctgcatcaccactcggcgtcaccactgtgcaacccatcagtcctgtggtgcccgttcaagtyacattgtataaatctgtcctacggcatctgtatcctcaccatctaataactttagcacagaatattgtttaagaatgatggagagggaaaagaagactttgagtcaacaaaacctttgtttgtttacatttaccatatcatccattctttgtagtatatatcagaagactttcattttaggtttttaaaaatcgtttatatgtaatgagttaaaaaccttagttatccagaaacatattctgagcaacatgtttttggtaccacctgctgtcttatatatttcttgtctgcatgcttctgtatacctagtaggtgtctgtaggcagatcaccttacattgtgatttcttttaaattgggaaaaaatatatgtcctttgaatatcttatggttcagcaggggcattagaaaatataaacaactgttgtgtgatatgtgcaaaagaaatgtgaacaatgtttaggagtaatatagagaagaaaatgacagtttctttgtatagaaatgatttgaaagaataactaggattttcctggagtacatggcctgggagtagacaggactgttcagataaagagatcactatttataaattagagaggtgtgaagaatatgctcatagcaattttaggggaagtacaaggagttcagtattggtagaaagtaaagggcctggaggggtcaaataacaggagacgatgctgggaaaagaagcagaggacaggccatttgtccccactgccactactcccttacccccattaagaacccatgggtttatatatttttaaatatcttaaaatatgtaaatatctaagkaagttcttcactcctattctatcttatggagaccctttttaaagagtgaattttatagagacataggaaatgttagtttgcattgttttcactttgcccctatagttttttaaaaagcagattcactttttacaagaggaagaatttggattagtgctggatacatactgttttgacttgtaaaatgactctttaatagaaatggacaaagaaaatatgctaataaaayaacttaagtatgtgtatgtgtgtgcatgctaaatttttttttcttctgttctcttcattttgtgctcatcatcaattgctgctatttactgtggtgcatttttcctgaacacctgctgtcaaatgcatcaagtcttttcttgcacagtgctacaggtttttgcagaactgagcaagcccaacattagacagatagcctaaagactgattgatttatttgttttaatacaaatataygctmacatgttgacatacagaaatctgtttcaaatgaattattttttaaagaacaaagaactttataaccctagtacctaatcctatgcctgacacatagtagatactcagcaaatatctgtgggactgaactgctctgtgaagcctagctaagcactaaagactcccacaactttttcagctttatggggaagtgattatcttaaatagttttaatgcaaattgaattattgtttaaaaagcatgtccaccagttgaaaagtcaagtcatggaacattgttaagatccaggttttaatttagcagatattgttctctttgcagaataattacgaatctatttaaaataaatgcttttttatctttatctccctttgcacaatggagtggcattgtcaaaaggggaaagtgtctaataataagttgaaaacattgtgcagttatacttcaaagacatctcttaaattgtcctgttcaggwtcactgcctctgctattattcatgttctaatttagggcctcgaaattgtattagttgcctaactggaagttgcacttcgttcctgtgcttcttccacactgctgccagaatcatttactttcttcaacagaaaatcaagcctgtctctttcctcattaaaaacctgcaatttgctacggactgtgagataaggaccaaactccttggcattacataccatatgtaatgtaattatacctgtggattttttttctcaatctaccttcatgtccccatgtttctaagcatcctcwaccagtgcttcccaaaatttttcatgacatgtcacacatggaataataaccagatgataccactgtctgactgcctgaagtctctggcttctctgagctttctggcccttctgagatctgaaggaaacaatatcttaagcataccctctaatccattcccagtacaaccactgggaaagtctgccctacatgtgaccacagtaaaccttttcrcctcccaggaatggtttgtgcactgcttttcttctttgcttataatattcattctgccttttcacagtttctcaatctggtaaatttcccctccttgtcatttaaagcccggctcatttggatttgggaaatgtttctggaatttttttaagaatatgtgaagctctttgtttccaattaaagccttatcttaaatcaattaattttgactcttagaaattctctttccattttctgacccatttgtaataacttaattttaaggttacacctactgtaccaataatgattttgtttttaaaaatacaaataaaaatctcccttccttggctttttggaaacagtttctttcccccgtaarttatattgcccatggtttcataaatacacatctcaaatgggttacttatgtaaagggtgtgtgtgcttacttgcgtgcgtgtgtgtgtgtgtgtgtgtgtatcactactactaatactaacataaatatatatatcattactacccacttagctataytctaaagttaaaagatctcaaaatacttcttgtgaaaaggtttactaagcccaaagttctaagagaaaaattatgaaaattggtttcctttgtttaacagagcctattgcttattttaagggtaattgatcttttgttttgagacagggtctcaccctgtcacttaggctggagtgcagtggtggatgcctccctaggcctcaacctcctgggctcaagtgatcctcccacctcagctgggactacaggtgtgtgtaccaccacacccggctaatttttatgtttgtttgtttgtttgtttgtttgttttgtagagatggggttgcgccatgttgcctaggctggtctcaaatgcctgagctcaagcgatctgcctgccttagcctcccaaagtgctgggattacagttgtgtgtgtgccactgtgcctagcctgattgattttgatctctaacacattcctctcataactatttctgcttttccaaaaaagttttatgtatgggttaggtaaatgtttctggttttatctcattaaatgattggcttttagtatcagcatgaatcaagtataatttgactyacctcatccttaaattcttacttaatttggtaattattgtgtattttatcattttctactagtgtcttagcctgttgatcaaagcttgctgcagttagttgtttgcgtgttgatctttctctactttttagtgttcttaaaggtaaggaccaagtcatatgcttctgtattttcctcacagtgctttgcamaaaaaaaaaamattgtctagtaggtgtctttttagttacttttaaagtatcttgtgggtagttaagacttttttattcaaattttatataaaatctgtttttgttttctgatgcctgttcagcagatgcttacccagactgaagtagtttacattctttttcaatgtcccaaaagcttaattagcaaataatataatgcagactgctccttgcataggctctcatggattttacatactactgcttattttattagtctctaaagtcattcttctcccagtgtaattacacttttaaaaattactaaattgcataagagatattatgaaatcgtattcctggaacattgagaatttcaagctttaaaagacagcagctaaagtcaaagatacagcaacattttcaaaagttagctttgtacatctcttggctgagtaatgtgaacccacacatggaaagatttaatakatacaggaatgttctgggcctctgtaagagctgatccctctatcaggtttctgtgcagacaagcatgtttcttctatctattaggaaaggkttatgaattgagcatttcagaggctatggtaagaagcagggagagaagggggcaagtagagaattgctraatatcaattctttttaaatattgagatttagaaataaaaatcaagaatctgtattttgacttgacttttcaatctattattctaacctcgtagctcattgttccatttattcaaagaacattaacatctgccatatattaggaattcagagattgctaacattgcctatgttcaaggatctcataatcaagtactgaggataattatacaagaagagtaatcactataatagcatttaatacttactgaagcatacatgccatatgccaaacactgagctaagcacattatatcaatatagatataaaaacacctgctgatttgtccaaacacacagctaataagtttttgagctagaattttcctccagctaagctgattcttttgccctcacttttaaccttgtatgccaaattacaagtttaaaattcatttatgtacttggaagagtcatagaagtttcaataaaagagaagacttttaagctgagacttgaacaagaagtggagcttccctgatagacaaagagataaaatgtcattctgagcagakkgagaaatatgtgcgaaaacagggaggcagaaagcagcgtggtgagttttactaactgggtgtttaggtgctcctaagcaagtccaagttcaagtatagcatttcaagtttctatgattttagtgtaactcctatcttatctacagctccttttcttttctcacagggtgagaaatgctatacttgaacttggacttttttctttgatgtgcaattaaatgattagaaaataggaagttaaggtatttgcagttaaartgatcacrttagccatgatgtagataaagcaaggaaaaagaaggaaagaataagactgcaggcagaaaaacaactagcacagcagttatgatattctagacaaatgattgtgttggcttgatatcactgagtaaacatttattgggtgccttatatgtgccatagctgagcttacagtgttgaataaaatgaatatgattcctgccattacatacagtctacaatctgttgggaaagacagacagtaaacaaacacacaaatacacaataaagaagaatgggtagaagtgacaggtttaagagagatttaagtagtgttagccagrtctatgcattagttggatttagaggaagaaatagatacctagaataaatccaaggtttctttgagataattcagagccgttaccaaagatccacctttctccctggtttctggaactattctctccatgaatcatgattcattgatatgtttttattaaagtataaaggctcagtgctgctttcctttcctagaggaaggcactccctatatacacatacacacccttgttgattattttaaatgaatgggagccaatgggacctgatttttcaaggtgtctattttaatacttttgtctgaacaagtatttctatgttaatgaaattagatttgagcatttgatagaacatgaaactataagtgttgaatttcagaatttataaaaaagaaaaggcagccttataattgtggtataaggtttgatagttaagactccttcatgtgaaataccagatgttttgagtccttgatataaaggtcagaagaaaagaaggatattggtttcataataaaytaacatgtttacagtaatgactatgcagtgtaagctgtggatattttgttatataagaatggcagggggtcctagaactgggggctggaaggcccatttaaaaggtcatcyaatacgataatttttagtctggagcacacaagcagagttcaggtgaactccctggaattatttgcaaaattgggagtatttttygtatgtatagtttgaggggaatttctgtcaaatgcacataggcacctgtaattaaagagccgccttcattttcacacatgaggaaactgaggctgttacagatgtagagacttgcccaaggtcttgaataasttctcagaaagggagtttgttctatgatttgtgttttttaataaagttttaatggacagaccacgatatccaacatggccttggagccatagggttcagaatattagaaagccttggcttcttttttcattgagttgtcatatagtgattttaataataatagaacatgctattattcagaatacattcttccaccctaatatcccaaaacagtatttttaaagaaattctaggaagggtgtttactcattcagagttctacaggaaggaaggctctttcctactattttttaagcataactttcactgacaagaccaggccagaaaaagcctagctggctgttggcccagacaatgttataataatcattgaagtatactcaacctgcactgcctgaggatagctacagctaaaaaaaataaataaataagcacacacagatgtatgctgagtgttccagtgacttagctgacatgtatgctgtatatcctttgctgtgttcyttcaactattagaaaggaaattttaaaatagcctagaatttattattccaatagggtgaaaaggacaacttcaactttaaaaaaataaccaagctctccaaggctgtatccccagcaagtaaatcaatctggcatatagtagatgcttaataatttttttgatgagagaattgttgaagtttgttagttatatttcagaaagagaattttgtttgttcatcaataatgagtatcatgtagtgtcaaaatagtaaaattaaaaaggactgcttcaacatttagaaaccccagatttcagcgcagtttctgtaagttattgtacgaccttgggcctcattttctttgtcttaataaggatataataatatctaattcccaaaatttgggggaatattaaatgagctacagtatgtgaaagatgcttcatagatccttaagtgctatataaatattaatgttatttgtcttagataacattttcaattttttaaatatgtatttactgaaatcatctttatttcctaagtcctgtatttgttttaggtagaaagaagtgatttccatgattgaaatggagttttgaattctttgataaaatacattttaaggtrtacagaattgtctgcaaagaattaaaacactcatttttaagcaagggaaatatatttattttatgattttcctaattgaatttttgccagctaatttgtacgtaagttaaggattgattgatatatatttgatagacaatcaccctcttctaggtattataacatatacaaaaagtatacaacagcattttccaaagtggaaaagaaatattagtttttgagatgttccatgattagagtttgggaatttaaaatagaatttttacatactaccataggtttctcctagatatttttattacccattaatataatttccaaaaattccttcatatagaaacctatacaaaccttttattttgtttctacacagtgttatccaaatttatttaacaagaaaacccttttttccattacatttgttaacattcactcgagtattttataaagcactggtatgagatatgatgatatgaccccatggatttgaacagtctgtttggaactctaagtatgaacatggtgaagtacattaaaacaaaacaaaacaaacaaaaataaaacaaattaactatgagattgtgaaatggttgtaatatatgtcaccaaattcatggctaaatcatagaaattgatctgtcacagcttgttaaataagtattctttctcttacatgacttcttacrtgattttttccaaactgcttagtcaaagaagataatctttccagatagagaaaattttaaaatatctttattcctctttaaatttactgatttataaatactgggagtctaacaaatgcaagttactactctttattaatcccttttatttagtttcagtttacacacaataattgtatcaacttatatgtacaagtcaattaatttagacttgtgtaaacctgtgaaaccacctctgcaattaaggtgcagaacatccccatcaccctcaaaagattgcttttgcccttttgcagtccatttttccctcttcctcaggttgcagtcaaccactagtctgctttttgctactatagattagattggactttgtaaatattttatataaatgcagtatgtactctcttatgtctgttctatttgactcagcatgatgagactcatgcacattgttgagtgttcagtatttcctttctattgttgagtagtattccattatatattttgactattcactcataagttggtagacatttgggttgtttacaattttactattgtgaataaagctactgtgggctgggcacagtgactcacacctgtaatctcagcactttgggaggccaaggtgggtggatcacttggacatgggtgtttgagaccagcctgggcagcatggcaagaccccatctttactgaaaatacaaaagaaatagctggggctgggcacggtggctcaagcctgtaatcccagcactttgggaggccgtggcaggcagatcacctgaggtctggagttcaagaccagcctggccagtatggcaaaaccccatctctactaaaaatacaaaaaattagccaggcgtggtggtgggcgcctgtaatcccagctacttgggaggctgaggcaggagaattgctcgaacccaggaggcagaggttgcagtgagcaaagactgcaccactgcacttccagcctgggcaacaagagcgaaactccacctcaaaaaaaaaaaaaaaatagctgggcatggtggtgcatacctgtggtcccagctacctgggaggctgagaagagagtatcacttgagtgcaggaggtggagattgcagtgagccaagatcacatcactgcactctagcctgggtgacagagtgagactctgtctcaaaaaaataaaatttgtgaacttccatatacaagtctttgtgtagatatgggttttttcttcttaggtaactacctagattatttcacaataattgggttgttatgatgtggtgggtttaacttcttaagaagctgacaaatagctttccaaagtggttgttctattttatattcccattaacagtgtatgtaatttctagttgctccatgtccttgatcggtctttggtattgttagtgtctttaattttcatcattcttataatgtaatggtatctcattgtggcttaaatttgcattgatctgataactaatgatgttaagtatcttttcacatacttacctcacaaaggaagctgtgtggttagcaagtatgttcaaatttttagtccagttactttggrttattttcttattattgaattatgaggattctttatatattttggatacaagccctttgcaaatatgcatattgtgaatattttatcccagtctgtgacctgtcttttcgttttcttaaaggtaccttttgaagagaaattttgttttgatttttgtaaagaccagtttgtccatgtttttcttttatacttctagaagttttrtagttttagctcatamatttcaagtttatttttcagtatggtgtgaggtaagggtcaatgttcatttttttcatatggatttctagtattcacagtaccatttcttaagataatttcctttttgagtgccttaaaatcagtatggacttcctttttctattttatttatccgtatctttatcctctagatactctcacactatcttgtttctttagcattataagttttgaagtcaagtagtgtaaatttttccaatttgttctttttagaagttgctaaaagttgccacattgcctctgtagatacacacagagagagatttagacacatacctctttttaaccactttgagataattcacataccataaaattcactatttgaaatatttaattcattgatttttagtatattcacacatatgtataaccatcaccatagtcaattgtacacatcttattcatgctttctcctattaccaagagcaatgtctgggatgtaatacatgctcaccaaatttttctgaataagtgaatccattagttgtaaaataatgtaggcattagcctctagtaaaatattaagaaggctcatttgactgcattcagctctagaactattcttttattagaactctgctattttgagggatctctgaaacagctaacagcttaactcagatatagatacagatatatatatatggctacagatttttttttttaaatggagtcttattctgtcacccagactggagtgcagtagtgctatcttggtttactgcaacctccgcctcctgggctcaagtgatcctctcaccttagcctcctgagtggctgggactacaggcatgcaccaccgtgcccagctaatttttgtatttttttgtagagatgtcgttttgtcatgttgcccaggctggtctcgaactcctggactcaagcagtctgccctccttgcccttccaaagtgctgggattggccgggcaccgtggctcacgcctgtaatcccagcactctgggagaccaaggcaggcagatcgaacgcctgaggtcaggagttcgagacaagcctggccaacatggtgaaaccccgtctctactaaaaattagccaggtgtggtggcatgtgcctgtagtcccagccactagggaggctgaggcaggagaatcttgcagtgagctgagactgcgccactgcactccagcctgggtggcagagtgagactctgtctcaaaaagaaaaaaaaaaaaacaccaagtgctgggattataggcgtgagccaccatacctgtccttaaaccatattttagtagttatttaaggaagttacaaaaaaaattccttttgatataatgagtgcaaattatttgcrcatttttgaaaagagaatagtcatcttttattcacctgataattgctgagaagggcaaacctcccataagtactgcttttctatttttttttttttttttttttttgagacagagacctcctgctccacccacctcagcatcccaaagtgctgggattacaggcgtgagccaccgcgcccagccttctattttcaaaagtactcttgacattgtttgtatcggtgacatagattatggaatctctggtacttgttttatttaccaattacgaataatagtggattgttcgtgaaattccagacatctttccctaggtatctttgagatggaatgtcagttctgagcccagttaattcatgttgcctcattttctttataggctttgatgcggcctggaagaattgatagaatcatctatgtgcctttaccggatgcagcaacaagaagggaaatatttaagctgcagtttcactccatgcctgtcagtaatgaagttgacctggatgaactcatccttcaaacckacgcatactcaggagcagaggtaagatagttcccttcaaaataccttagtgggaggaaagcggtggctcagggtcattaagcaaaataaattgcttgccctgaggtgttttaaatgaccatactaagaaatcttgaaacaggaagtgcagtacatgacatagtcactaagttaaattgcactttacgtggcttctattatatcacaattgttttttacttgctcctattatttctcaaaatgtagtcttcagaggaatagcataatatagtgagaagaacactagactagaagtagattcttccactgggcttcttaatacagcagtttctaaccaatcacacacttctctaactttgcgttctttacccatcaaatggaaatgatactactaccttccctcctgtttcctcatggagagcatagaaataaaattaggatatcatgagtataaagggcaaagcaaacagattgtatcattatcatctttttgtcattttggcaagttatctcagtctaattttgtattaaacattctctcacagtaaaagggaccatctgcccttacctctgaagataaactcttgacaagaacagcaagacctctgtgaaaatatgaaaatgacttttatgtatggcagattaacattttttctctccttaccaactctttacttatgctatttttatttaccaaataaaattccatgaaataattctgcaacttttctagctgcatttcttaaggaaaggaccaactatgtacctcgacacagaaatagcatctgtcacaccaatgatgtagacttttaatgggagattaatatttttttaagtacaaggttacagattatttttattctgaattactcagtaggctaggactccacattctgttttgcttgctattgttttcattcgtcttatgtaaacaccgaagagattaccatatgacagatcattagtggtactccgagagtctatttggaactgaacttagtgtatcatgcagtcatagctaataacaacaaccaaaataaatcccagatctattcattgttttgccccaagaaccatagatatagatatagacagtccccaacttatgacagtttgacttaagattttggggctttacaatggtgcaaaagtggtacacactcagtacactcctcaacttacaatacagctacatctggataaatccatcttaagttgaaaataacaagttgaaaatatcgtaagtcaaaaacatatatgcatttttgacttagacatattcaactgatgatgggtttaccaggacatagccccatcataagttgaggagtatttgtatttgattttcctcctttatatttttcaagtccactggaataaaaagccatgtggaaagtagcttgagaagcagttgaagtgcgctcacctttaactcctctgaaacagtgatctttatgaccatccataaagttaaaatgaacatacagttatggttaactgactgctccaacatttctagaattcagtttttgatttgagacgagggctggcatcttgtatgatgatatggcaatttgcaggaaacagcaagaggaagacgaagaaaccataaatctctcacttgagccgagtaaactagaagagcagttagcaagatataaatatgcctttctcactttgaagtaattcatggtagtaacatcgaagtgcaaaacaaaaataaaacccagtgagattctatctggctaaaaggaaaaaaacctcatttggtgccagcaattattgtactggcttgctaattcttatgtagtgcacttcttatttaatctaacatgtaagcacatttatgattaatttttatatgagatcttctgaaaatcgtcacaggaaaagtagcagaaaattctatctttcctcaaattatattkttgtgttccataatgcttggattggggagggcatcccattgtggtcctatttataattagtatattattacaacttcatagaaattttgctaacagctacatcttagtagttctgtggtttctaatttagatgaggcaggtttgttccctgttgagggtttttgttttgttttgttttggtctgaataggtaggcagttcacacagttgttttaggaaaattattatttctttaaaagtcttaaagttaataaacaggagatttaggagackttaaktaatgcttaagataaaaggtttcatttctctctctctgtttctctgtcttcacacagaaccttctacatggtgtgtgtttaacaagcacttgataaactgtggggaaaaaagatttttaaattagatttaggaaaaatagacttcagttctcatttgttacaagaggagccctctaactccctgctgtagacacagccattttctcagagttggagtgtctctttggccactttgggtataaaaatgaaactactatcaatttattgtcctcacaagagaatagtatattatattcaagattatataaaattaattttatttaagtgtatactattagctatatgaacaagaatttgggcaggaaagccagagacgaggaatttcctggcactctaattgttttttagaaacaaaatgttgaagtgtagtgagcattttttatttttagtgaaaaagttgtagaggatgattaagatggaaatgatactggtactttttttttttttttttttttttttgagacagagtttcgcccttgtatcccaggctggagtgcagtggcacgatcttggctcactgcaacctccgcctcccgggttcaagcaattctcctgcctcagcctcccaagtcgctgggattacaggcacccaccaccacgcccagctaatttttgtatttttattagagacagggtttcaccacattggccaggctggtcttgaactcctgacctcaggtgatccgcccaccttggcctcccaaagtgctgggattacaggcatgagcctctgtgcccaccactggtacttttaatggcagggatgagaagaggttactttaaaaaattattttcttttcacttggttatttattttgcccaatcagcattgttctatgaaagcttagaccagctcagtgtttgaaatagctccttctggtcaaagttactccatttttccttcgtggagagggtatacagagaattgaaacacttttgtaagcctcaggaggctctcaagaggaagtctgtcaccagctggaaggggaatacagccgttagggagcagcctctgaggggagactgaagcaggttgcgtcttttagccatctctgccacctgccactcattgtccctgtggctatggccctcattgtcctggcttcttgactgtagctgtcagttaatgaaaaaacatgtgccatttaaaagcagaagggaatttctctcaggaggaagtaagtctttttggttatcactattgttttcttttgctctgatttttgttttttaagttatttgtagcaattccacctcatttattcatttatcttttatcaaattatcctggttacttttggaagagttttatctgtaacagaaaatcaactgtcacaaatatatttacaaaaaaaagcaataactgggctcattaccccatatgccctatgcttgggaacacaggtgatgagtaagatgcataatttcttctgtgtatcagaatttgctgacataggccaaagactgatatctgtaaaattggggttgaatttttatttgaatttggatattatcctcctttcagtgaatcccttgggatcaccaatttgtgagggagtcaggcccttcttggccagtttgtaaatctcctcccttacatcttcagaggccagcttcagccaagtggggacactgcagtgacagggaggagccgattgggacaggcccttcctgggagcaggcatgcaactcatgatgtggcagtcaggagcaaaaaaaacacctycttttctttaaaatgtaaaaatttgcttactatagtggtttttttattgcaatcttatgaatgtagctctagaagatctttttaaagcaattcattagagttaaatacatttcacactgagttttcaaaaagctttaacttcatgtaaacttagtctgtttgttttatttttaaatgatctgtcatgccctgaattctgttttgtagtctatgccttcctgggtctaataatagcacaagatcttcatgccagcttgacatttaaaaaatcaccttctagtttgcctcattaattcaagaagggtcctattcactatgcttgagctattatagctaataaaaggagagccttaaattacttttctgtctcactgattaacgttttttctgacatctctttttctcccacacagtgaaaacagaaggagcaattatagccacttaaaatgtctgtactcttcttatgtgaaatctcttgtgatagtattccccaaactaaaatatcagtcattgtattagaatctggcatagattgttcatctgaccagtcaaacaacacatgtgagataggaataaggattctaaggaaggaccatttgacctggtcttaagcgctctacttattattgttagaaagcagctagcagcagtgtacttgtctccaaagtgaagcagagcagcacagtacttagcactctcctacagaccaggggtccccaacctcctggccacggaccagcaccagtactgcatagcatgagtgagtggcagacaagtgagcattactgcctgagttctgcctcctgttagatcagcagtggcattagactctcataggagcacgaaccctattgtgaactatgcgtgcgagggatctaggttgtgtgctccctatgagaatctaacgcctgagaacagtttcattccgaaaccatccccccaccccatttgtggaaaaattgtcttccacaaaaccagtccctggtcccaaaaatgttggggactgctgctatggactgtctgcaacctacttttcctgcctaatcagaaactgccctatgaaaacatgctgctatcaccaagtagtctactatatttgagatcttctttgctatctctctattcttccttgtgtctttacactaaaattctgtatctgtgccccagaatttcaaaatactcagtgctctgtatctgcaagttccatctgcaaattcaaccaactgggaatagaaaatatcagaaaaaagcaacaaaaaataacaatacaacaacaaaaagtacaaatttgaaaatatagcatgacaactatatagcatttacattatgtcagttgtcataagtaatctagagatgatgtatacaagaggatgtgcacaggttatatgcaaatactatgccattttatataagggacttcagcatccttggattttggtatctaaggggctcctggaaccaattgcccttggataccaagggacaactatattctttccttacacgacctactgaaataactactttgtcattaaaccataatgaccaccccaccaataaatagcctattcttttgtactcttttacacttatttttgttttccttgtttagctgttaccatattttgtagttattttatttttttagagacagggtctcattctattgcccaggctggagtgcagtgtcatgatcataccttactgcaactttgaactcctgggctcaagtggtcctcctgcccaagcctcctgagtagctcagaatagaggtgcatgccactgtgcccagctaatttttttaaaaaaatttgtagacattgtcatgttgcccagcctggtcttaaactcctggcctcaagcaatcctcctatctcagcctcctaaagtgttgggattacaggcctgagccactgtgtctggcctctgtagwtattttaatatgagcagctgcctcatctccccaaacacagattctctagggcagagatcagttcttgtacttcttaaagtctggcaaaacagctgtctcacacacactcggtgggcattaatattagatgggtggtacatttatgtattgattctaagtcattttaccaaccaaaaatgtcagttttaacatttgctgaagtggcactttctagttttaatcatattttcatatacattatctatttgagtaccctaactctatgagagcagtgctgtagcgaaagaactaaagtcaagcaaaagaaattggcttgtctgagatcccacagcaaataagtgacaaacctgggaccagaaaccaggtctctcagttccacttgaaggactccacgatctcctaatgcctctgtgtcaacacaacgttctttgaaactttcatagttccctttgacgtctctgaatatttgataaaagtttgtcaattcctgtgaatagtgacttagcaaactaaacagcagttatgaaacatctgtaccatttttatacctttttctcttacagtaattgtctttacctaccttgttttcatcttctccaaaaaagtataagctacctaaagttaggaaccttgtttttatcaattaatttcttttatttcctaggtattgtgaataatgtttgcaatttagaatgaaaagtataaacaacgaagttttatataatgtatttatgtggcatgatctactgatgtgcagaatgctataggagaaaggaggaggagtaactcacactacctgggattaaatgagatagatgatacccagaagaatttttttctgagttttgatgggcagatggaaaggcagagatgaatgaaagaacatggtgtggtctaaaatcagttaaagtttgaatatgattggcagaaagagtcttcatgtagaagtagtaggggatgaagcagaaaaagtaggtcagacttaaatatgaaggaacttgaatatcatccgaacttgcttttctcctttcagcaatggaaaaccattgaaaaatgtgatcactgttgtggtcagatttgtattattgaaagatttgtggcatttgtgtccaaagccaccactagctagccttccaagcaccattacacgaattagaaaaaggtgttccttcaccccacttggtgacagctttttgttacagcaaaaagcttgtcagagcatgagcaacatttcagcccctatttgccccccttggctgggcacccttttgtagatacaagctttacatctgtacaaggtgtcttatttttgtcttctccacctttatctccctcacaatgcctagcatagcaccttatatagagttattgtcaytaaataaacaaatggagaytttacatctcaaatatataaactactttctgtaactttaacatttacctcatgagcccttggataaaaataaattgggactattaaagatgtcttttgtagaagatacagaaatggccaacaaacatgaaaaaatagcatcactaatgatcaggaaaatgcaaatcaaaaccacagtgcaataccactttattcctataagaatagccataatcaaaaaatcaaaaaataatagatgttggcgtggatgtgctaaaaaggggacatcgttacactgctggtgggaatgtaaactagtacaatcactatggaaaacagtgtagagattccttaaagaactaaaagtagaactaccatttgatccagcaatcccactgctagtatctacccagaggaaataagtcattatatgaaaaagatacttacacatgcatgtttatagcagcacaattcacaattacaaaaatatggaaccagcccaaatgcccatcaatcaacaagtggatacagaaattgtggcatatatatacaccatggaatactacttagccataaaaaggaacgaaataatggcattcgcagcaacctggatggaattggcaaccattattctaagtgaagtaactcagaaacagaaacccaaacatcttatgttcttactcataagtgggagcaaagctatgagtatgcaaaggcataagaatgatacagtggactctggggacttgggggaaagggtgtgaggggagtgagggataaaagactacacattgggtacagtgtacactgcttgggtgatgagtgcaccaaaatctcagaaatcaccactaaagaacttatctatgtaaccaaacaccatgtgttccccaaaaacctattgaaataaaaaatgaaaataataataaaaggtcttttgtgcaaactttaacctgccatgaggtacagcacttgttgtaaattgctagaatattaaaagtaaggtggattatatcctctgagccatattatgtaactttgaatataaactctaaggacaaaagcacaacctctgcacctgtttagtggctaaaatatggctctctgttgtaaatgaattatgaagggatctttcagagcaaaaatcagcatgtgctaaaagtagatatttaggactgtaacttttgagctagtcctgtaccactccccttttcccttcttcagcattttatgatctacatgctaagtgaagaaatttggtaaaagccaagacccatcatggccacctagaacaatatgagtttagccaaatcatttatcatttgtagaactcactttcatcttgtaataaggggataggaagatggtctttttataatcctttcaagtgttaaaaatctgtgtggttatatacctgtcataaattaaattaattgtataaggaatcccttagggattggacctccagggatatgtagtatggttatgcttctcttacagtctgtccagaaagctgggatcttgggatcttagtcaatgcctctaaatattttcttctgtggccaaaagatattaattatggcaccagaagaatggggaccttaaatgactctgacagtgcacagaacttggattttaataaaattctccttagcaaactttaacagttttccactaagtagaaaagaaaattttacatgctcagagagttgaaggcctagtgatttttttaccctgagatctttggttgttatgcttttcaacttccttaagaacagctaatcaagttcactatctatgattttggggatacttggataaaaagcgttatagaatggaaatatacagcagccgactttttccttaaactctttgttgggaaaataaatgaaggttgcaaaattataatattgttcattttaacttaacaatttttaaaacttcaatgtatggagatacaatgtacttacagtgtatggagattctctgtatttccaaacttcaccttctgcttaaattggcaacaaaagtacattcagcttacctgaaggctattttagataggatgtttacaccaaagctaatcatactccagaacaccttgtgctgccatacctgtattgctaactctatgccaggtatttaaaagtgctgtgagtttacaagaagtattagtcagaaaggaaatggatatgaatgagaggctggttagcaacaaacttaatagaactttttacacccaaacatggaagcctttttatagggaagaagtatatccagtgaacaagttagtcaggacctaccagataatctagtccccaaggctgatatccagagtaaatctgtatctgtggagaattactcaagccaatgataatgccgatttgagcattttaacattccaccttatttctcttcttccaaattctcagtctctctatttcctcattctttttctccaatattttatataaaccatttaatctgtgcttcctcatcttcagaagagtgataaaatggaggtgggggttaggttctgttaacctgagaggagcttatgatgttaaaaaagagatgtgcaaagcatgctgttaactctgtagcatagattctgatagtgacagttatttttgtttggttatttgaagtgatggaaggctgatttctaataacaacctaatctgtatatgaaaagatacacatgtaaaagctgtttctccttttaggaactctttttactatatgaaattgaattatggttaagtaccctgggttatggaatgagaaagctgtgaacccaaatgccaagtcttccatttcctagctatgtgacctttttattcatatgtaaataaggataagagaggtccttaacttcacagttgtccagattagatgacataatttatataaggtgcttatcctagtaagcatataacaagtgctcagtaaataaattttgttataatcagcaaatttaatttgatatctagtttaaaaaatctacaatttgcctaattttttcacattgtgttgccatagattttatgaatactcataataaatgtttcatgtatatgtcttgtttttagttttaatggtgtgttctttaaactatatttcatagtttacatgcagcatttatttcatctgatttatatttataaacatctgtaatcctatttttattttttccttgttaaagatgtatactattttttacttttcaaatgtgtaaagctaatgttttacactttcaaatgtgtaaagctaatgtttttttataaactccctgtgtaatatccctatttcggcatattctttagttaattgctactttctcacctatagcttattcctaactttttttacatgtcttgttaattaaaaagaaaaaaatagtaacccaactttagaaagttgagggtttctgtgtccactagaataattgtttaggaaataagcatacctcattattttgctctttctttgaagttaggattggaccccagtgtttaggtaataaggctgagaagtctaatgctgaggacagtagcaccacatatctgttattcagtgtatgaaagacacaattgacatgttctcgttcttcatccccaaatgaccataattctgagaagagttctgaaagaagtcattctattagaatgttattaaactttataaaatggttgttcagagctgcaatgcagtggttaccttgttcttaaggaaaccctccactagtttttggaaactgaagaacagaatttaaccatgccttagactgactagaaagaaaagtagaaagaatttagattcatagggttttctctttttattttatttgtgtttcaaatttccaaagattatttctgatgttctttaataatagctcactccctatttactattaaattctggaaaatgggttttgcttttatatttatagcaaagtttccctgtttaggagcaaaagaactttaggtatagtaaacatgctactttaccattgtggaagttccacatcataaattagatattttcccttttccttcaaaatgaagtcacactacttttggcacttggacaggacaatctttcagtgacagcaaaattagccttttggcatatttttattcactttgaaagaatccttaaggagcggttttatgattgaaagcaagaattgtatttactttgcctagggtaaatttcttgcctgaatatgtaaaagaacgtaagtcaaacactgttagataaaaacaaattagtatcaaaagatttcattataataacttgtctatattttatgacataaaatagtatataactaagttctgtattattttgaacttttatttctgctactaagtagtgatacatcttgaggaactccaaggggcctaaacataagtttacacaggtatttgaagaatcagttgactcactatctgaactgagtatgtctgtaaagctatgtttaaatatatccctatatttaaactgatcatggcttataagctaatcacccatgaagagtgtatgttgtctttcttaatgccagtatgttagacaatcaatatataatttatgtttatattaatagacacacacagtttccaattggtatttcgatgcctctttcctaaatatgaattgaaaactaaggaccactaatatttgaaaaaagctaaaaatagacagtctaaaacaagcacagggaggatagacataattagggagcagatgaaaagagagacaagaataatatggccacaaaacaagcaccagaagctctaaaatagaaggctcaattgttccttaattgaaaatgtaaaacattcaggtagaaataaaaaataaatggaagaattggatgatcaagttgmaagtctcccagaaagtcaaacaaaaagacaaagagatgagaattgtagacatggtaacatctgactaatagaggtctcagaaggaacaaagaaatcagaagagagaaaactatcaagacttctttccaagatttgaacattaaatttctagattgaaagcctctaccaagtgtctggcctcaaaccatcacattcaaaggactaaaaatttggagtgccacaaatttatcaacagcagaagctgtacgacaggagagctattcttgaaatttctgaggggaaattatttccaacctagagttctatatctagccaaaccatgaaatcatatgtgaagatggaataaattcattttagacatgcaagacctaaaacatgtttatcttcatgcatgtctttttaggaagttactagtaaatgtgttccaccaaaaaaacaaggaaaaaacatgggatccaggaagcaggtcgttcagcacatgagaatagtgaagagaattcccagagcaataaagagaaatcctggaaaagatatttttaagcttttctataaatctggcaaggaaattcattcttatcaagttgtcactatttgactctatttttcaattgagaataaataataagaaagactagtaggtgaaaattgaatcagccacactgggaattataaaagcaaagtattgtctgaagaaaccatcatatattcttttcacctctttattccaatccagaactgtttctccatgaaagctttattttagaattcagtgttactgttttctataatttttaaaacttcaaatgtgtagttcctgaaatactttaatagcagaatctttcccctccatcaaataaagccgtatgtgggaagcctattatattggatctactttggtggggtscctgtcctgcatgcctcttcctcctgcccgggcatgctgcatcctgtgaggcaccttggagattccacagagcagtttaaaaactgttactgtagcaaaaacactgctgaacacatggcttcattcttatttctcagaaacataacatgagtacccattagtttcatgaactcacagaaacaaaacattcttgtgacatggcttgcatagtgggttgtatacctgtgtatctgtgaaatgaacactaaaagtccatcttgacaagtttgcacctatctgaatatattagtttccttttaaatgaaaagtcattgccttggtttcaaataaaaattggaacctctagtttttacattcctgacattttaaagtttgaaattagtaactcatgtttcttttcccttgtaagtatgagctgagacaaacatgaagcaccaaaatagcactgtactttgggtgggggaacctgcatttcaactgctccttgtaatacatccttcgtcccccttaatgcatcttttctttttccgatgtcacctttgtaaaagaagctgttcaaagatgtatagtttgttttgttttgttgagatggagtctcgctctgtcgccaagctggagtgcagtggcaccatctcggctcacggcaacctctgcctcccgggttcaagcgattcttctgcctcagcctccggagtggctgggactacatatgcccgccaccacgcccggctaattatttgtattttagtagagatgtggtttcaccatgttggccagggtggtctcgatctgctgatctcgtgatctgcccgcctcggcctcccaaagttctgagattacaggcgtgagccaccacacccagccagatttatagttttaaataactttccagatataatcttttctggtaaataaaactaagagatagggctaaaggacaaaaacagactaacaatactacaggaatttgactttttatgtagttggtcattatgggatgtctgtcacatcagaattgaatcttcctgtgcaccatgaaaatgtaaaagataaaatagtagagcatgacaataactatttagtctgaaaaatgatttatcattggtggatatttaaaaaatgccaactctgtgrcctttactacatgtataccttctgtggggaagggtactccctaactgaacattttgtgaattgattaatgtttaatattgatttgcaaggcttagaaatgtaatgaagaaatagctataaaccttgtgtgctttgtgcatcaaggaatttaggtgcatgttgctttcccatttacttaytctttttaggttcttcagcgaaataatgcaaaaaacatagctcatggaattaaagaggaatacttaagcaggaaaaaaaataaagattttaaaaagaaagaggaatataacatcttaaaaacctcaccttttatatccttacttataattttaagaattgaaaccttgagcaagtgcctatcttggcaggcaaattatttgacataaagtttgatcaaagtacaattagaagaaaactcagaatcatagctggaaatgttattatcttcttaggttcaacctaaaaagccagtgtacatacaggttagcatttcaaactcaaaggatttgttttcatcttaaagacgatgaaaggccagctacgtttagaaatcaacagcaatccatcatttttatccctcagtcattctctaagggtattttttgtgacacctatgaagaagcaaagccatgaaggtatatcatatatgccaaattttcactactgatgatgccattgtagacaactgcagaacaatgctggagactgaatatagcaagaacaatgctagagagtgaatatagcactccagaaaagcctctcacttaggtgccaagttcaaggccaaagaattacttagatattctcagggaaaacttggttatgtacaatatcatgaacatataaacttcccccttcatgctcatttgccgtttaccaaagataaattgtgatttcccaactttgtaagaaaataatagttggaatggcttgaggatgttcttctatgcttttttgccatcttctggttcttttcacttgtgaaaacagtatcaatctgttggggttttttcgttttgttttaattagatgaggatcattttattatcaagaattgaaggcttctgtgaatttctgccagcagggtgatagctgccagcagtgcacagctttggtgtgaggtagtagggattccatgtggatattgtccctagactaagggaaagccccattgctgtggcttgttcggtgattctgcctgccagccccattttatgtagcttatcatgcatggttcatggcttgtaggatgtttattcctctgggttaagttttcctcttgttcttctttggtttctagctgacttacttgtgagagcagaaaattacctgggtgcttgagacccattgttcaygtgatggaactgtgatgcacatacatttgaatacatttaagttttttatttgccgtttgtaacttacactggaaagctaccctggtcctacagttaaaattttcccctgagtattattcctaatatgttttttttttcatgccccaaaatgatgtttataattcacattttctcactggcacatgagtaagatttacttacgctggttttgaaaggtttagaataatcagtatttcacttgctaagacttgaaacattaacaataatacactgtaatacacagtgaaattctttgaggaaaagacaccaatgatctttcctattaacttataaatgcttccactgatcagcaaaggtagttcaaaatttcatcactcagtcctgatgctcagataataccagagtagtcagggtgacactgttgtgcttctgactggtagaaaatgttttgctttccatttttcaaagacagttgttgacagataatccattctctttgtgtatgtatgtatgtaatgaaaatagccaccgtgagctcagtaaacccctccttactaaatgtacacaaaagtccattttcagrtgtttgttatttgtgaaacttggttatgtacaatatcatgaacatataaacttcccccttcatgctcatttgctgtttaccaatatgattccccttgagactccagcattaggtgctatatggctgtacaaattggtttgggattgctttgcttacagtcatctcacctcagaaccccacttagcagtttctatgattctcagggaaagtgcttcagcagaagtagacctttaggaattagagacaagttacaaccaaaggagggacattcacctgcagaagcttataaaagcacatgagatacaggcatcgtagcctactcagattgacatctacttgcagattctggtcatcagtgacttcawtgagcactgagagcagtttcattgaaggagcagtaagggcaaaaactagatcgtagagaactgaagtcaaaataatagttgagatttattgtggatatctcctttcaagaattttgaatgaaaaagagaggagagagattagattggtaactagagagatagtggtgggggcagggtatattcatagaatggaagagacttgaacatgtttataggttgaagagggagagtcagcagagagaatakagtgaaaatatccaagagaaaaatgagaaaggggataactaatgaaggaagatcacagaggactgtggtcatggacacaaagaaaggttttgccttcagctgaaggagactttattctcttatattattcagaaagaagtaagaatgattgtaaatatagacaatttcttaggtagagggctagaaaggtgaaaagggtggttaaactcagtcatcgctgatcctcaacttaaaagtctgttccactaatctttattttgtattactgaatgcatatataatgagctacgttaacattgggttttactgtacattatgcgtagtataatatatagaaagtctgatccctctttttaaataatatatagaaatccaaactttatcartgtaaacatactgagtttgaggtgtctatagatcakcttaatggagatgtcatacagattagttttcatttttaaatttctccctatttcattgaaaatatgattcactatataaaattgtaattaatatagatatattacataaagacaaaggagaagctctatacatatggatgatcacatactaatggaagattttttaaattgtaaattaatattgtttcctagacaagtcagtaggattgagtatacaagttgaacatccctaatctgaaaatccaaaatccaaaatgctccaaaatccaaaactttttgagcacgggcatgatgcctcaagtggaaaattccacacctgacttcatgtgatgggctgcagtaaaacattgtttcatgcacacgattatttattgtataaaatttctttcaggctatctgtataagatgtagatgaaacacaaatgaagttcatgtttagacttggatcccatccccaagataacttattatgtatatgcagatattccacaatccaaaattcaaatacttctggtttcaagcattttggaatagggttacttaacctgtactgaggtgacaggtaatctcttagtcttctggctttatatgattactggttagctaaggacctgtctatgttagaggccttgtccatgccacattttttcccaagttaagcttctactgtagctttttcttattttctgacctgcttgataatctattcttatattcattctcacagtgaattagtctatatagtgtattagttataactcagtgtattcttaaagggtttcctcaattattttaatatttgacctgcaataatctgagaacsattttcattttctatacataatggctttgtagttcagtgttaaagctttggaatcttcagagtgaattgattgataaaagaaaactaatagtgcctggcccccagtttgcacttaataatgtttgatgaatgaaagaccgaatgcatacaatttcatttttgtgaaagtttaccatcctaaaaactctgattttttttttttaaagaaatagtacatgttctttttggactgtctgaaaacattgactcttaaccataataacaaataatttttatgagtcccaagctagagataaagagacctagttacttcattttaccttgggtatgagttttgatatttgatgataacagatttggatcgttgctggtttgggcaaggttcggattaattatataaaagagcacataattaaaaaaaaaaaaacctatcatatcctgttacccaattctctggtacaagagctttaggcactgatttaatcttgaaatgataattggacttcccactagattagcccatatgttttgagaggctgtctgggaatgagaggatgtcattcctatatgaaggaacatgaggcaagaatccagaatgaagaaccattagtctgtcttaccagagttctgacaacactgtgatctgaaaatgttttggccaaagtcagatttattgagggccataattttcaataaaaagaatcccagaggaagttatttgatggttggaataaaaatatgacttatacactacatgattcagctgctttggtgttgttttttgagttgtacccatatattcaccttcacatccaagtgtgctggaaaaagtttgtgttctgattgaattatgttcaccttaatttcctctgcagtgcttttccctcaggcagacccttgagtgattgtcttttttacctcctccaatttccaccattctcattttatgtgttcaagttaamtgtgaacaacagcaaacagctacactctgtaaaacataccatttctttccttgagtcaatgcattcacttttctggtaaatgattttgggggcctgcagaaaccaaatgatgagacccctgtaggtggtgaagaggagtttgcaagcaatgtttgcataaagttctcctggcctcttctgctcgtgtttggtttgttcttttaaacactgtcttaactacaaaaaatttttttatgactttggtctctttggagcaaggaaaatgacctggagggacagtcctatggcagtccagcttatattcttatgtaattgacttaactgacatatgccttggttttcctttttttaatttaacttttattttaggttcaaggagtacatgtgcaggtttgttacataggtaaactgcatgtcatgggggtttcatgtacagatcatttcatcatgcaggtaataatcacggtatctgataggtattttwtctgatcctctccttcctccaaccccctagcctcaagtaggccccagtgtctgttgttcccctctttgtgtccatgtgttcttgttgtttaccttcttataagtgagaacatgtggtatttggttttctgctgctgcattagtttgcttaggataatggcctccagcttcatccatgctgctgcaaaagacatgatcttgttttttatggctgcrtagtattccatggtatatatgtaccataatttctttacccaatctactattaatgagcatctagattgactccatgtctttgctattatgaatagtgctacagtgaacatacatgtgtctttatagtagaatgatttatattcctttgagtatctacccagtaatgggactgctggcttaaatgataattctgttttgaattctttgaggaatttccatactgctttctacaatggctaagctcatttaaactcccaccagtagtgtataatcattcccttttccctgacacctcaccagaatctgttatttttttgctttttaataatagccactctgactggtgtgaaatggtatctcgttgtggttttgacttgcatttctctagtgattagtgatgttgagcatttttccatatgcttgttgccacatgtatgtcttcttttgaaagtgtctgttcatattctttgcccactttttaatggtgttgaggtttttttgcttgtaaatgtaagttccttatagattctggatattatatcttttgtgggatgcatagctgcaaatattttctcccattctgtagataatctgtttactctgtcgatagtttcctttgatatgcaaaagctctttagtttaattaagtcccatttgtcaatttttgttttcattgcagttgcctttggcatcttcatcatgagatctttgccaggccccatgtccagaatggtatctcctatgttatcttccagggattttataggtttaggttttacatttacatctttaatccatcttgagttgatttttgtatatgatgtaacgaaggggtctagtttcaatcttctgtacatgactagccaattatcccagcaccacttactgaatggggagtccttgctctattgcttgtttttgttgactttgtcaaaactcagatagttgtaggcatatggtcttatttctgggttctctattctgttcattggtctatgtttctgtttttgtaccagtatcgtgttgttttggttactgtggccttgtagtgtagtttgaatttgagtaacatgatgcctccaactttgttcagtttgcttaggattatgttggctatttgggctcttttttggttttgcatgaattttaaaatagttttttctaattctgtgaagaatgtcattcgtaatttgataggaatagcactgaatctgtaaattactttgggcagtatggccattttaacaatattgatttcttcctatctgtgagcatggaatgttttctatttttgtgtcatctttgatttctttcagcagtgtcataattctccttgtagacatctttcacctccttggttagccatattcttaggcatattttattatttttgtggctattgtgagtgggattgcattccagatttggctgtcagcttggatgtttttggtgtatatcaatgctactgatttttgtacattgattttgtatcctgaaacttttactgaagttatcagatccaggagcttttgggctgagactatgggggttttctagatatagaatcatgttgtctgcaaacagggatagtttgactttgtctcttcctatttggatatcttatttcttcctcctgcctgatttctctggctaggacttccagtactatgctgagtgggagtagtgagagagggcattctggtcttgtgctgtttttcaaggagaatgcttccatcttttgcccattcagtatgatgttggttgtgggtttgtcatagatggctcttattattttgaagtttgttccttccatgcctggtttattgagggttttttaaatgaagcattgttgaattttatcaaaaacgttttctgaatctattgacataatcatgtttttgtttttagctctgtttataggattaatcacatttattgatttgtatatgctgaaccaaacttgcattccagggataaagcctacttgatcatggtggatttgctttttcttgtgctactggattcggtttgctagtattttgttgaggatttttgtatcgatgtctatcaagtatrttggccttaagttttctttttttgttgtgtttctgccaggtttgggtatcacaatgatgctggcctcatagaacgagttggagagggatccctcctccctaattttttggaatagtttcggtaggaatggtaccagctcttctttatacatctggtagaattctgtctggtcctgggcttttcttggttggtaggcttttttattactgcttcagttttagaacttgttattggtctgttcagggattcaatttcttaggttcagtcttgggaggttgtatttgtccaggaatttatcagtttattctagatcttctagtttgtatgcatagaggtcttcatagtactctctgagagctttttttatgtctgtgggatcagtggtaatgtcccctttgtcatttctaattgtgtttatttggatcttctttctttttattagtctagctagcagtctatctgtcttaattttttcaaagaagctactcctggattcattgaccttttgtatggtttttcatatctcagtttccttcagttcagctctcattttggtgatttcttgtcttctgcaacctttgggatttgtttgctcttgatactctatttcttctggttgtgataggaggttgttaatttgagatcttgctaactctttgatgtgagcttttaatgctatgaacttccctctcaacactgccttagcggtgtcccagagattcaggtatgttgtatctttgttctcattagtttcaaagaatttcttgatgtctgccctaatttcatcatttacccaaaagtcacttgggagcaggttgtttaatttccatctaattgtatggttttagcaattttcttgatattggtttctattttattgtcttttgccttaattttcatttatgaaaatataaaaaatataaatataatgcatgtgataaatgcatgaagtacaatactgatgctttttctttggtatgtacattccagaaattagttatgtttacacattagggtgagtcatgtgctgagcctttaaggggaaattttaaaccttaatctgtatatttctaacgtaaatggcaccatatatctctaggacacagtaatagaccccagaatttaggaccatgtcaaagaaatctgaaatgttttaatttttctcctactgtgagtttgcttcatctctacttgaaaaatgaagagtttcttttaggccaggcgcggtggytcatgcctgtaatcccagcactttgggaggccaaggcgggtggatcaccttaggtcaggaattcgagaccagcctggccaacatggtgaaaccccatctctactaaaaatacaaaaatgagccgggcgtggtggcaggcacctgtaatcccagctgaggctggggcaaggaaatcacttgaactcaggaggcagaggttgcagtgagccaggatcatgccacggcactccagcctgggtgacagagcaagactccatctcaaaaaacaaaaaaaaaaagcttttatagaactaatgtatataaaatatacatacaagttggaagtatagcaaagagataaataactcagtttctgaaattaggaaaaggtaaatttgaatcccatctctgccatttactaactctatgactctggaaagttttctaataggtatagtagttataataatagtactttcttcctagggtcattgtgaagattaaattatatcacctatagaaagcacttgtacatatcatgaaccaaagattataactaatccaatttttcagttcactgaagaaaaatggaagtgactgtccaatgtagatgtcagcacatactgaagggttcaagaaatgagagttgtaattatcactgctgttatcagtagatcatcaataagtagaactgatcagttagctcaaattgagcaatcaatacatgagttactagaaagcaatattttttaaaggtttattacaatataaaagtgatacaactaagggattgggaataaatgcgtatacatttacctaagaacaagtgtttaactccaatttcttttaattaagttagttcgcatttatgatagagccatacatattgcagaggacaataccatgtgcaatgctaagtaatattttcttatgaggtttagtgtcaggttcttcaggtagaagaagcacaagcagctgcatttagtagacctgggttccaatcctagctctaccatttatcaactgtattacattgagtaatttagtgaacctatctgagactctgtaaaatggcaatagtaatacttcattactatgaagtaatactttcataggcattatgaagattggaaataatatatagggtacttagtaaataatagctattggtgttattctaccactactttttttaaattaataaactgtgtactaccrccattttaattaataaagttcggttcctttacaaataaacattagttttctatccctgctgtaacaaattgccatacacatagtagcttaaaacaacaaatttattatcttatagttctggaagccagaaatctgacaaaggtcttattgaactaagattaagatgtcagcagggctgtaatcctttatggagcctcttgggaacaatccatttctttgcctttttcagctttctgaggccccctgcattccttggttcatggccttttcctccatcttcaaagctagcagcctagcatcttcaagtatccttctgtttctgacctatgcctccctgttccacatttaaaggacgcttctgattacgtttgacctatccagataatccaggataatctccctattttagggtcaggtgattagcaattttaattccatgtgtaaccctaattctcccttgacatgtaacataacatattcacggttccagggattagaaggtggatatcttgggggtggggcattattctgtctaccacaataatcaaaaaaagcatttgttgcatagtattgtatttgccttaataatcatgagaaactggcaaataaagatcagctggtaccataaattttcagatattaccatttttttgttttcatttttgttcttttttttaatgttattttagtatcttggttaaaagtactatcattttggaaattcacatttttggccactatagctgtattgtgttttttatttaaattgatatagttgaaactctaaagatacaactgcaagaatatatgtgggcaaatttttgaactattttgtggataaagggaaaaagggtaggaatcrgatgtttttcatcagtttttaggagtaattacaaagctaacaggaaaatatgtctcccttctaagataaaaggaacctgaatatttgtccctaatattagaaagcaaatggctcgcaaaaattctcaaagatagtgtgaatcatattcttttataacactggataaaggggraaaaaagtgacatttggggtattaaacctgagatgaacatcctaatccagagagtagctgatctttagacctacaggctgccagtgaggkgttgtcagatgttggagtttaggcatagacaaatgcactgggaagagaacagtgccactggctagtcacttcacttctgggcctcagttttctcatacctattttgtggattatgtgggttgctaattaagacacccatctacctttgatgttctttaaagtagaagaaagaaatttaaacaaatgaatgacactaaaaacagaacagaaaccaccaagatgtccttcaacaggtgaatggatgaataaactttgggaagtccagacaatggaagattatccagtgctaaaaagaaaatgagctataaggccatgacagtgcatggaagaaccttaaatatatatgactaaatggaagtagccaatccaaaaaggctacatactctgtaattccaaatatatgatattctggaaaaaacaaaactatggagactaaaaaagatcagtggttgtcagggattaggggaagggagggatgaataggcagagcacagaggatttttagggcagtgtaactactgtattcactacagtgctgggtacatctcactatatacttgacaatgtaacaatgtaggttcatcacttataacaaatgtaccactctgatgtgagttattgagtatagtgggcaggctgtgtgtatgtgagggcaaggagtatctgggaactctgtactttatgcccagttttactgtgaacctcaaactaccctaaaaattaagtctattttaaaaattaaacagggtgggaggaaatggaaggggagaaaataaaaaggctactcactgagcctttcctcatctccactgcctgtttcacacacttggccttttcactgtctgtagtttttcctctcctccaaccttagtcactttcacgtggatagttaggacagctttttcactctagtggatacagtatgctctaagttcactaaaacaagcatgtttgtctttcttactgggttagggagaatctgctgtatgatccaaataatatactcaatacattaactgggatccagtataacatgagtgattggtccataaaaatccaactctggaagtatcaattcgtgttttacaactatttttggatactgtatttctttctaaaccttccttagatcattgttacccttaagaatacaccctgtctggatcagcaaggtcacacagccaccgctgtgagacagggctctatgactggcttatcaaagagttggcatagctgaggggcagttccccaaagaaatagttcacttgttcaaagaactaagaagtcttgttatttaaaattaaaaaaaaaaaagtacaagggaaagaagcaggggggagaaaagaagaaggaagggaaaagaaaggaaagatgaggggaagaaaataccatgtttcttgtatcaagcctatcaagacacctaccaggatgttttataagattttctttgacacagaaggggaaagtcagtgtttcttctgtatcrgaacacttaatatatgaaaatgattttgcttcacaaaaactgtgaatataagtgtcttgcacttttatgttttgtccctggaagtctaggtcagatgctccataaaggttttggatgtgatctctaaagcatatgttccaccaagaagtctttctatattcaccatctctctggtttccatggaggtgatgatggaaacttatgtataatttcagactagcattgtgctgcgaatgatgtttataaaatattaaattctgataaagggaataatatttttaagtcattcttaattcctgaataatgctgcatgttaatggttagatatcatttgacttcaaagtctttcacaacataaactttgatttcatactagtataagtgacccggtaggaaaaaaaaaagagagagagagagagagagatgtttgtctttcttatagggttagggagaatctgctgtatgttccaagtaaatgttttctaccattaccatcttgttaagctaatgcaaaaaaagaacagcagttttcttacccagaatcccaaatttgagtcaaggccaatttcataggaatgtcctcctatgtaatggggagttaactgtctaaatcagggatcattaaactacagtttgaggattaaatatggcccacaaactgtttttgtgaagcccacaagctaagaatgttttacctttttaagggattgaagaaaaatcaaaagaagaataatacctcatgacacatgaaaaatgtatgaaattctaattccaatgtccataaagttgtattggaacacagccacactcattcatttacgtattgcccatggctgcttccacactgcaagggcagatttgagtagttccaggaggaactgtgttctccgcaagaccaaaacacttgctgtctggccctttacagcataagtttgcgcacccctgatgtaaataattgtttcaccatcttcccacctctgcaccgacacacatattcttcctatcatctctttctccttccttcccttcttctcttcctcttcacacacacatacctcattttgaatttggcaattatgatyacttacagtaaaggtaagcggaaatacattttaattttcctttgtcatttctctcctccctgtctgctttccctttcctctactgcctttatatagaatgtctgagggctgtgcccttttcccaaaatattttgttttaaggtgggggttagatcttggtacattttttgacttccatggaaagttttgtgttagtatgtggtcccatttttaacctatttgcagacacccccgattatctaaaatcactttcacatggggctgaggttaagctttatttcttttggcatgtccctaccacagcagacacttcctctttgccttgaaaggacaaaacgatgttcagctgtctgggcttaggcccagtatttgatttatacattatttaatttcctcctgaaaattggaagcaggactttcaggaatagaagtcagtatttttcatttgttttagaatacttctaggtstaatataatcatcagtggtagatgtcagcatgattagggggtgacttaaggtaaagcaaataaaatgtgaatacaaaggaaaattatttgacaatggagaagttccgaagtttttgaataatcattattgtatatgttattaggttttgggggtactacattttggggcacctgtcttcactttacccattgaaggaaagatgtctattatgttatagttgcaattgttgggggattagaagtttgaggaaaatgtaatgtaacccttccagtaattttacagaggatttttggattctctgtgagctgctactgcatttgtcttcacaattaagttcatacgaatgccaggatgtgaatgccaaaatagtttgagattttaacagcagtgaactcaggaaattaaaaattaactctggaaatactatttcatgttttacaaccacttttggatggtgtgttcctttttaaaccttccttagatcattgttactcttgggttacaacctgtctcctttttaccaccaaagttcttaaaagtctagcacacctactgcctctacttcctcactcataattcgcytctcaaaccctggcagtmtgggctttccctccctctgcacactgctaagctgacctcactatttccttctctccaattataataaccagctctaagtcctcagctttcctgacctttttgctccatctgtcagaattcgtaccctcttcctaaagccctctttcagtttttatgtgggactgtcctaatttcctctacttcttcctgtcttttatagacccatctccctagtatggagctgggcttaagtgtcccccaggttctgtttcttggaccatttttctccctacattcttaggctttcccttctcattttttctcattacctgagacacttcaggagaactcagagggctgcaaagagcacagtttgaaaatcaccccggtcctgtcagactacttttgagtccttaatacagcccaccctatgccacctctgtgccttcacatgagagtgtaccttagtgtgggagtgtgcactcccatggagtgccttgccaccaacaccaccagtacatctcttcacattcttctaaagcttattcctaaagcatctactcttttatgttaccaggctcccagtagatgctttccctccctcatctgagctatggtgggtaaagaaaaggtaccagagtcagacagatatggatttaaatatggatccaccacttacctgtgtgtgatgttgaacaaatttacctaaaggctttcaaatcagtttcttcatttataaattgggggtagggggaaggattttacctaccacattrgattgttggatagattcggtaacttatgtgaaggcagagaacacttggaaatcagtggtggtggaggtggtagtgctaatagtgctawtatcaccatcgtcaatataattatttccacagcagcattttgtttctcatatgtcagttacgtcactgtacttattgtcttgttctcatttcagaatttcagactcctcgaggttttatttatattcccctgttccccaagagcatagaacaaggacttaagcataggttttcctaagtgagttgagttgcatagaatagctattctcccctaaaggaaaatactgactccacagtgttcttaaaagtcagagctggtaagtttgtagctgtctcttcatattttaatcaaacattatcacactaaaaaaaatcattgttacattttgtcactctaaaacttgaaactaagtagtctttaaattttaaattttaatttctccaagagttaatgacttatatatttagatataggtggtctgaagtaattatttttaaaagaactacttttgtatttgatgcataaattatatcagtagtaaaatattcagagaagaaaaattaatatacaaacattaaattgcttttgattttatatgtttgattctgtgtccatcttatttttgattttgtaaaatcaatgccaactgcaaagttttttagcttaaataaccagcagtttttctttttacatgtttttacttacaaaacctttatcctctatctctcaacatatttctggaaaacagattttctgcttctgggaaacatcactttttcacaaatcacacatcgacctggttataaaaacctataactgctttgtttgttgctctgagggccagagttgtagattaggttctgctgtggatttctgaaggctaaagtagggaaggagtggttgtgctattccgatctgaacttctgtaataggagagtagcaaagcagtgaggagttgaaaggcctttaaaaaaaaaaaaagtatatgttcacatggagtccctctgaataagtaccagcaccccaaagtcactaaaattactccccaaatcaagcattcatcactcagaaagcctttatggatcaccagttttgcagggctcggtatttggtggtgtcctcacagctttgaaccagacatgcttcacctgagttaaggacacctctaccggcaggcccctagagagtggctcagggtactgatggggtcagaaaagggagggtgtgaccaaagagcagattgagtccacactttgaatactttcaggaactacttgcagccactcaggaatataaactagtatcacagctgagagctttatttaacattccacttagttataatctttacctaatctctactgtttttatttggctactagctatttagtgtaaccccatttttgtggaaggctggccaagagcacacttcaactcaatagtagtcaaakccagctctactgaacctacatgaacacatgagcacacaaattgtgtggttctgaagtttgtgggggtattttttagttcttgataaatgttcatctgcctaagcagtatatacaatgtaaagttaaatgtgacacctgctataaggcatataaattccacattcggttaaaaaccaacttgttaagactaaagtcctaaattagttaacattaagtcagatatcttattttatgctcttcatatattttccttctttccttcattgttctttttcattctttcctatatttgttgaccatgtactatgtgccagataaggttctaggcactagcatctaatattagcaacgaaaataaagaagtctattttgtgagaggcaacagaccatcaacaaaataaaatatagtatgtggcaataagagagaaggagcaaaataaagcagggaaggagaatgggattacagggagggctgcaggttttaatagggtggccatggaaaaccttgccgagaaggtggcatttgtgtaaagacttgaggcgagtgaactgcaattatccaaaggaagcacatttcagggagagggaacaagaagtccacatgctccgaacacgagtgttctttgcacattcaagaacagccaggaagccaatgtcactggagtgaagagtgtgagggggttctagagcccagttgaaaaaaagtgggagtaagtgattggtgtcgcatgctgctgatagattaaatagattgagaactgaggattgaccrtaggattagtgaccttgacagagcamttcagtgggggagtgttcagaagtgtcatttcaatgggtttaaatgagaatgggaagagaggaaatagaaaatggaaaatgaagagagctcttccaaggagagttgctaatgggaatgaaagcagatatggagacaaggaagggactagattacatctrtaaggtgagaaattacaacgtgtttttatggtggtggtaaagcttgactcaggtaaaaggaaatggaaccccatgcataaatagaaggattgatcttggcagcacagatacttcatctattgaaacaggaaagaaagttgagtrtgtacatacaagtagagggaaaggggtagactcaatggtgatagcatgttgaaagttcttctctgccacatgaacaaactttctttccagtgcttaaacaacacctgcagtatccttctcatatggtcatttgcatattatctctacagctgtcttatgtttggccagcttattaattgttaatatatctcttcctcttattgagcaaaaacctttcttctagaacattgatcctagttctgcttcccatagcctcccaagatggacagttctaatttttctatagaagagcctttgaaggactggaggactgatgtggtttctcaaggccgacctcattcctgctgattctaacacctagcccttcagtgtttctgctggcatgtgtggtttcaacccctgtcacattcagacactctcatctaacagggcccagggtatttaatcagtttcatttgctaatcaggcctcattggtcccggcctttggtatctgtttttctcccaggcttttttctacatatttagtgtttctcacaaatactaacattgaaccagcatgccattaagatttatttatttatttcagtagctttaggggtacaagtggtttttggttacatggataaattgtatagtggtgaagtctgggcttttagtatacccatcacccaaatagtatacattgtacccaataggtaatttttcattctttacccccactcccaccctaccccgttctgaatctccagtgtccattatacaattccatatacctttgtgtacccatagcttagctcccacttaaacatgtgagaaatgcagtatttggttttccattcctgagttacatcgcttagaatgacctccagttccatccaagttgctgtcaaagacgttactttgttattttttctggctgggtagtattccatggtatatataccacattttctccatcctcttattggtcgatgggcacttaggttgattccatacccttgtgatggtgaactgtactgtagtaaacatatacatgcagatgtctcttttatataatgatttcttttcctttaagtagatacccagtagtgggattgaaggatcaaatggtaattctacctttagttctttgagatatctccatattgttttccatagaggttgtactaatttaccttctcaccactagtgtataagcattcccttttctctgcatcctcatcaacatctgttgtttttctgtttttgttttttgtctttttagtaacagctattctgaccggggtaagatgatatctcattgtggttttaatttggagttctctgatgaatagtgctgctaagcatttttttatacggttgttggccatttgtatgtctttttttgtgtgaaaaatgtccatctgtgtcctttcccacttttttttttaagttccagggtacatgtacatgttgtgcaggttacataggtaaacatatgccatggtggtttgctgcacctaccaacccatcacctaagtattaaacccagtatgcattcactgtttatcctgatgctctctctccctgccctccaataggcctactttttaatggggttattttgttgctgctgttgagttgtttgaattctttgtaaattctgggtatcagtcccctattagaggcatagtttgacaatattttctctcattcttcaggatgtctgttcactctcttgataatttcttttgctgtgcagaagtgttttagtttaattaaagttccatttgtctatttttgcttttgttgcttgtgcttttgaggttttagtcatgaattctttgcccagaccmatgtccagcaatcttccttaggttttctttagtatttttacagtttcagttcttacatttaagtatttgatccatcttgagttctttttttatacagtgagagacaagrgtccaatttcattctcctgtgtatggcaatacaattttcccagcaccatttattgaaaaaggtgtcccttctccagtgtacgtttttgtcataaaagattgttggctatagatatgtattagtccattttcacactgctgataaagacatacccaagactgggcaatttacaaaagaaagaggtttaattggacccacagttccatgtggctgaggaggcctcacaatcatggtggaaggcaaggaggagcaattcacatcttaaatggatggcagcaggcaaaaagagagcttgtgcagggaaactcctgtttttaaaaccatcatatctcatgagactcattcactatcacaagaacagtgcaggaaagacccacccccataattcaatcacctcccaccgggttcctccyacaacacaagggaactgtgggagttaaaaatcaagatgagatttgggtggggacacagcctcaatgatccatctactgctgttggtggagcgtttaagtctcccactattattgtattgctctctgtcttttcttaggtctaagagcatttgttttatgaatctgggaaccctggagttaggtgcatatttatttaggattgttatatcttcttgtggaactgatccctttatcattatataatgaccctcttcgggttttttgtttgtttttgtttcgtttgtactattattgatttaaactgtttaatctgatataagaaaggctattactgcttgcttttggtttcatttgcatggaatatttttttcatccccttaccttgagtctataagaatctttaccagttaggtgggtcccttgaagacaggagatatttggcttgtgtttctttatccattccaccagtcagtatcttttaattggagcatttagatccactatttagacccgtattcaacattaatattgatatgtgaggtacaattctaatgatcattttgattgttatctagttgttttgttttcttcattatgttactgttttataagctctgagttttatgctttcaaatgtttttatactggtgcatattgacctttcattttgaaatttagaactccttttagcatctcttgtagggctggtcaagtggtgacaaattccctcagcatttgcttgtctgggaaagtttctctctcatttatgaaaattagttttgcaggatagaaaattcttggctccccatgggagaagcaccagctgtgtctacagtgatgggctgacagttattctgcttttgagaagattaaagataggacaccaatcttttctggcttataaggtttctgctgagaaatctcctgttactctgacaggttttcctttatctttcctttcaagttatctgatgcttttgtctcactactcttagaattccttcattcacattgacgttagatagcctgatgaatatatgccttgctgatgtccattttgcaatgaatctcctaggagttctttgagcttcttgtatttggatgtctaagtctctagcaagaccagggaagtttccctcaattattctctcagataggttttctgaatgatttgcttttcttttctctcaggaacacttatgattcttaggtttggacgttttatataatctcatatttcttggagactttgttcatttcttttaattcttgtttcattatctttttctgatttggttgattcaaaagcattctcttcaagctctgacatcctttcttctacttgatctagtctgtttttaaaactttgcattgcattttgtaattcccaaaatatgtcttcatttttagaagttctggtttttcttcaaaatatgtctctttagaaaactttccattcatattctaaattgttattgtgatttctttatgttggttttcaattttctcttggatctcatcgagcaacttaatagtcagcattttgaatttttttatctggcatttcaaagattttgttttggtttggatctattgctgggaggttagtgagatctttggagggtgttgtagaactgtgctttttatattgcagaattatttttctggttccttatcatttgggtagactactttttcttactatttttgaatttattttttattctactgggttaaaaaaaattccccttgagaatgtgactttaatgtttgcggtatagtcacctagcttaggctctgagtgctttcagtggcaaagactttccaagttccttggttataaaacatctttgcacagtggctttctcatatgctggttgtagtaccagtgtgctgggtgtgtgaacaggttcactgtctcgtggggctggaatggcagaggtcccatgaagcttacatcattctccggtggtgtgtacttttcagtttttttcccataatatttttcactgagttgaacagttcagcttttgggccagtaggaggtacccacaggtaaaaacagctgcagcttaagcagatggatatatgcaataccccagtggtggacagaagtcccagccttgacagaagcaactgggggagctctccttgaaaggcactgaggtctttgcaggagaaagggagggagccacctcagctyctcttccagaccagcacgaaagcaatctgcctccctgtcacactcatgtcgcaatgttctggatattcagatcagacgaggcacttctgtggatctgcagaaatgctgacattcatgtagagagggattgtgaacctaccccaaagtgctccagaaaggccatccataggtgcacccmagccaagctcctgtggaggagtcccagcsacgtctgcagtgataggcaaagggtagaagtccccttctccaggtcccttcacgagcactggggctgcccaactgctggggtagaatgacagtctttctaccacttagcccagcactgcatctgtgcctctgctgaaagaaacttcccacaagcagaaagttctaggactcaaaggctgcactctaattaattttgtcccacagggtgctcccttgatatggtaccctttcccttcccctaggagtgacagtcccttagggcaagactactgtaaatactgctgcttctctaggtatagccaccctgtgggggctgccacaatccaggctggtgctggggaatgtctacaagggatccagtgatgtgaagatacaagggttgaaggatcctgagcagaacaaagtcccacaacctatgtgcacgaatatggcagccgctactacagctcaggcctagggcaagagggaagggacactatgcaracaaggcagtgccctcaagaagtccccaaatcgcaatccactcctgtacttgtgcttacaagggcagagacactctgcctgagttcagatgccagcagtctgccacaagacctagagatgctgagagcactcccacctaccctttccaaagattactgagcctctgggggtttgacctctgccagcttcttgtaaaataaagcacactttattttgtggctgtatcatagattctcccagtgaactctgtgataggctctagcactctccccttaacactccatttgggctatgattattcacctataactttggttcttccttctgaggagaattggtcacccgtgtctcttatcagcaagctggagaagttttctgatgccacaggctgtggacaggtctgcaggatgtgcagtggcttgggctctgctcttagcttcagaggggagtgatgttgcgtggagctgaactgaacttcctctggtctcccaraagcaagtgcaagcaccagctctgatgagggtggcaggggagcgacatagactctgtaagatttctttggttttaaatagccctagtgtggctcagtgagtgagaactcactgaatatagttctcagatgccagctatggaagtaatgtgctgggcacatgaacagtctcaccattaagtttttatctaatgtgtttatccttaggatgaggccaaggacaaagtacaaccatcaaagratcccttccaaacctatctttacccattagttaaccccatctagacaggattgtaatttctaagtattcacatgatcccaggtaaatcaacatcaaaaccaggagacttggtcagattaaatggtatggggcaaagaaaaaggggcatatttccagtgtgttgaagccaacatgcctgggagtatagtgtatcactgaaacactatactctgaaacactgagttagtagggcaggcagttttcaaatcaagatgacacatctaatgttgaacactgtgggttgtaagtacccaacctgagctaaagatgaatatttcacagttatttgcataggagtgatacttaaaagacatgagagtaaattcattctttgagagattataggtaaagactaaaaaccaggggccaaggataatacatcatatgtctatggcatataagtatatgatcttaggagaattagaagctagtcctagcacattatcatgtacatgaaaagttgatgtaagagaaccatactggtttgcagcacctgtataaatacaaccatcctaattttcctattatcacttcctcaagcccatgattgctgcttctgacactttagaagcagtgtctgagctgatcttagtaccatgaccagccccattagcactgctacctcctttaccattacaacagagtatcagcagcagtggtgatcaccagaagactgagtgtgagtcagctccagtagccaagcttaggagaaaaggcaggtcagttcgatagcatgaagccacttggagatgtggaaaggtagagctgtgactagagctggcagaggcataagccttggaaggctggttggggcaaggtgaaaaatgggaaggacagaaggaggtaaagaagccagaaaaggcaaaattttaccaggttctttcctctttactggaatttgaattttgtcctacttgcctgtcttgagactttgactgacataaataaatcttaagacgaaaagggaacaaaagactgaaaacagctcaaatatcttttacttgaaactgggttaaataaactatgctcctataaaaggaatgagaaatagctctctatatagccgtgaagttgtttctagcataaattgttaagtgaaaaagacaaagcagagccagacgccgtggctcacgcctgtaatcccaactctgggaggccaaggcgggcagatcatttgaacccaggagtctgagaaagttgagaaacagaaagttctaggactcagagcctgcactctaccaaacatggtgaaaacctgccagcatggcaaaaccctgtctctaccaaaaatacaaaattagccaggcatggtgatgcgtgcctgtagtcccagctatttgggaggctgaagtgggaggacggcttgagcccaagagatcaaggctgcagtgagccagcatcacaccacctcaccagctgagcacgatcttgtctcaaaagcaaaacaaaacaaaaaaaagataaagcagagaaaagcgtgaatactatgctaacatttttcgggaaggtggcaggagaggtgggaaagcgtccctttatcaatatatcccagctaatgaatgaagaaggaataacagaaataggatagcatcattttgcagcccttcatgaatcaaaagacctggacaatcataagtggctactaacacatgaaaagaagagcagccatacattatgtgcawctcagcaatacctatgaagtacttgttcaaaaaaaaaaaaaatcaaacctgaaactccccaagcctctagatcttaatacaagttaataagaaatacaggaggcaggagatgttaaataacaccagagggatgcrggaagcaaaataaggaatatgggagactggataggatatataattctgtttcttgaacataaattttaagggaaaagagaaagagaaatcccttagatatgagatatagtaactaaatgtaatgtgtcacacctattctgatcccaattcaaaccaaccatctgtgaaatatactgactggtaaatgtgaacactaactaaatactgataatgttaaggaaatgtagctaattttaatgtggcataaaagtgttacagtatatctttagaaatacactaaaatatttatgggttaaatattgtgattctgagatttgcttcaaaaaattcagtgcagtgttggagataggattacagtgtagatgcaacaaaattggtcatgagttggtcattgttaaagctgggtagcaggcgagtgatttcactstatactgttctctgtactgttgtatgtgtttgaattttctatcgttaaaaaatattaagaagaaaacaaatagcattatcttttccctaagtgttcacaatctcctctgtctcccctttctcctattttctaaggagaaagaattgagcaagtttacaaagtggggtggagctgttgtgaaagatacttcaaatcattttttagctactcagaattatagcatgaagtcaaagttctctaggcttgaaatgctgtgtacctcattcttcccctccaacacatatttccagttatacgcacaattttaattgactgtagggactatcttcaaataacatttccataaacttccaaactgaaccgccccagattggagttttgtaatctattagccattcatgacccctcccctacccacaaaaaaagttgtttttgtttgctttctcttctgattttcatttagacttctttctttgccaatagatttaacacaaagatagcattttctaactttgaccataatccatactggaatcatcattcaaaaataatggcctaattgttcctacaaatttcataatcattttcaaagaagttgattggtggcccttgaggcttttcaactttatcctattttggatgatatctgtggcctagaaatcagttgtatagcccaaaatgttacctagactactaatgaacagcaaggtctaaggaaatggcaactagaggccgggygtggtggctcatgcctgtgatcccagcactttggggggccgaggctgtcagatcacaaggtcaggagatcgagaccatcctggctaacggtgaaagcctgtctctactaaaaatacaaaaaattagccagatgtggtggcgggcgcctgtagtcccagctactccagaggctgaggcaggagaatggtgtgaaccccagaggcggagcttgcagtgagccgagattgtgccactgcactccagcctgggggacagagtgagactccatctcaaaaaaaaaaagaaaagaaaaaagaaaatggcaactagaaacaagcagccccattgcagcacgctgaacaccgttttttggaagcatgcaccactgagcaggaattccaaaatggcacctttgcaatagtacattttgaggcattgtgttgccaagacagaaagaagagaggaagcagtgtataagcaccacaaatttacatatacatagaaaaggatagagggcagtttttacatcctctctctcatttcctccaccaaccaacaatcggcctgactcagattacctatccagccctcctaaggatcttcacttcctccccctagaaaactacagagttgctctgttgtcacagtgtgaaaacacacacacacatgcatgcgtgcrtacacatacacacacacacacacacacacttgatttggtgcataggaagtgacctaattcagtttgtcctcatcatagtgacaactagactgagccaatcagagactttctgtagggttttgattactggaattgagaaaatgagggctttctggtgggtgaagctgtgagatgtaaaacacagcaactgttcctggtcatgtgaagccaaagtacggagagaagcagagacaaaaactctcttcatcgagacggaatcccgatggcatcccaggccctgcttccagctggtccgctgaggcccagccacactgctttctttaagttcagttcgacccaataatatcattacaataaattcctccttttggattcaaattggctttccatccctagcagttcagccctaatatacagcagatgtcacaactgatttcacatatttggagaaataggagtagctgagacagaatttagtctrccttgctcagagacattcacagatagtgtgaaaaccactcatgagtcccctttgcttaaagttaccctggtcatgtttattacagcatgtaaaggtacatagccttaaagtcttttcaggacttgggatttttcttaaagaaaacaaatcaagagtgttcattaaaagattgatataaaaaattaataattctgaagttaacccaaaacttaatgtaatcttccattggaacatttgttgatgtgtgtggggggtttaaattccacaaatattattaaaatgagcaatcagcagcaagatgttttaaaatattttgtttcmgcatgtaaaatctcgttttattacagaattattttgttaaaggcacagctatgccaggttgctgccagagtgataggatcataacagcccagttaattttaaaagactcacaagtggtaggccttggaactactgatggcaacatgtacatcacattttagtataatgcttaaacttacaccacatcttgtgaatttatatgcatctgccaatgtgtgtgtgtgtgtgtgtgtgtgtgtgtgtgtgtgtctgtgcacgcatgcatgtagatacacatatatttatttcaaagagaagagagttggtgggaagtaggacagacttgtgaagtaattaagaatttctactggctctcacattcttcagtgtaacttaaaatgtgtacaaaagatatcttgaatacactgtgtcaaaactggtctggtttcatttccagttagttgccagcatgctaaaatggagatgcttgctaccaaggtgtagcttgtctaaagtttagtgattagatctccaaatgaaaaagtacagcctaaagaggaaattcttggcacttgtttcaattatctcctctttacaacattatagggtgctttcatgtgtatgtattatcattcatagtagagagtacattgactaagattgcaaaatagtttccattgtatcataatccccttgtgtccagttgactcacatctctgaaaaatttctgctcagttacaaatgtctgctggtctctttccaatgatactttgtttgtttgtttgatggttggaaatctgaagaaagttcacttagttaaaatggtgatgtaaagtatatgagtacagtcctaaaatttactaaatgtacatactcaaatttactcaactttaggtcttcagattttaaaaactagatgaataatctatcctttaaaaattcaccattaattcttcaagtataccaactgctgcatttctaataccaaaacaaccttatcaagtgataatttaattacaccttttaaatgaaattttaaaacatgatttattcatgaaaaacaagtagtttcatccacccttctttttctacaactctttgcatatctgtggcctgctatttattacagcctttctcataatttttagtgtaggcttaacaagcatatagttttaaatctttctttaggagactttctggcttttctcattgctgaattcgacacaaaccttattctcttattagcattcttgcaagggagtttaggtaataatagttaagaaagaatgtttaagtttgatagtacattaaataatagacaatgatcagaagaggaaaaaaatgcatgggtattttggttaaggttttcaaaacctaaatcatctttattctccaccttggcctgaacaaagaataactataatgaaaatttggcctatgtggcttttacacgtatgtgttatttccttccgttacctcacatatataattttttgttgttaaaatgcaacagctggatctcgctattggctttcagatcagtaaaatcagagattgccctttctttgcttcctttttagtggacctgcaggaaatagagttcagagtgtacctcactccttacaagacaacagcccatataattttgcagataaggaaacaactccttcagtttctaaatacccagtatatagtgttgttatcaaacatcaacacctgtatgcatttaaattcactcacagtttaaatgaaattacacatagttaatacatgccacttgtaaagtctaatcttatcttgggaacttggattttgcattccttaactagtgtgcttaaattttcagttgtattatcctatgttttttttgttttttttttttttagtagatgaaaataagacacaggtgtttaggtttctcttcatgtcgataaagatctaaacaagcatttagttatacttaggagcagctgttgaaattttctagggtacaaaagaaggatctaacaaaataaaacccactcacctctagcatgattagctccattttgtattttctgtactccccaactgtgataattccagccaaactgtattctggcctaagtcatctggaaagggggaaagcaggtgttattatgaagcattcagaggatttaagaagatttgaaatatagttactatagagcagtgattcctaacccctttttggttttggatcctttttagactataatgaaagttttgaaccttckctatagaaaaatatataatatgtatacatgggtrtatgttttcataagtttcaatgtattcttagatccatctagatatccrtagactctcagttaagaatctttactatgtggccaacaaacacacaaaattagtgaaataccaattgaaatagtatctagttcatgtaacaaagattgctttattatttgaaattaaaacaaaataatataatgtgagcttctaaataaatggcttataaacaacataagtattacaagtcagaggaagcagagaccaccttaaaaatataaaaataaaaaagatacatgagtgtatactgggtattttcagaatatcttatgtaattgggatgatgtgatttcacctcatttacatccttatttatttatatgctagatgggaaaaaaaagaactttcttccaaaaagcataccactgtcaatgagtatgacatgcataaaataagtgtaatataaataattctattttcttctcactctatgttatgtgctaatggtatacttattggttactcacaaggacctatcttcatctgccccttagctagctacagattgtcaagtcattttttccccctgtttaacacagatagccattaacaccatgtcatcttctttaaatgtaaaatcatttagggatgccaagcaaatctgctgattagctcaggccagcctacaccagattggagaatgggaaagtagtgaaagacacgcattacagattaagactgggtataaagagaagactctaacaacccacccccaccaaatatgccacacaagtgctcagagagaccagagtcccaaactagactacccaggtgaaactacagagtttcacaggaggcagctttatgtgtgtgtcaatggggcaaaatgtgagggctggcagtaaagaagtctgacagatgaggaaacatggggaatattaaaaccagtttaacacacttgcccacaccatcccccgagccgcttcctcccaagctcccagagcaccagcaaggaggttgagacactctagacttggggaggagtcttgaagtttttcaggaactttgcttgctttcttctcccaaggacatcccctgtcctcctctcctctttgcccaggaccaacctcaagctctcccattacatgagtgcttttacccaaagtgtggtgcctcttccagagctgtcagctttctggctatagcttggatatcagccccacaaggacccacaaatacaaacctcaacataggatgacttactgtgcctgatacgtttttgcctttttagtccatagtagacaattatcttgactataattgtcccagcaggagctgcctctgtgtctgtgtatatgcgtgtgtattttttttttctaaggcaaaaactagtttatatctttgttcaaagatgaccttagcaggagacctttttttttttggagttgatcggtaggtcaagccatgtgctaacctggcttgtctgggtatgtctgggaagcagagcaggaccaaggctgcagggcctttatggaatttctgtgctaggaagggagatagacatttaacacaaatatctctatatcttgacatttgcgatatggcaggaaagtacaggcacctatgggactataaaactgatcctaaaacaagcaggcatgaggaggtagtgaggtcacctctaggaatgcctcctcaatggaaacatttgcactgaaccttgaagattaggtagatgagccagtgcttttgcacaccttgttccatgaaagcaagactgtttttttactgttgtattccccagtgtctgcttccttgtaggtgatcaataaagatttcttgaataaatgaaagaataaggggctcccaacatctgtttgctctcttatccctctccttccctacccagtggttcctgttctctccattcccttaccaactggtatgttatttttaaaactaaaaatactctgttttatcatattattattcaattaaagttagaaacatttaaaatccccatagatgcaaatgctagaacaatgaaataaaagctcaagattttttctgcccccaaagctctgtggaataatcaattttataaatttttaaaaaacaaaaactatttggaaggctgaagcaagaggattgctccagcccaggagttcaagaccagcctgggcaacattgcaagaccccgtctcctaaaacaaataagtaaatacaattttaaaaaggaaaaactaggcttcaccatgcaagtttataatgaaaggttatacactgaatatatactttagctatatatttcaaagacctcaagataacgttaaggccgggcatggtggctcacgcctatagtcccaacacttgggaggccagctggggaggaccacttgaggccaggagttagagaccagcctggacaacatggtaagacttcatctctataaaacataaaaaagccaggcgtggtggcatacacctgtagtcttagctacttgggaggctgaggctggaggatcacttgagcccaggaggtcaagactgcagtgacccatgttcaaactacttcattccagcctaggtgacagagagcaaccctgtcttcaacaaaaacaaacaaacaaaaacaactttgaatcagcaaaattaagcaaccaagtgtgttccccttctctaatgtcattaagctttgagtgtgtctttacagaaatttttattttcttatgtatggcatcctagattgtatgactttaacataatcccagatggattaattatcatgaagcctattttgcagacgattcaagggaatttagcccaagagcaaaagttaggtaattccttaaatctgaaatctgtcctctgaaatactactctactcaccgcttaaatggttttcagtgaagtggcattttaaaaataagtgctgcttgctttacctctgaattcccttctccaatgccattttactccctgagctgctttcttggcagtttggggcaccccttgctgtttgtgcctgtgayagtctgacttccatctgctgctctgcagccaggagcctgctgtgctcccttcagtcacatctttcatgcctggccattcaagcacctttcatcaggtctcaatgggcctgggtaaagggccctccccctgcatccacatgagcacataatctcccaggtagcctcctccttgaagcacctccagtgcatgtgttcgcaaacagcaggacatcactctctactgggttcctaatccctcagacacacagaggaaggaggtcgcaaggctgtgaaagtgaaaagaaaagcgagggggcgggtgagcagaggcaacacaatgtcagcgcctgggccctccagcggctgcaccacaatcatcgccagctgcagcccaattaagctcaacaggtcacaggtgttccagacagaagatgcttttaacaaaaccactttcttgaaaatacctaagactttttgaagcactgcagcccatttcttttggtagattctttaaagctatttagtacccttcaaatacaaagaagctgagaagcacatttcggcctcagtggaaggcgtgcttgcttcatgcagaacagcgggggcagcagccaggctgccgtgaccgagcgcagagacagcatctctgccaatacgtggattcagtgtgcagctgcagaaaaaggacgtgaggggtgtctccctcctccagcttggtcgcgtctgatactgtagcctgaactgtgcagttcactcactcacacaagaaattgctgcatagccatgaccttgtgtgtactcttaaattacaatctctaggatgcagttgtagttttcctatgaacttttaagcagccctgccacatgctggttaaactaggtgaatgaattcagctatcaggaactacttttcatcttctgacacattttaaagtgctggcttcattttctccacagatccaagtgttccctgtgcctgccagaagtgtggggaggggatgacaggatccaagcagaaattaggtagttgtttaagtcaccttcggacctttgttacccttccacctttctttgaggatatcgataatctctgagaggcagttaggaatgtagtggggaaggtcaagttagaatttcggcatccctattggaagggagcggttcttggttcccctactcctcaggcgcacttacagcagcatcccttcttcccacgcctgtgtgccactctcatgggtatgtttgcctgttgtcattattgtaacctgtttacagccaatagcgaggacatgctgacgctacccaggtcttatctggaaatggaagcaactgcttaaatttacaattgggtttctaatctgtcaacgcaccagaaaagcccctagtactactgtgaaactgaaaagaacatgggaagagttaaagcacagcgggaatgaatacccagaatagggcccaacgttttcagcttttccttcctgttgattagtttttggtaaacagtctttgccttgactgttactttttatcacgtcatttttttaaattattactgcttgcttagaaaccatgttggttttaattttcacaatacgcctgtttctgttttgctaagctgagccacctgtttaaactcttcttgtctcatgaattgggggaaagaaccgtaggcaatgtataagaggtttcatttttttccacagtgaagtaagacattgttcttattcttcatggcattcagaattctgcacaattgcctcttttgcccttttgcatttaaaagtgaggtaattagatttcccaaggttcaatggtcaagagccttctcatcccgcggagttgcttccccacactgctcacaagtggagctgtctcgcgtaatccagttattgctatattgttgttataaaggaactgctttttcagagagctagcatagcatgaaactttatactcacatgtccctttgctttcattgcttttttccccacatttgaaactaattactattttattcagtgtctgtgaggatttctaaacatttttgttaaaaatcttttcctacgtcctaggaattcatttcaaatatgcctaaatccttcacattgtgagatcctgcctttgttgttttatgtttttgtcagatattcgatcgtcagatctattattactgctgaacaaatggaaagaaaatttgtgacatgttggcaccaaataaattagtgtcatagccactgaaacaaaggcatgtcttcgtctagctctgacagtgagatcttgggcccactctgctatttttttgtcttattttctcattttcacaaacagataatgttttacctttgcaaaaagctgtatatatatatatattctaaagcttggatatcaatttttttttcttttttttttctgagatggggcttcactcttgttgcccaagccagagtgcaatgtcacgatcttggctcactgcaacctctgcctcccgggttcaagtgattctcctgcctcagcctcccaagtagctgggattacagrcatgcaccaccacacccggctaattttttgtatttttagtagaaacggggtttcaccctgttggccaggctggtcaggtatccattttttagtcaaaactgaataagatgaaatactcagatttatagagctggccaaaacgtttttgtttttacagcctaatagcaaaagcaatcttgctggtagttggctagtaattcatttctatgatgtagtctgcagcctatgggggaagaggacaagatggtgaagggattaggggaaagcttccaaaatcctttttgccaaagaagttaaggagcttgagcgacccaggttttctctctaaatgggttagtttaacattccagacagtctgtgattcaaacttgtctattcacctatacatctactcagcagagttctttatggcctcataggaacaattcagctgaattcccccatcactgaaactgttccagactttatctacttttgctttttgttttttagagacagagtcttgcagtgttgcccagcgtggccttgaactcctgggttcagatgatcctcccatctcagcctcctaagtagcatgactacaggcccacaccactacacccagctccatctgcattttgaatgtgatgccagcagagtgatgagctttgtggtggtccctgggttcagtgtagatacacacacacacacaaacacacaaacacacacatacttatctcattaggttttcctataaactttatagctagtaatgagaaaggtcctagtttaaattgaagggttttttccctcagtttctgtagtattcattcctaaatagagagatatgttgacagatttatctgaaaagacctcatttttccaaagcttaacacagaaaggaaaatcccgtaatcttaggttagtttcatcaagtgagacaataaatcgccatttgcataattttctttttttagcaaagattccattctaattctccaaaataatatacagtcatgcaccacataataacatttcagtcaacaatggaccagatacataatggtggtcccataagattacaatattatatttttgctgtaccttttctatgtttagatacacaaatacttacattgtgttacagttgcctgcctacagtattcagtaacatgctgtacaggtgtgtagtgtaggagcaatagaatagaccctatagcctagtgtggaatgggctattaccatctagatttgtgtaaggacagtctgtctacacaacagtgaaagcacctaacaatgcacttctcagaacatatccctgttgttgagcaacacrtgactrtatgttactgcactgtttgtaaattttctgaagttgtgctccattccagtgcagtttttttctatgacaatacaacaaagaagctcctgttcctgtgggatacattttgataccgaagaaagcatctctcaaaaataacaaaagcatagctgtattcttgctagaatttctaatttatgttagaaattagttctacagaaagaactaaatgcagagtagtgctccaaactgaaaacatagcttgagatgaacatacatcacagtattaaacaattttagttatttactttctcttcattctaagaacttaagaagacctgacaacatctggatcaggggttcccaccacccccaggccatgcaccggtactggtccgtagcatgtcaggaaccaggccacacggtaggaggtgagcagtgggcaagtgagcattaccacctgagctccacctcctgtcagatcagcggyggcattagattctcataggtgtgggaaccctattgtgaactgtgcatgtgagggatccaggttgtgcrctccttatgagagtctaatgcctgatgatctgagatggaacggattcatcctgaaaccacccgcactcctccgccccctgtccatggaaagattgtcttccacgaaaccagtccctggtgctaaaaaggttggggactgcttatctagatcatatgaaacataagtaactaaaaatactatagattggccaaatctggggaagatgaacatagcatgcatctttttgaaaaggtagttgtagttaagtaactattcagttcagcaaacataccttgactatttacatagccagagcacaagtaagtgctttggctgctaccactgttgctgccctttgacccattaaacacactggcctyccttcygtctctcatgtcctctccccatcttctcagaaacacaaggaatatgtctatatgtctattccttgtgtttctgtcctccacccgcttcctttttctattttggaatggggagagcaaaagtaaaaagctatgctaataagcaagagccataatgtgccctgattgagttgtttggtatctcccaaagtatgtgccaaagatcaccattaaaccatttatagatattctgccagaaataggaggggaagagttctatgggaaacaacragtgtcgtagtccattctggctgctataaccaaataacttrgactgggcaatttttaaataatacaaatttattgctcacacttctgaaaactgggaagtccaggatcaaggtgccaacagatttggtgtctggtgagggcctattcctcatagacataccttctagctgtgtcctcacatggtggaaggggccaaccagctccatcaggcttcttttataggggtactaattctgtcagtgagtacagaacgctcacaacctaatcacctcccaaagacctcacttcttaatactagtagcattggagattaagtttcaacatatacattttggagaaaaacattcagaccattgcactgggttaaagaaaatcaaactgaccatcattagtagcctttgtaaaacctttaaaattctattgtgcaccatggggaacagaatatatacaggttgagtatcactaatctgaaatccasagtgctccaaaattcaaaacttttgagtaccaacataacacacaaaggaaatgctcattggagcattttggatttcaaattttcagattacaaatgttcaaccagtaagtagaatgcagatattccaaaatctgtaacatgtctggtcccmagcatttcagataaggaatactcarcctgtatagtgttgcccaaaacttatttgaccatggaatacttctcctgaacacactgatttcttaacggaaatgctggcgtggaccatgagaagagcaggagagctgcacttttcttgggagatattatatcatatcttggaactcataccacagtaagtggctcccagagcaaatagaaaccagccatcatggacatcctaagaatacatctgtttccaaatctacctttttattcgcggtaggagaaaagaaccaataatccagtcaatgcttttgcttttggaatttctactaagaagccttttcatgaggaaaaaataaaaacaaaaggaacttttaggagtggcgctctgtcagctgcttgtgcatcagctgcttgtggatttggtttagagctttagagaggactggcattgactagctttcactgtcattgtggcccacatgacttcgaaaacactatcattgtgaattttagttatatttgatggtagaattattcttttaaaaaaatttctccattctgtctactgaggctagttcaatgtaatccgtgttttctttcttcccaccttgctgcttctctactcattttattcctttcccttacctgtatgcatgtctcagttctgttcttcacactttggtttccaaagctgtaacttattccttctctccacactaaagccctttccatttgcctccctgaaagtacttctaataccatggtacacacggcatttaccttacatgcatccactactggtttgtgagcaggggaagacaggtgctatatcttagacatgcctggatcttccacctggcttaatatagttattgcacagagtagctattcagtggatgttgattgacgaaagaatgactggctaattatttgtagtgtcctggttacatttccctcagttactggcagtatattgctaagtaaatgtgataggaaagtaagagtggcagaagaagrtgaccttattgactagttcttcagagcatcctttataaataaaaagaaacagagtaatgtttattgaagcaagtgttgaattcaggcagtgtttctcccgccctaggacatacagacagctgcactccttcctctacacagaagaagtcacgttcatattgaggtccttgagtacccatgtttctcttttcattaacwctcagaagttctctaggtcatccctatctcatccaaccattagtgatctggtcaaaactctgtccaagttttctatatctcaagtttcgtagttctccaagctagatggaattgtttaagagacaggggagtactaaatatagtagggaaatttttcccaaatgttgacatatactagaggccccaagttacaaacattcacatttcaggtggtcactacttctctgaccataactgatcactaaagccgctttgtcattaccatgtaagccmccmcaaaacaacaayttatagctcatagaaaaatctatagmagcaggctgggctcgggggctcacacctgtaatcccaggactttgagaggccaaggcgggcggatcacaaggtcaggagatcgagaccatcctggctaatatggtgaaaccccatctctactaaaaatacaaaaaactagccaggcgtggtggcacgcgcccgtagtcccagctactcaggaggcttaggcagaagaatcgcttgaacccaggaggcggaggttgcagggagccgagattacgccactgcactccagcctggtgacagaacgagactctgtctcaaaaaaaaaaaaaaaaaaagagagagaaaatctatagaagcaaatgtgaaggaaagtaagtgattctgcaaagaggaatgcccaggggaactgaccctaaggacagccttctaggccctaatgatataacatttcccactacctacatttatttactgtgctgtattaggctccctgaggttccagtgattacaggagtacaaccatttcttcttctgccagtttgattactgtgtgttgagagtgaaagcctgtctgacaattggttcccttcctcggatgtgccagcggggcaaaccgcccatctsgccatgtgaatcaaaacccagaaacgttgagaggttccaggcagccttttggttacctctytttttctcaaccctgctctttttccaacccccgccctggccaccatggtacacatgctcatctggccactctgttggatgtgtttccatcagactttacacatacccctattagcaagatcactgcactgtgcaaaaacagggagatatcagtcatatagcaaatgaaatagtacagtaattaatatttgtccactcacatagtaggtgctcaataaatgttyccaaccattatgtgccaggctctctattctctgagggagtctcagctatgaggggtgggggaggtatgcaggagagagaaagagagctccgtcacctggcaggaaatgtagtgctctttgcctcttccagtgattcttcagacttcttagccttgcaaccattgcttcaaattcttgtccagatgaaagaagtgctgctcagaagggtgtgggtggggactcttcccacttggtcccttcacctccctttgtagagatctccaaggtccccttagaacacagtggaaccattggatagccagtttaccatgctggtcatttcacaggtttttactgtgcttattaattatcacattcttgttttcaaaagagctctttttgcaccagaacatgtgataaagtggttttactaatcccttgaagttttgttttttccttcaacaagatgatagccaccctcttttttcagaaaaacattaacatgcataaccactacagttaacttcggcgctcattaatgaagcccagaactaatagttacattgtcgtaatttgacaaagccatctaaatctatgcatgtttttgaaagctccctaaacatgctgctaaatcccctaaaaagctactaaactgctttggcagccattagcccagcataagcagaggaactcttttcagtgagtgaacaaacagagaaaatacgctgaatggatggacaaatgtgtttcagctggccctttcatttaccaatataagggcgcagtcaatatcaatcactgttttccctgttgccctgaaaatcacaatatctcttttcatcccacaagctcttttcactaccgtaatgtgtctttagaatgacactggcatcagcctgcttccgctgtctgaagtccagagagcttaaaaacacatttcgggattcttgaaccttcctccccttccgttttcctactgcctcctccctcctccctctgcatccattccgccccctccccagattcttttcaattcttccagctttcctggctgagtaaacagcattcacttctctgttctaatgcagctctccaaagtaaatgttgacaaccctatctgatattcctgagatttaagaactcattaaagagatacacataaagaaatgcttttacatgttggtaatacatcaaaggttgaaaggaatgtggaaactctgtgctatgacacggtgtgttgatgagcaaggcctcactctgtatcagaatatctccccctctgccctcccttgaccgttggctcccgcctccctccaccacatagagacatgcatcctttgccatcccttgttaaaagtatgtgcgtgcacagctacctacccttacagttaagagcaaatgcccttaaaagcaaatgccacttcttagatatcttttggcactcctggttctgagtacttaatacgttgctttgggatgaaggaaagaacagaatgctctgtatatgattaccttttatccttttgaaaacttgagtggactaattcttgcagataaattttagcaatgggcatttagttgtagaaggtaccacagatgaatatttggaatattatgtttctaaaagagtactgattgttttctacctccttttatttacttattttttaaaatttcagattgtagctgtctgcagagaggcagctcttctggctctggaagaagacattcaagccaatctcatcatgaaaagacatttcactcaggccttgagcactgtgacacctagaattcctgagtcattgagacgtttttatgaagattatcaagagaagagtgggctgcatacactctgagaaaatatatatattcaagatgctgaaaatcctttccagagaaaatttgtttctttttaaaattttttgagagtgttaaaaaaaattttactaggcaaaatgtttgaagtatgttcagtagaatttaggggctttggttcttacagattttcaagtcatgtaagtacagtgaaaatatctctgagcataagtttcaatcagttttacctggaaatttgtggtgtggtttaaaaaacaaatgtttagctttttcatttgcgacctagtctgttcatcccatgaagcgatttctttttccagaatctgtttgagtgtctttctaaaatgccaaacatgttggcatcaattttatacagggatataaaaaagtatatgtggataaattttttgtaatctttagggatataaaaaagtgtatgtggataaattttttgtaatctttatttttgaaggccagccagtaaaatggcccaatgtgccagccaggcttatgtggccttgttttcaaatatacatatatgtgttatcattaaaattcatatatgcatttttgttttagccttcttaatctctacctatggccaaaaaaattttttttgagagatattttgtataatacaatgccctttgaaagtgtaagcccactctaagcctagatcagtaggcttgggttttttttgttgttgttttgtctttttttttttttttgagacagagtctcactctgtcacctaagctggagtgcagtggcacgatcttggctcactgcaacctccgcctcctgagttcaagcaattctcctgcctcaacctcctgagtagctgggactacaggtgtgcaccaccacacgcagctaatttttatatttttagtagagacaaggtttcaccatgttagccaggccggtctcgaactgctggcctcaggtgacccacccacctgagcctcccaaagtgctgggattacaggcgtgagccaccatacctggagaggttttgtgtttttgtttttttttcataaaatgcttttaataaatcatatgaagcattcatgtttttacttatacatattttcagggtaccagtaaactttttagttcaaagataggccaaattgtacttttttttttttatgagacagagtctcgctgctctgtcgcccaggctagagtgcagtggcgtgatctaggctcactgcaagctctgcctcctgggtttacttacgccattctcccgcctcagcctcctgagtagctgggactacaggtgcccaccaccatgcctggctaatttttttttttttttttttttattagagacagggtttcaccgtgttagccaggatgatctcgatctcctgacctcgtgatccgcccgcctcggcctcccaaagtgctgggattacaggcatgagctactgcgccctgccgccaaattgtaatcttaaacatattatgttgcattctaaatatgtatatttatgcttcttgttatttatcctcaggatttcttcacactttattacttcataaatactcttgaaaaagctttcagaaagtgattctctgacttcagatcagaaactggcaatgggaagaatgtgcacttaaacttgatcactgtagatctttgaaaattcccagaaagacaaatcagacaagaaatacctgattatcaaaataatgggctatacagttttgtggtggcatacattccttgtttgtttgtttagagataggatcttgttgtgtcacccagggtggaatgcagtggcacagtcgtagctcactgcaccttcaaactcctggagctcaagtgatcctcctgactcagcctcctgagtagctaggacaacaggtgcacactgccatgtcaggctaatttttttttttaaacagagagacagagtcttgctgtgttgcccaggctggtctccaactcctggcctcaggtgaccctcctgcctcagcttcccaaagggctgagattacaggtgtgagccaccatgcccagcctgtggtgacatatattctgaagtcacatctcaaatatttaatcctcaaatatatttacatcctcaaaaatatcagattttcaagacaacactggtttaccagtacataaacccacctaggggacaaagaatattaccacttagaactgtgttgtcaaatacaataaccactaattgtatctgaccattttaattaaattaattacaattaaataatatttaagaattagtttatcagacatatcagccacatttcaaatgctcaatagctacatgtggcaagggtctgccacactggacagagtagaaaacattcccatcattcagaaggttctcttggacgctgcagatctggaaaacaagacttccatattgaaataaatacaacctcaaaacttttatgctctgtgttccctttagttgttatctacatagaaaattatgaaacaagagaggaacttaccttcttccctattaaatatatggctaagggcacaagaaaataagaggaaaacttatccttcagggcctaaacaaggaaatgaaagaaatctcattcccaatagaataaaaaccagaagcttgaaatgactctggtgcaggaggctgggtggtggggaggagggtagcagtctcaatcaacaagtttagatattaatagccactcaaagccttcagcccatataacatgaagtgacaactgagctctgcacataatgctcaagctctataataaccaacactctcagcacaagggtagacaagaaaagaaaaatctcctgctggccaggaagaccacaaggaggctttctgacttggcctgtgcttttgatttttaaaacattttttaaaagaggcctctctgggctgggcgcggtggctcatgcctgtaatcccagcactttgggaggccgaggcaggcggatcacgaggtcagaagatcaagaccatcctggctaacacagtgaaaccccgtctctactaaaaattcaaaaaattagccgggaatggtggtgggcgcctgtagtcccagttactcgggaggctgaggcaggagaatggcgtaaacccgggagacggagcttgcagtgagctgagattgcgccactgcactccagcctgggtgacagagtgagactccgtctcaaaaaaaaaaaaaaaaaaaacctctgagaattctgactatgagcttacctgcccatggctttagaatgatttgaattcacactaccttcaaattcatgaaacctcaaaacctacaaattaacctaaaaacatggagccaagctaaaaatgccctgggggtaactagcacttggactagttacaggaatgtagcttcgtctcagaggattccaaaagctaatgccttgcttaccaagggcttgtaatctcacaggatgtgatgggtggggcctcagatctgctgatgggagcataaattggtacaaccactttggaaggcaactggctatctagcaaagttgaagaccctacaatctaacagttctcctaggtgcatatcccagagcaagtctcacattgatgcagtgagatagtgaataggaaagttcatagcaccattatttttaagtagtaagaacccggaaacaatctaaatatccatcagtaatagatatatgtgatagtcatacaatggaatactgtggcaataaaaaataattagagctacatatgaaatagggatgaaacacggatgaacaaagaatgttttagaggaatatgatatttaaaatttgaagcatgaaaaatatgtgtttatgggggcacatatagtggaagaataaatgaatagaaaagaaaagcaccaaatactggtgaggaatttcctcaggggagaaaagttgagctgcttcaattgtgtcagtaatgtttcatatcttagggtgggtgatgggaatataggtgctgatttaatatagtctgtactttttgtgtacctaaatatttcgtgataatttttaaaagatgggccttaaaccaatacagtcatatcatttaactcaattccatgaatttacaatgcaatccacagtgcccacaaccccatgtttctggaaaatcaggagtattgggtacaatggaataaaatgcaagaaggcaaataagagatcaggcttttaggacctaggaaacaaataaagaggaatttgttgctgaaagtaatgtgtagctgacactctcattacctgacacaatgggagacattatgtctgggaataagacatctatttccatagcactgtagtcctgcaaaggagttggaagttatgaatttttaaagattttagaacattatatctttagtctctcataagccaattatttatatctccacatagcccattattaccattgaaaaggcatgcaattcttctatttgaagcttgttccctttttacaaaagtactagtaaaaatctgagtcatacaaaagagcaggtcaggtgtcactaataacagtttacctcagcttcatctccatgaaggttttacttctaatcccagagtctcatgtttatgtattacaagagtgtatgaaagctgggcgtggtggcacacaccagtagtcccagctactcggtcgggggttgaggtgagaggatcgcttgaactcaggagtttgaatccagcctggtcaatgtagcgagatcctatctcttaaaaaaaaaaagggggggaaacagtgtatgatcctattatttgggtttgtgtgtgatcgaatacatggtatatagttcatggaaaatttaagctcagcaaggaaagaaaatggccagcttcctgtcttaggaagacaatttactttttggcatctgtttggttgaaagtttgcctttgatccagattctttcggatgtcagggatattcacattgacatgtctttttagtgttccaggagattttagtttgaatagtacaattttttcttcttacaacaaaacttagaacggcttctaacttatttcttcatggccaagaaactaccctaacttatctcgataaatatttagttctgtcttatttctaatgtgtaaaacaggttttaaaaataatatatagattttgcatttataaaaaaagatttaatttatagaaccaaacttgaacatatgtttaatttagcctaatcagaaggttacagaaaaagttgctgtaaagatagaataaaagtattgtactggtctgtttttactgaagttccagaatgtgaggttattagagtcttggcttattgtgtcatgttttcctgaatgcttcctttgaagatgagcacacaccaaagcatcctttgatattatgtatggattaaattaacactgctttccaaatgtggtccacatagaaattctaatgttacaaatttgcctttcttccttgcattttcattataacagttgtgtgcacacataggccttttgcctaatgtctttatcaaatataccccttactccaacaaatttttgcagaaagagatgttacagggttttgagagtcctacaaaatcatatggaaatttgtagactcttctttcaggatttagtgataaacatttctggaaagacggttaagtgtcacacccacacacagcaaaacccaaggatatgaaaagaaaaaaaaatagaaacatagaattcatctatgcttaaaatagggaacaaatataacacgtattacaggtttcaattttacaccaacttaaaaaggatctaggaagttttacacgtactgtgcttgacaacacattcagtgtgacaggaaataccttgtttacttggtttcaatacaccatcaattgtaagcctcactatttaaaaacatatttttctagaaaaaagataaagtactataatattgatttgcatgttaatggtattacatcctgattccagaagcattaaaatgtgaacaacatatataataaaaatcaatgaaatacagttaaatgcaaaggaaattaacatgtaataatacattcaaatattttataatacacccacagccattaaaatattacttgcacccaacataattataggtaataatgaaaattgcgacaagcaaataggagaattaaagatactgaatgcagattattttggggccgtgaataatcacaaagtgaaatatcccaaatgaaaatagcaggggaactatgccaaaaatgtggggtgaaggggaaggctgggaggaggagagaaaacaccaaaagaaagctggggtacatttggaagaaggaacattttctgaggaaagaggaaaaaagtttagaatacaatggctttgaagtctcaaaaaaagttaagaaaacatggatgatgt

SEQ ID NO: 94145 - DNA, 144473 bp, Homo sapiens
  misc_feature (1)...(144473): n = A,T,C or G
aaactctgtctctactaaaaatacaaatattagctgggcatggtggtgggcctataatcccagctacttgggaggctgaggcaggagaatcgcttgaacccaggaagcgggtgagccgacatcattgcactccaacctgggcaacaagagtgaaactccgcctcaaaaagaagagaattacctgtaatcctcccaatgtctgaatagatttccttctgtgtgtgtgtgtgtgtgtgtgtgtgtgtgtgtgtgtgtgtgtgtctttttttaatctgggcaagggcaaacattaaaacaaaaagccagcatcatacagtgcatagtattttataatctattttttcactatgtcatgaagattttccatggtgtgaaatattctcacgcaaactcatcttttttttttttttgagacaagatcttacgctattacccaggctggagtacagtggtatgatcatggctcactgcaacctcaaactcctgagctcaagcaatcctcatgcctcagcctccaaatagggactataggcatacacaatcatgtctggctcatttaaaattttttagagatggggtcttgttatgtagcccaggctggtctcaaattcctggcctaaagtgattctcctgcctcagcctcttaaagtgctgggattacaggtgtaagccactgtgctggccacaaactcatctttaagatctatgaagaattctattgtttggctacaccgccatttacctgctgaatcccctgtatggtcatataggttgtttctcaattgtctttcttgataacactcttcttctctaagtattacctgagacagtcaaggatacaacttcacattgcttggtgtgggagtcagggctccgtttaagtaccattagttcactgtgagatgaccagggtctagacttgaagccagcctgcccctatgatgggtgtttctctgcatgtgtttacagtcctatcaggttccccttctctaaggttctgattgtattttgtatattcatttattcacttgctcattgaatataccctgctggctactactgaagatatagtcttactgtcaaagagcagagaaatgagaaaaagggaagaaagtgcagagaatcagaaaaagttaaatagaaggaaagttggcctccaattgaagggggccagagtgtgggagctggcacgatttgtgggaaagtgcgagaggtggtgtgaaaaggcttgaatttgagcccctgctctctaacgagagggcacagctctagcaggctgagccacagcctcctcttctgaaaaatgggtacctggtgtgttggttgctgcagctcatatggcttctagtgagatcacagatatgaacatgctgaacaccagaggcattcacactttattttttaaagttgatggaacttccaggggtggtggaccttcttgagtctcggcttctaaggcattctgctccagcctagccattgcctgggtcaatttctcctccctcctgtaagggcatctaagaatggggaggctgtgggtcacactgggcacatcccggggtcctgggaagcaggtcctgactccctgctctattgcctgcagcgatcggctggcccttctccaggtcaggaggattctgcagcagctgggcctggacagcacgtgtgaggacagcatcgtggtgaaggaggtgtgcggagccgtgtcccggcgggcggcccagctctgcggtgctggcctggccgctatagtggaaaaaaggagagaagaccaggggctagagcacctgaggatcactgtgggtgtggacggcaccctgtacaagctgcaccctcagtgagtgcccacaagaggcgtggcgggtggggctggggagggctggcggccaagtgtggacttggcatagcctcctgaactgcggcatgggaagatgcatccccgtccttttatgggaaaggagtgctgtgtggtcaagtcacctattcaatctgacagacaaggtgtgagccctggtgcctctgctacctggtaatacgatgtgggaatgttagccggcctctctaaaccccaggttcctcatccacaaaaggccagcactaataatccctaccacatagggctaaatgtgtgaggttgaaatgagttagcacatgtaaagtgcttcacacggggctcaagaaatgtaagttggctgagtgcagtggctcatgcctgtaatggcagacgggaggatcacttgagcccaggagtttgagaccagcctgggcaacacagggagactccatttccacaaacataaataaataaaatacaaaatgaacaaaaattacaaatattagctgggcgtgatagtgcatacctgtggtcccagctacatgggaggctgagctggggggcttgagcctgggaactcgaggctgcagtgggctgtgattgcacaactgcagtctacaccctgggcaacagagtgagaccatgtctaaaaaaaaaaaaaaaattagaagaagctgtttagagccttgaaaagcaaaccaaagggaagaagctaaagaaattagattatgatcatttataaatgttctgattctacatggaagggctgatgatgtttctttctctttttcatagcttttctagaatattgcaggaaactgtgaaggaactagcccctcgatgtgatgtgacattcatgctgtcagaagatggcagtggaaaaggggcagcactgatcactgctgtggccaagaggttacagcaggcacagaaggagaactaggaacccctgggattggacctgatgcatcttggatactgaacagcttttcctctggcagatcagttggtcagagaccaatgggcaccctcctggctgacctcaccttctggatggccgaaagagaaccccaggttctcgggtactcttagtatcttgtactggatttgcagtgacattacatgacatctctatttggtatatttgggccaaaatgggccaacttatgaaatcaaagtgtctgtcctgagagatcccctttcaacacattgttcaggtgaggcttgagctgtcaattctctatggctttcagtcttgtggctgcgggacttggaaatatatagaatctgcccatgtggctggcaggctgtttccccattgggatgcttaagccatctcttataggggattggaccctgtacttgtggatgaacattggagagcaagaggaactcacgttatgaactagggggatctcatctaacttgtccttaacttgccatgttgacttcaaacctgttaagagaacaaagactttgaagtatccagccccagggtgcagagaggttgattgccagggagcactgcaggaatcattgcatgcttaaagcgagttatgtcagcaccctgtaggattttgttccttattaagtgtgtgccatgtggtggggtgctgtctggggcatctgtttttcattttgcctgtggtttgtgttgcaggtgttgatagttgttttaaggattgttaggtataggaaatccagtaaattaataaaaaaattttgattttccaataaactttgcatgaagtggtgatatttcttctgggaggctcacttggtaataccatgctttgttgatggaataagggatgcagagtcagaaggagcttgagcatttttctcgagtccaaacttcctaccaacaggggtaatatatggaatatcttctacaatatccttaacagattatccagatgtctttagaatacttccagtaactgagcatttcccacatgatcctacagctcttgcctttgaacggctggagtggactggaagtccttctgacttctgagctcggttcctcccatacaccccactgatctccattctaccctgcagaactatgtgtaataggcctgtccctgaccatttctccagtggacttcctctctctctcctctcttccccactttacctgaactgcctgtgcctttctgttctgccacatagttatctgtatgagtttcacatctggccagatagattgtaaactctttgtcaaacacattcttgtattgctctagtgaacctagcactgtgccattcctatcaaatacttacttgtgggaggcatgattgaagaaatagaacttttcaagaaattttcttcagataaagtatagactgggtatggtggctcacacctgtaatctcagcactttgggaggccaagtctggaagattgcttgaggccaggagttcaagatcagcttgggcaacatatcaagacccccatctgtacagaaaaatttttaaaattagttgaatgtggtggtgcacacctgcagtcccagccactcaggaggctgaggtgcggggtatctctcgagtctaggtttgaggttacaatgagctatgactgcaccactgcactgcagcctgggcaacggaaagagaccctgcttcttaaaaaaaaaaagagagagagaaagagaaagaaatgaaagaaagaaagaaagaaaaagaaagaaagagaaagaaagaaaaggaaggaaggaaggaaagagacaactattgtcatgggaaacaaactgaaaagaataatccacagtgattttatttgtatttatgtgcttaattacatacttaagtatgacaactccacagagtgctcttgctgtctcttcaaaagattatggctttggtcaggcgtggtggctcatgcctgtaatcctagcactttgggtggctgaagcaggcagatcacttgagttcaggagtttgagaccagcctggccagcatggtgaaaccccgtctctactaaacatacaaaaaaaaaaaaaaatagccgggcgtggtggtgtatccttgtgatcccagctacttgggaggctgagtcaggagaatcacttgaacctggggggtggaggttgcagtgagccgagattgagcaactgcactccagtctgggtgacagagcgagactctgtctcaaaaaaaaaaaaagtttttggattccagctctaagcgtcaccatttgctgaagcgggatgtccagatggagtgaagggggctgagtctaaagacggagagagagagaggccagctagggctggggataatgagggagctgagggttccccaggacatattttttacactttcttttttgttgttttttgagacaaggtctcattctgtcactcaggttggagcatggtggcgcaatcacgaatcactgcaaccttgacctcccgggctcaaggcattctcccatctcagcctcccgagcagctgggactgcaggcgcatgccaccatgccagctgatttttaaattttttgtagagacaggggtctcactatgttgccctgacttgtctcaaactcctggcctcaagtgatcctcccgccttggccttccaaagtgctgagatttatagtcgtgagccactgtgcctggtccatactttcaatacaaatgtatggtgatactactgtgaacaggtcctagatttaccaaaattatctttttgtgtgtttgtgtattttaaggttatatctctttagagaaatgtcgtatgaatttattaaatgtatctttttatattttgaagttatgcctctttggagaaaggtttcaccttatcaggtttcatcttaatcagttgaaaaccttgctgtccttattctctttccccaggtctcccatttcatggtaagtcatcctcagctcccagtccctctttcccctggttctgctaggggtctttctctttgctgtctttcctggacaaatgatctgacccatagattcaggttgttgtgccactaagttctcccatgacctggtctctcagcacatgtttggcaggttagggaggtcacccagtcccttctcacccagccgtggtctcttacaagaaaaaggagacacaaggtatctaggcaagcttgcacattctgactaattgattgcatcatagaatccttgaacaagaaccagaactccagagagggaaaacatctatcttgctgtgtttggacaggccagcccctgaaacatcttgggcaatggagggttaacttctcaaagtttaataggcaagaccagcaaccatgcaacaaggtaaattgtcctcacgagaactccaaagactatttttctctctctttttttgaggcagggtctcgctatgttacccaggctgctctcgaactcttgggctcaagcaatccccccatcttaacctccccagcagctgggactacagccacgcgccactgcacccagctgacttttccttctaagcatctttggctgggcgtggtggctcatgcctgtaatccctgcactttgggaggccaaggtgggtagatcactggaggtcaggagttctagaccagcctggccaacatggtgaaacctcatctctactaaaaatacaaaaaaattagctgggcatggtggcaggtgcctgtaatcctagctactcgggaggctgaagcaggagaattgcttgaacccaggaggtagaggttgcagtgacccaagattgtgccactgcactccagcctgggtacacagcgagtctgtctaaaaaagaaaaaaaaaaaaggaagagagagcatctttatcttcattttctaacctttaagtgttactttctcccagtaacattttgcccagaaagaggtgatgaatatagatttaagaataagattttccccatgttgctgcctttccagaacaagtgagttcattctcatttgtctttcttcagaaatcttttatctgtctttctcccattagctggaatgggtgctccatgagaataaagacttgggttccattcttcctattgtccccagagcctacatactggctggcattgagtagcaattgaacagttttctgaatgaatgaatgaatgaatgctcaaataagcacatgaattaattatcactttcctttgaatctctccattcttcttcctcacccaatggggctcgatccttatacacagaagatactctataaatgatgattcaatgaatgccaagccctgttctatgcactgaagaccaaaagaaataaaagacatcattcctgctctgtaagaattcataggctagtaaggaaagaaagatatataaatatctgtaatacaacatggtaaacaggaacaaggtgacgactgttcctgaccatttcctgtatcctttagatcaggaactctcaacctttgtgcacgtgtatgtgtgtgtgcatgtaccatgtaccccttggacaatcaagaatacaagaaaccttgtattctttctcagaataatgtttttaaatgcataaaatacacaggattataagggaaattaatggcrtgaattacatttattaaaatgttaaagtggcaccatggtaatacatgcatgtatttattaatgcattatkcagcaagatccagcaggaacctaataacaatgacaattttgaagtcttttttttttttttttgagatggagtctcgctctgttgcccaggctgaagtgcagtggcgcaatctcggctcaccacaagctctgcctcctgggttcatgccattctcctgcctcaagcctcctgagtagctgggactacaggtgcctcccaccacgcccggctaattttttgcatttttattagagatggggtttcaccatgttagccaggatagtctcaatctcctgatctcgtgatccaccctccttggcctcccaaaatgctgggattacaggcatgagccactgcacccggcctgacaattttgaagtcctgatgagtgtaaacactactttgagacatttgcaacaacagcatagatatgaatatatctgtgatttctctttttttttcttttttttgagatggagttttgctctgttgcccaggctggagtgtagtggcacaatctcagctcactgaaacctccaccccctgggttcagtcaattctcctgcctcagcctcccgagtagctgggattacaggcacctgccaccatggccagctaatttttgtatttttggtagagacggggttttgccatgttggccaagctggtctcaaactcctggcctcaggtgatccgcctgccttggcctccaaaagtgctgggattataggcgtgaaccactgcgcctgacccaatatatttgtgatttccactggagacaaagtcacagatgctgctagcactagtgggtttgttgcccacattcagaattaaaggaaatgctaaatttcagttacagactatcagaaattaatttgtatttttttcccacagaagcttacggatatcaccttctacctgaagggtctctgatgcycaggttattaatctctgatcagaatgttctaatggagctggcacttatttagagacagatcttagatggcagatctaagcaattttagcattccttgtagtacagcactgatggtagtaaattcacgcaacttttgtttgtctgaaaatgtctttttacccttccttttttaagaatacacaatacacagttctagtttggtacttttttcctccagtattttaagaatgtcatttcattttcttctggcttccataatttattttgggaagtcagttataattcttattrctgtttttctgcaagttttttttttttcccctttctagctgtttgtaagggtttctctttctctttagtttccaacagtcatttaactataatgtgcttggatgtgtttttgttttagtgcatgtgttctttttttttctttttttaaatttatcttgcttgggctttgctaagatcttcttgaatctgtgggttaatatctttcattgtttttttgaaaattcttgttttatgactcattatttctcctctttccttctgaaattccaatatgcaaacattagagcatttcatcctgtcttacatctctttcaagttctgttccagtttttttgccattttttttttctctgtgcttccgtttgcataattccttttctttcttttttaccttttttttttttttttgagatggagtctcactctgtcagccaggctggagtgcagtagtgcaatctcagctcactgaaatttccgcctcttgggttcaagcaattctcctgcctcagcctcccaagcacctgggttacaggtgcccgccaccatgcccagctaacttttgtatttttatttatttattcatttatttatttgagatggagtctcactctgtaacacaggctggagtgcagtggcgtgatcttggctaactgcaggctccacctccggaattcatgccattctcctgcctcagactcccaagtagctgggactacaggcgcccgtcaccacacccagataatttttttgtatttttagtagagatggagtttcaccgtgtcagccaggatggtctccatctcctgacatcatgatccgcccacctcggcctcccaaagtgctrggattacaggcatgagccaccgctcccagcctaacttttgtatttttagtagagatggggtttcaccatgttggccaggctggtgtcgaactcctgacctcaggtgatccccctgycttggcctcccaaagcgctgggattacaggcatgagccactgcgcccagccagtttgcataatctccaataactagtcttcaagttcagtgacagattttttttctgctgtggccaacctgctcttaagcctagccaatgaattcktaatttaaaacattatatttttcaattgtagaatatccatgtccttttttagagatttaatttctctattgacattatttatcttttcgtccattttttctaacttttcttttatttttctttaacataattacaaaaatcatcttaaagtccttgtctgctaattccaacatctgggttacctgtaggactgtytgtgttgtctattttttctcttgcttacaggccacatttttctacttctttgcatttttttttaatattaagcataaatagccatagagtctgatgtagatattatttttcaccagaaagagaacactctttcttctctcaggcagctaaggtgatggactgatcactttgatccagtctgatattgagctggatcagttcacttttcgtttcaaatatcagctgagcatagtggctcatacctgtcatcctagcactttggtaggctgaggcaggatgaccacttgagctcaggagttcaagaccagcctgggcaacatagatctcatctgtatttttttaatttttcaaattttaatttaaaaaatacttttgcccaggcgcagtggctcacgtttctaatcccagcactttgggaggccaaagcaggtagatcacctgaggtcaggagtttgagaccagcctggccaacatggtgaaaccttgtctctaccaaaaatacaaaaagtagctgggcmtggtgtcacacacatgtaatcccagctaattgggaggctgaggcaggagaattgcttgaactcaggaggcagaggttgctgcgagccgagatggcactccagcctgggtgacagagcaaaactctgtctcaaaaaaaaaaaaaacagtttcaaatatcttagagtcatgcctgtcttgtgtttattacaggcccttttttcaagcagccttctctttctcaaatacaacaatattatagggtatctttctctgaatttcaatctagccttctttactgcccagaacttagcaaaaatcctatggggagaactggcaggtggggaaaaccagctatgcatttgaagcttctccagattctactctgtctagccagctcacatgaccataaaagctggctgctttctcattctctctgagtagtcttgcctctattctggcaagtctaatctcccccaacccatgccgagactcaacaaatgccctcatagaggaaagcagtcatgaatctccactcactttgggagggtcccttctgctctggaatttaattccattagatttccagccttccagtatctctaaaaagaaatatatatgatttttagtttatccatatatattttttctaattgctatagtggacacaatggtctactgctcccctcttacatcctatatcctaaccaccaattctaaatattttaaattcccattacaatgtcttattttattcatgagttattaaaaaaaaaaaaccaaaaaacaaaaaaccttttaaggccgggcacggtggctcacgcctgtaatctcagtactttgggaggccaaggtgggaggatagcttgaggccaggaatttgagaccagcctgagcaacatggcgagaccccatctctactagattaaaaaatacataaaaaataaaattwaaaaaaaaaacaacttaaatttgtacatttgtaatttccaagtatattgttttaaatttgatcattttgttaattttaacttaattatatgttgatttatggcctatatcagggattgactaattacttctgtaaagggccaggcagtcacaattgtaggctctgtgggccatatgatctgtgctgttgtaacaaaaaaggagccatagacaacatgtaaatgaacgggtatggcttggttctaataaaactttatttacaaaaataagtgacaggttggatttgtcctgcaattcagtttgtcaatccctggtctaaattatcttaattatttacaaatttattaagacttgctttataaatatgtttgctttgaaatttgagtgcttttcatgtgcacttaaaatatattctgtattagctgggcacagtggctcatgcctgtaatcccagcactttgggaggccgaggcaggtggatcgcctgaggtcaggagttgagaccagcctggccaacatagtgaaatcctgtctctactaaaaatacaaaaaattagctgggcgtggtgccaggtgcctgyaatcccagctactcgggaggttgaggaaggagaatcgcttgaatccaggaggcagaggttgcagtgagccaagattgtgtcattgcactccagcctgggcagcaagagcaaaactccttttcaaaaaaaaaaaaaaaaaaaaaaaaaaaaaaaatatatatatatatatatatatatatatatacacacatatatattctatattaaataagtaattctatatatttattagattaaacttgttttgttgttcaaatcttttataactttgttgattttgtttgtttgcttgcttgatctaatggcagagaaaaatacatttaaatttattcttgtaatgtggatttgtcagagtatttctgtaggtctaacaattcttgctttaatatttagaggttaatttattagaatattaacatctggccaggcacagtggttcatgcctgtaatcccagcactttgggaggccgaggcgggtggatcacctgaggttgtgagtttgagaccagcctggttaacgtggtgaaatcctgtctctactaaaaatacaaaaattagccgggtgtggtagtgcactcctgtaatcccagctactcgggaggctgagccatgagaattgctccaacccgggaggcggaggttgcagtgagctgagatcgtgccactgccctccagcctgggtgacatagtaagactctgtcttaaaaaaaaattaatatcttaattttaagatattaattttaaatgattaaaattatttaattattaattaacataataattaaacatcaaatcattcaatcatttaattaataataattataactataactattatctttatatataattacatataataggatattttatatatctatatatatcctacatatatgtaggatggaagcgaaggattgataaatgtatcttctcccaaagaagacaagtatttcagcatgcttttatgtattttagtctctcttacccctatagcccatcatactgaaatggtctagaattttagttatgtgytattattcataaactttcacttatttggcttcctctaagtgttttgacggagagatattatgtggcaagctgagggtttaaatcactgagaatatttttattatgccatcatatttgaatgctaatttcgctggatataaaattctagattcaaagatccctttcttctgttctttaaatctattaccttattcttttcttgcatcattggttgcaagtctaatgccaatctggttcttgtttctttttgagtaatctgttttgtgtctctgaaagcatttaaaattttctttttggctgggtgmagtggctcatgcctataatcctggcactttgggaggctgaggcacgaggattgcttaaggccaggagctcgagaccagcctgggcaaaatgttgaaaccccrcctctattaaaaatacaaaaattagccaggcatggtggtgcccacctgttgtcccagctactcagaggctgaggcaggaggatcacctgagccttgggaggtcgaggctgcagtgagccatgatcatgccactgcactccagcccgggcgacagagtaagaccctgtgtctaaataaataaagaaataaataggattctactttagaaattttatctagcttttttcatttattattatatattacaaaaaggctttcccactctccatcttttgtatttttgtagctccttataagcctaaataaaatactatttaccacacaactgagtgctgataaaagtggtttgttttaggccaggcacagggctcacgcctgtaatcccagcactttgggaggccgacacaggcagatcacctgaggtcaggagttcgagaccagcctggccaacatgacgaaacccygtctctactaaaaatacaaaacttagctgggcgtggtggcaggcgcctgtaatcccagctactcaggaggctgaggaaggagaattgcttgaacctgggaggcgaaggttgcagtgagccgagattgtgccattgcactccagcttgggcaacaacagcgagactccgtctcaaaaaaaaaaaaggtttgttttatagtgaactgtggagggataagggacaaagctgggcacaaaaatagatctgatggtagggttaggactgagggggcagaggaaatgagactgacatttcctagggaaactgacaggttagccaatgttcctattccaatccatcttcttggaaactgcctgccatttcctctgacatctgaagcacttgctgtaaagcactcactgcttacactatggctgcctggctggctttccttgagaatatgtatatttaatctgtattttgtctatgaagctttttgagggctctgtagttctactccacacattgcccactcacccatcccattttcctccggtagctgctacatggaaagtactatggatcaaattggaaatccatctctcctctcaaaggcagctaaagctatgtggtcaggctctgggccccagattccagtcctgatttctgagtctgctttccaggtcagggaatgcactggggctgacgacaaggctggaacgtcccgggattgaagcttggatmcgaactgttggacggcgtctggagttttgcacaaaagagaattgaattgtagatcagctgggaagttactgtggtagtcctggtgccctgyggcctccagcgactggaaccctgtgggagcacatagctggcattttttgctagagattaggaagtcttttgcttcctctgtgaaaaggcttgaattcaatggactgtgtggtaagatgaagttgttttttttttcccttattgataaaaataaaacagagatttggcttgggttattacgcagtggtgggcacatgagcttgctctccagtgtttggcgggaagccagttgaagagcatgtggttacatttttgtccggcatcatcaagagtgtagagaagctgtgattctagcctcagaggagcgagtttttattgtggggtgactcttcaaagaccatctttatgcaagaaatgtcagaggcccatttcatagtaagtttctttggaagttttgttttcgtcgatgctatattatcactcatgggctgatgtcgtctccttatgatggtgtccctaagagccttcacaggcctagggagcactggttggtggtgggaggcccaggctgagaggcaggtctctgtgttgtatttcttcctgggctttagtctgtctctttctaaaatgggctaatcctctctctgccctcttcctcatgtggtgaagggcgttgggacaacatgcaaatatggttcaaaggagaagtgaagctgctcttttgtactctgtcacatttgcttgctctgaattgggtcttttgttagcacattctttgaagtagaacttgtccatggttgactttggtgtcttgatttggagaagaaattgagtagtgcccaactgcaggtagactgagaggctgaactgggtttgcatggggtttgcaggatgtgcagaatggttaaatgaatgtatgaatgaacatatgtagatcgaatgtttgatggggaacctcagaatgacccaagaaacatgtttctccagaaactaagtagatcttgggctgtgaagtatttagtacccataacaagcaatgatagtttaaatatgtagtccaaaaatttcttcctcatcagtcaagtcataaatgcaggacttaaaggaaaccacatgtgagaggtgtctgtgacctaggatattggaggcctgggtcacagttaggaatcaggacctcgcaaaatttacttaacattctccagaatgtggcccaatctacaaagccaccctcatgtcagctgctcagctggagagcacatgtgcttgaagtttctttcaccttcactcttgctttaataaaagcatgtataagtccaggagcttattttatactttggttgatcagcgattgtgtcttcactaagaaccacccatattgtcatccttgggcagacacgaggaaggatgaaaggattgacctgcgagaatctagagaactaaggccaagggaagcaggtcagatggaggtagattgcatctcagatttaactggccaatgatgaaaaaaggttttgttttttttttttagacagagtctcgcactgtcacccaggctggagagatctcggctcactgtaagctccgcctcctgggctcacgccattctcctgcctcagcctcccaagtagctgggactacaggtgcctgctaccatgcccagctaatttttttgttttgtatttttagtagagacagggtttcactgtgttagccaggatggtctcgacctcctgacyttgtgatttgcccacctcggcctcccaaagtgctgggattacaggcgtgagccaccacgcccagcccggaaaaggttttttaaagagtgaggtagcacctacctggatcttgtcttgggtgggtgctatggtctgcatgtttatggccccccaaattcataattgaaacctaatctccgatatgataatattagaaggtggggtctttggaggttattaagtcatgagggtggagccctcacgaatgtgattcatccccttataaaggagaccctagagagcttgtctgccccttctaccagtgaggacggagtaagaaggctgtctttgagaaatgagccctcaccaggcaggcaccaaatctgctggtgacttaatcttggatttgccagcctccagaactgtgaaacatacatttccatcatttgtaagttacctagccaatggtaatttgttgtagcagcctgaacggaccaagacagtgagggtgggagtggaatatgatgtgctagattctttccagttttcaaataatatgcttttaccttctggagtttcatcccctgtgccactaatctctgaattgctaaaatctttgcatttttgtctcctactctccactttatcaaacaacctgtcctatgtctctgtatagctgcagactcttatcagacctctcaaaatatcgtttatgacttcctcttccatgtggaggacatgagagagtgagagagaactgggatcttctgtacttttaatgagtgaatccacatgattgtaggcatctagaatagggctctcaaactttagcaggtcacagaatcaccaggagggcttgttaaaacacagattcatggttccaccccaatgttttccattcagtaggtctgtggaagggcccaagaatgtgcatttctaacaagttcccacctaatgctgttgttactggtgcagggaccacactttgagaaccaccaccctagaggacggggaccaagccagcccactctcagtaaaatcccaaatgcagagggggcagattaataagtaccagggtgtgctgtcctcttcctcctctttctcttcctcatcctcctcctttatcgaggcttacctgatccctgcctcaggggcctccaaagaaaactctgacttagaccaatgtgtcccagattcaatgtcactttctataggaagccgttcatgaaccccaggattagatgttgtggcttcctatactttttcttgatagctatcatgattcacaatttgcaactgtgatttgtgtgatttcttaatctctgtttcctccagagaatgtaagctccatgaagacaggatatacgaatagtaggaaaaaaggaagggtttgggtggggaatggtggtgagtcacccttaggattgtgcacaataaaagasagtgaaacaacagattttgtccccaaagaataaaggaaggggagggaggaggaaggaaaaaggtggcctggaatatccattagaacgttggctgccaagtctagcccagctctctctggtgccaaccagaggtttgcctgctctattttggccacagagtgggcatttcatctctccacgcattttaaaatcctagttgtttctttttttagctctgagctacttacccgctctaagcctcagctacagcaccsataaaacaaagaattaaggctccakggctgaagagacctaagtacaacacccagctctgctactgttgcatttccatgagtgcctgaattaactcctgtaagcgtcggcttccctcctgaaaagggtttctactcctaatcttgttgggacacttccaggaatcagggcacatgaagtccttagcacaatccctggctcaatgcacatgagtggccattgtcatcaccatcttcaatatcaccgtcctcctcaccattgtcaccatttctgtccccacacccaaggtttctgaggtctcaatgggataaaataacttcataaccatgaagcactgtctgaatgtcaagggcatccaagtgccccatcccctgcccacaagtcctggagtaacatccaaggatgccttccttccycaggacgctggcgcaggctcaaccccttgcaagcctttggtgactcttgattttacgacaaatacatcttttgtctcttctgttttcaggacttcaactaaccaactaaagaactgttccccagagcattgttcctgagaaggaaaagagtccaaacacctacccacacctgctttgtgccaagaatccacagttggattgcaaggacagtgtatgttgtccttttggaaaaatgagagtgagcccaaatgaagaacaagcaaaggtgtctcaagtcatcccaaggcaactagggggttgcctgggctgtgacggcctcacttctgcatgagactctctctctggcttttcgcattaagtagcttcctgtccttctctgtaaaacaaaatgaatgagctgggtgcggtggctcatgcctataatcccagaactttgggaggccgaggtgggtggatcacctgaggtcaggagtttgagaccagcctggccaacatggtgaaaccccttctctactaaaaatacaaaaaaaaaaaaaattagctgggtatggtggcaggcgcctgtratcccagctacttcggaggctgaggcaggagaatcgcttgaacccaggaggcagtttgtggtgagccaagattgcgccactgcactccagcctgggtgacaagagcgaaactcagtttcaaaaaaaaaaaaaaaaaaaaaatgaatgaaggtataatctggcagggtgcggtggctcacacatgtaatcccagcactttgagaggccaaggcgggaggatcacttgagaccaggagttcgagaccagcctgggcaaaatagagagatcccatctctaccaaaattaaaaaaaaaaaaaattagcctgacgtggtggtgcatgcctgtggtcccagctactctggaggctgaggtggaaggatcacttgggcgcaggaggtcaaggctgtagtgagcccatgatcgcaccactgcactccagcctgggtgactgagtgagaccctgtctcaataataataataataatataaataaaaataaaaataaagagctggctgggygtggtggttcatgcctgtaatcctagcactttggaaggccaaggtgggcagattacttgaggtcaggagttcgagaccagcctggccaacatggtgaaaccccatctctactaaaaatacaaaaattagccaggcatggtggcaggcaactgtagtcccagctactcaggagactgagggacgagaatcgcttgaacacaggaggcggaggctgcaacaagaggttgcaatgagccaagttcgcaccaccgcactgcattccagcctgggtgacagagtgagactctgtctcaaaaaaaaaaaaaaaaaaagaaaagaaaaaaagaaaaagaaaataaagagctatccaagtctcaggatcttaaaaggtagatcctggggtttaagcccacttattttacagatgaggcccagagagaggcaaacactttcccaaggatacacagtaatttgtaactgggccaaagctcactatagttaagtctttttgtttgaggtgactgagataatgccatctatgattttttcttttaaggcaaatgctgtgctgatattcctcacagtttgagacttgtaaaatgcctctcttccctgagtacccatctgtcctctactaccctcagggtttgggactgatgctctgcagttgagggacagtgtgcaagattggttaagaatggaggagcctgatttcaaatctcagcttggttagcttacagccatatgaccttgggaagctacttgactgctgtgagcctcagtttcctcatgtgtaaaactgggaaaatagaacttatgaggagttcttgtgaactaatgcctgtgaggtattatatttatagcagtgcctcgcagacaggaagtattcaataaatgctaatttattgaatttaatgacctccaagagagttgcttaagggcaaagtggaagtcaattgaatagtgggtacatcctctctgaaagcaaggctaaaactatgtaaaaaaaagcatcactggaaaggaagaaggaatccagctgcttaagccaagtggagtggctcactcgtgtaatcccagcacttcgggaagctgagagaggaggatcactggagcccagcagtttgagaccagcctgggcagcatagtgagatcctatttccctttttctgagacagaatcttgccctgtcgcccaggctggagtgcagtggcacaacctcggcttactgcaacctccgcctccagggttcaagtgattctcctgcctcagcctccagagtagctgggattacaggcactcaccaccacgctcagtaatttttttagtttttcttttttcttttttttaagacggagtctctctttgtcacccaggctggagtgcagtgacatgatcttggctcactgcaagctctgcctcctgggttcacgccattctcctgcctcagcctcctgaatagctgggactacaggtgccagccaccacgcccggctaatttttttgtatttttagtagagacagggtttcaccatgttggccatgatggtctcgaactcctgacctcaggtgttctgcccaccttggcctccccaaatgctgggattacaggcatgtgccaccgcacccagccgtgagatcctattccttaaaaaaacaaacaaacaggccgggcgcggtggctcacgcctgtaatcccaacactttgggaggccgaggtgggtggatcgcaaggtcaggagatcgagaccatcctggctaacatggtctctactgaaaatacaaaaaattagccgggcgaggtggcgggcgcctgtagtcccagctactcaggaggctgaggcaggagaatggcgtgmactcgggaggcggagcttgcagtgagccgagattgcgccactgcactccagcctgggcgacagagagagattccatctcaaaacaacaacaaaaaacaaacaaacaaacaaaaaacagaaaggaatccagctattagcaaaattcaaatgaattgtggatttttctgttattaaaatgtagagatatcaggatccctaaactcaagtaaatgacacaataaacgaagcatcaaatttgaagctgtgttatgatggtgcctgtgccagatttgggggaagggcaatacttggcttacacagatgctctagatcttgaagagggagagaggggcacagttctgcggcgacatgtgcgagtaccagagagagggccagttacttcggggtggagagtatatggagaatggaatgactagctataaaccagcttgcatggtgggctggtggaaacaccagtttctacatgacctctagaccaaacactctctagacaaaaagcaactctgctttgaatgaccttcaaagcgaatgccctgggccagtcccaagggttccttcccctcctcctactccgtctcctgggtaacaacattgtaagmctgggaagaaaggrggtgatagcataatcttctctgtcatgttacagacccagggagcttttaagaaataaataccartgggaaagaggtaacatgcattctctgcaagtactttggtaactcatagcagtgttttaactagactcgggaagttgcctggggatcagaaaggaaggcaaaaatgtgtgtggaatttgtcaaaatttgttaagcccatatagcataataaggagaacatctatctayaaaaacaaagttaaatcataaattatagctgagtacagtggctgacacctgtaatcccagcactttgggaggctgagggaggagaatcgcttgagcccaggggtttaagaccagcctgggcaacatagtgagatyccgtctctacaaaaaattaaaaaattagccagctgtggtagtttgagcctgtagtcccagctgcagaggctgaggtgggaggatcacttgagctctgaaggtggaggctgcagttagtgtgattgcactactgcactccagcccaggtgacagagcaggacgctgtctcaaaaacaagcaaacaaataattgcaaggcatatattttatttttagatcacgctttacttttttttttttttgagatggagtttcgctctcgttgtcctggctggagtgcaatggtgcaatctcggctcactgcaacctccgcctcccaggttcaagggattctcctggctcagcctcccaagtagctgggattacaggcatgtgctaccatgcccggctaattttttgtatttagtagagagggggtttcacctcgttggtcaggctggtctcgaactcctgacctcaggtgatccacccacctcggcctcccaacgtgctgggattacaggcatgggccacctcatgaggcgcctggcctcatgctttgctttgaactaggggaaccatcagtgcctctgtcgaggaagctcatagagaaaccagggacaaatcctagaaggctttacgctttcagccagggctctccatatcattttggttatgcactccatcagtaaaatatttttgtagacacattgtattagtctgttttcgcactgctataaagaaatggccctcaattatgtcataataacatcacacaagtatttcagttgaaaaaaaagaaaagaaagaaaaagaaatgcccgagactgggtaatttaaaaaggaaagaggtttaattgacttacagttcagcatggctagagaggcctcaggaaacttgtaatcatggcgggaaggcaaaggggaagcaaggcaccttcttcatacggctgcaggaaggagaggtgcagggtgaagggggaagagcctcttataaaaccatcagatctcatgagaacccactcactatcacaagaacagcagggggggaaccgcccccatgatccaactccttccacctggtctctcccttgacatgtggggattatggggactatggggattataattcaaaatgagatgtgggttgggacacaaagcctaaccatatcacacattcctcagtacatatattttaattattttgagattatatatctttatragtccacttatgcgaaatggccagaaggcaaattcacagacacagaaagtagattagtggttgccaggggctgggggaaggatcgaatgagaatggctggtaatgggtatgggtttccttatagagtgatgaaaattttctggaattagtgatgatggttgcacaaccttatgaatatacagaaaaccactgaattatacactttaaagggtgagtcttttggtatgtgagttatagctcattttttaaaaaatcacatataaataatgtgtacattataaagaatagccttaaaaagttatagggtgagattttaaaagtcgtaagtagactgaatgcagtggcttacacctgtaatcccagcactttgggaggctgaggcagggtaatcacttgagaccaggggttcaagaccagcttgggcaacatagcaagacactgtgtctacaaaaaaaaaaaaaaaattaaaaattaggctggcatggtggcccatgmctgtggttgcagctactcagcaggctgaggcaggaggattgcttgtgtccaagagttcaagtttgaggctgcagtgtgctacgatggcaccactgcactccaacctggtcaacrgactgagactctgacttggccttttggagatgtctttgctaatttccacttctattggatttcctctccaaagcatgactctttctttggacatagtcataagcagagaaggttgtagttggtgacgaggtaccacttccagaccaggctccagggaatttcttctagaatgacaggctgccagaaaccttgactgggtgcagtagctcaggcctgtaacccagcactttaggaggctgaagtgggaggtttgcttgagcccaggagttcgaaaccagcctgagcaacagaagctgcagtgagctatgatggcgccactgcattctagtctgggcaacagagcaatackctgcctcaaacaaacaaaaggagaaactttatgacattttacctgggtttacgaatactctagaaatgtgtctgcactatgtcttggttctcagtattagggtgtttagsttcctaattggtgaggacaaaaatgagaccgacaatcctctgaccctgccttctttgaacttggcctttctctaggcgttcaaracccagctgttgagagtagaaaagcagaagaaaggacccgaggtcagcaagtgccctccccacaatggggcagatctgccagcgagaatcggtaagctctggtgtttctttctttctttctttttttgagacgtttttgttccatcgcccaggctggagtgtagtggcgcgatctcggctcactataacctctgcctcccgggttcaagcgattctcctgcctcagcctcccagtagctgggattacaggcatgggccaccacacctggctaattttgtatttttttgtagagatggggtttctccatgttggtcaggctggtctcaaactcctgacctcaggtgatccgcccacctcggcctcccaaagtgctgggattacaagccgctctggtgtttctttagcttctcagagggctcacatgtaccatagcctgctcaacctgctctccctggcagaggggtgtgttggggtccatcttagaggagggaaaactctgaccaagagcacagcaggaaagcgtcatgaggcaaggcaggagccccctcagacccagcctctaagtcttggtgcagcaggggccacttgtgttctgaccaagggaagcccagaggatcgttctgtatccccctggttaattgctttttagacagttatgctgcgaagtcatcagtgtgtgctggaaataggagtttggctttttcttctctaagagaagccccctctggctgaattttatattgccatgtaaaaatgggcttctgcccattaaaaaaaaaaatttttttttttttttgagatagagtctcattctgttgcccaggctggagtgcaatggcatgatctcggctcactgtaacctctgcctcctgggttaaagtgattcttgtgcctcagcctccctagtagctgaaattacaggcgtgygccaccatgcctggctaattttgtatttttttgtagagatggggttttgtcatgttgcccaggctggtctcgaaaccctggcttcatatgatccgcccacctcagcctcccgaagtgctgggattataggcgtgagctactgcacccggccaatttttttttttttttttttaaattttaacasagacaaggtcttactatgcttcccaggctggtgttgaactcctggcttcaagtgatcctcccacctcatcctcccaaagtgttgggattacagtgtgagccactgtgcccagcccagaagcccgttcttacatcttaaagagctttgattctccccctggatgttgaaataaaccctggaaaatgtttataggataaattatgttctgagtagcgggctcatttcaaattaatctatgctgtaggtgggtccctctgaagcaaggactacagctgttccaccccgccccccaccaacagaacaatctgggaaattgagacacagtgggcttgatctcaaagacaaacacagtgctcatactaactgagtgccctgagcccagaacactctcagagccccatttaaatcactgcagtggcctggcctgtttgctttatgaagactttcccctggtcagcccttgggtggcaaattaattcctgattagtatctgaaagtggacaatacaagctcaaggagttgcttccacctcgaggcaagaggtgagggtcttgggcacgcctggggtggttatctttccctcagtcctacaagagtagcttacaatgccctcttcagcttctttgagaagggctttgcaaagtccagctcaggtgcatccctcctgcctcccagggtttttcgtttgtttgtttgttgttgttgtttttgaaacagaatttcactcttattgcccaggctggaatgcaatggtgcaatcttggctcactacaacctctgcctcccaggttcatgcagttttcctgcctcagcctccccagtagccgggattacaggctcccgccaccacgcctggctaattttttgtatttttagtagagacggggtttcrccaagttggccaggctggtctcgaactcctgacctcaggtgatccacccgcctcagcctctcaaagtgctgtgattacaggcgtgaacctctgtgctcagcccctctcaggcttttgagaggattgaattctgtcctgttcctaatgcccaactggaagctctcagcctcattctcctttgtggaatccaaggctcctgtgtggttgtcagtggggagtggaggccactaaatacagaaaatcaaaattcctcttagccgttgggtctcttaggcctcttccttttctcctccttcaccccgcaaccagagtgagaaaagttttgcctgctctgggaaagaaggagcccttctaaacctggaagcttgtttgggatgtcattgccacctctcatggcccccttcttgtgcccctgcctggctttgccagtcccaggcagaatgccaccaggaatttaaagcaggccaggccagccttggagaggtggcacaaagcagccagtgtcacaggcgccatgtggcagtcagcaggtttggactcctgcacccagagttcagtgtcaatctgacgacaggccctctttggtgcttggaggtccagggagaggagcacaggttctgggatctcagacacagatggaaatccagcagctggacgttgatttggtcccatcaattagcccagagcagttgtagttcttattgcctggagcctctgtcaatccatgatctttattgtagctgctgccatttaccaagcaaatcctctatgcccaccactcccaaaggcccagtgaagaaggtgtcattcccactttacagatggggaaactgaggcttagagaggttaaattcctttgccaagcttgtacagctggtcctggcagatccaggacataaactcaggactctctcactccaggactgtgctctttctacccaccatcaagctcaaggctgaaagtgaggtgtgtgactccaaccctatcttcctaaggatagatatattttgagttgttccaagcttagaaactcatgctcgggatattgaaatttccactgttagtgtaaggaagggccaaaaattgcatggtccatttggtttctttctcataggtttcctgacaattccaagccccagagagtatttttccctgttgccttactattaattctcatgtaggcttggaagtatctgcaagccttcattagagccatttcagcagggagttggctatcatgggggtgtcagtgtaaggcctaggcagttttggctttgggcatgtggaaaacctgcctggattgttctggaagctcagactgtctatgggatgctattttttgcttccgtagttttcctaggaccataattttttttaattttattttttatagatgggatattgccctgtcacccaggttggagtgcagtggcacaatcatggctcactgaagccttgaactcctgagctcaactgatcctcttgcctcagcctcccwagtagctgggactagaggcgtgtgcccccacaaccagccagtttttaatttttttttgtagagacagggtcttgctatgttgcccaggctgttcttaaatccctggcgtcaagtgatcctcctgcctcagyctcctaaagtgctgggattacaggtatgagccactgcacccagcttaggaccttgattatgtgaggtaggacaagaagtgctggaaagatcatccctgccctccaggggagatacayacatggattacccctgattcttacagggactacctgcatgtccatgggctgctatgcaagcttccaggaacttcagtctccttccttatagagtgggattgccccttgtgctctgtcactctgggttccatcccttctcacccactaatagtggggaggaagaagaagagctaatatttatgctgtgctttctgggtctgggcactaagataggaggcactttacaggttgttattacagataaagggctgaggagggcctcagtatttgtattcgtatttttcccccagttttcccccaacctccaatgctgcagagatacctgcaggggtgagtggagattgacaatcagaatcctatgagatctccaagttgagagcagagtcctttgaagtccctaggcgtcaccaatatacttgagtttgggctacatctgttctgacttggggctccccagaaagtttgtctctagcagccctgagattggttgggaccaggacccaccctatcccctgctagtggtaggtggaaaggtggggtgaggctctaatccatctgattcatctcccctttcactggacaagactgatttggcctccactggctccagagcaggcatgctggctacactcccaacactcatttctggaggtgtgacttgagcccattaccaagcatttttattcayccccctgctccctatctggcatcttctgtatgtggggacgtttatcaactctgtgctccttgggtagccttcttctgtgcccagtgacacaggacagctcagttcccagcctcagccagatgccctgggcatgttaggcaggtgggctggtactcacatgtgcctgaggttcccagcctcagttcacctccaataggtctaggtttccttttccatgaagtattccagcaaccagaaagtcaagcatctaaacaggccagcttgcacatgatttttggagatactggaggaggaaggaagatatctccaagatatgtatgcactgtcatttctgcctccaaccttgaaacccttctctgtatcagccagcttttgctatgtgtgtggtgtaataaatcaccttaatacttagtggcttaaaacaataatctcttatttaccggcaatcctgtgagttggtaatttggactgagctcacctggaacggctcttctctgtcccatttactgtcagactggctccctcagaggtctgcaggcagcttgaggtctgtggcttctcttccacatctgaaagttgactggctgtaggcaagggtggtaactgggccatgtgccacacatgttcagcagaataactggggctcattcacatagtggtggttgcaagggttccaagagcagcatgggaagtcaagccccgaagcacaagcatatttctttcttttttttttttttttttttttttgagacagagtctcccactttggctcaggctggagtgcagtggcgtgatctyggctcactgcaagctccgcctcccgggttcacgccattctcctgcctcagcctcccgagtagctgggactacaggcgcccaccaccacgcccggctrattttktgtatttttagtagagacggggtttcaccgtgttagccaggatggtctcgatctcctgacctygtgatccacccgcctcggcctcccaaagtgctgggattacaggcgtgagccacygcgcccggccctgcacaagcatatttcaagtgtctgtttgcatggcattgctattgtcctatgagcccaagcaagtcacatggccagttctggagttgctgtgagtggagactatgtaaaagcatgggtatagggaggagaattagtgtggctgttttttgcaaacaatttacyacaccctccctatccattcagctatcatcaggaaaaaattcatatgagcttttctcttgattggcagcagcttccaaaatttgtgaggcaaaggaagttataaaaaagcagaatctgccaggggcagtggctcacatctgtgatcccagcactttgggaagttgaggcaggtggatcacttgagcccaggagtttgagaccagcctggtcaacacagagggactccatctgtrcaaaaactaaaaaatgtggccaggcacggtgcctcacacttgtaatcccagcacttgggaagctgaggcaggcagatcactcaagktcaggagttcaagaccagctgggccaacatagagaaatcccatctctactaaaaatacaaaaaaaataattagccgggtgtggtggcggatgcctgtaatcccaactactcagaaggctgaggcaagagaatcgcttgaacctgggaggcagaggttgcagtgagcagagatcatgccactgcactccagcctgggcaacagagcgagactccatctcaataaataaataaataaataagccaggtgtggtgttgcacacctgtagtcccaactacttgggagggtgaggtgggaggattgcttgagcccgggaggtcgaggctgcagtgagccttaatcatgccaccgcactccaagcctgggcaacrgagagagagagagagagagagagaaagagagaccctgtctcaaaaaaaaaaaaaaaatagcgaggggagggcagaatgctaactcatctttcgcagaccctgccaagagctggtcactgcttgatggccatgttgcctccttgctcatcagggaagcattgcatcttcagggtgggagacacagcggggcctgcggttcagtagggattagatgcctgtgctcccacagctcctctccaggcctctgccgcagctccggtgctgctgcgcttccattactgaccggcacatctgtctttcttagtggattgtgggctccttgagggccgaaccacggttgtctttcatcttggactctccagcttccaacacagtgcctggtacatttgtaagaacctagtgtttgtgtgaataaattcatgaattgcacatkactgagctctgctgcatttcatccagagaaytggtaatcatratagaatttgcttagacattccaaggttacttgtaattacttttgttttctgagcgtgattgattagttataagcatcaatatgttgtgaatgcaagttgctaaaatgcatttgtaacactttacttgtcctgtctttctctaaggctacagcagctgaaaaaccaaaacttcatctacttgctgaaagtgaggtaagaaagctattttttttttyatttccttctgtaacattttctgtaaaagatagtgcrtggcaatcccctttgggataatgattttcagccagccaagcagctgtgcagtggcttctccagggtgtggagcagtattgacctccaacttgctccctgctggactcagtacacctgaacagggaaggtgctttccaagggtgcctagtaacagaggcccccttcttagccctttcttggaagcagaatgctaattgtcagagccaaacacaaggccttcctgccttggggatgcatggtgtcctgattgtgagagaccctgggaggggaaatggaagggtctctcccctcccgtcttttccattttacagtcaggcatgccagaaacttggcacccatctgctctgcacttcaatatggacaagtttcagatctttcctgtcgacatatcccatttagccccaaatcaaagagtttcctgcgctgtttgtgctgacctaccctcttccctcccattccccaagcacacagcttactatctctttaaagtggcaacagagtggatctgagatgggttgcttcatgcgaaggtggtgaggtgtacactttatgaatcagcttgggagaaaagcacagaaactctcgatttcccctgtgtccggggccattacctagtcccaggtgacggccaaagctgggtgtggattcaacctagagccccagagctctgccctgctcctcattccactgattgcgtagctatattcttgttcttttgaaaataaataagactcggtctccagcctcaaaagacttaatgactgagaagtgaagctcaatattttttcaaaagagaaagttacaacataggtgaaacgtgctttaagagccgggtgagggagtggtcaaccccgtcttgggtccagataacaaaggctggatagaggtgatgagatttgcagagagtcttgaagaagaggaaagcatgtgtcaggcgaggaagggcatttcaagcagagagagcagcatgtgccaaaacagagcctgcaaaaatgggaaaaagctggggagactgaggaggttggatgggactgggattggttgtccagttgagaaactctgacagcatggcctgaaggatcctctaggctgaggagtcctgtgattacattgttttctgtctggcagtagcaaggagcttgagctggaggaagccttgggcatccaggaaaccagagagggggtagggggcataagtgtagtgagacctccaggatrtgtgctgtgcaagatgatctacttcccagtgggaagaaagtacagttgaccctgaagcaatgagggggttatggacactgaccacccccacatcatgcagtagaaaatccatatataactttctactcccccaaaaccaaactgctaaaactactgttgaccaaaagccttactgataacataaagtcaattaacaaatattttgtatgttttatatwctatattctgtattcttacaataaagtaagctagagaaaagaaaatgttattaagaaaatcataaggaagagagataratttactattctttaagtgggagtggatcaccatgaaggtcttcatccttgtagtcttcactttgtgtaggctgaggaggaggtagaggagggcttagtcttgctgtctcaggggtggcagaggcagaagaagatccaggtgtaagcaaactcctgcagtgcaaaccggtgttgttcgagggtcaactgtattacaattccattgtcaccaactttttaaagacaaatcaacgttggtggccttgcaggtacccaggactctcacaatgaggaggggtygatagtggccccctcctttatttcctagaccatctttagcatattctgaagcatcgcagctttagaattgcttggttgaggccggatgtggtggcttattcctgtaatcccagcactttggaaggccggggttggcgtatcacctgaggtcgggtgtttaagaccagcctggccaacacggtaaaaccccatctctactaaaaatacaaaaatttagccagacatggtggtgtgcatctgtaatcccaactacttgggaggctgaggcacgagaatcgcttgaacctgggaggcggaggttgcagtgagctgagatcctgccactgcactccagcttgggccacagagtgaaactctgtctcaaaaaaaaaaaaagaaaaaaaagtgcttggtcgggccaggtgcggtggctcacgcctgtaatcccagcactttgggaggccgaggcagatgtatcacctgaggtcaggagttccagaccagcctggccaacatggtgaaaccccgtctctactaaaaatacaaaaattagccaggcgtggtggcaggcacctgtaatcccagctactcgggaggctgaggcaggagaaatgcttgaacccargaggcggaggttacagtgagctgagatcatgccattgcactccagcctgggcaagaagagagaaactccatctcaaggaaaaaaagaaaaaaaaagaattgcttggttgaagtagtcttayrtatcatgttatttgggtttaattagactgatcctcacaaaataggcaagtggttttaaaagatttctgcataaaaaatgtgggttgagacaggtgtagtgactcatacctgtaataccagtgctttaaaagaccaaggagaggatcacttgaggccagggtcttgagaacatcctgggcaacatagcaagacctcatctctwaaaaaaattgtaaaaattagctgagcatggtgatgtgtgcctacaatcccagctacttgagaggctgaggcaggagaattgcttgagtccaagagtttgaggctgcagtgagctatgatttgtgcccctgcaccccagcgtgggtgacagtgagaccctgtctcttaaaaggaaaaaaaaaagtagaagcttttgaagctaacacaaatgaacaatgagaaaataagatggctgataattttcctacccctggtacagactattcagctacatcatggggttgaaagaagataaagatcttattagatataatgccaagtcagtcaaaaaattaaaaattagcaggctatttaaattctggctttacatatgatattgttaatgatgaactaatcactatgtgtacagagtgccttgagagaattagctaatgacactactaggccaccaaattttaaaatagttcatctttatctcwttatttatttattttttggaaacagagtctcactctgttgcccaggctggagtgcagtggcatgatctcagctcaytgcaacctctccctcctgggttcaagtgattcttctgcctcagcctcccaagtacctgggattacaggcgtgcrccaccaygcccgacctatgtttttattttttttaaatgaaagtayaatttactaccagtcaaacacacaaattctgtaagcttaataagtgtgttgttgttgaaacagggtctcgctctgtcatgcaggctggagtgcagtggtgcgatcttggctcactgcagcctccaccccgtgggctcaagtgaccctcccacctggtctcccaagtagctgggactacagccatgtaccagcctgcccatttttttgtttgtttgtttgtggtttttktttgtttgtttgtttgtttgtttgagacggagtctctctctgttgcccaggctggagtgcaatggcgtgatctcggctcctgcaaccttcgcctcctgggttcaagcgattctcctgtctcagcctcccgagtagttgggattacaggcgtgcgccaccaggcccagctaatttttgtatttttagtagagacggggtttcaccatgttggttaagttggtctcgaactcctgacctcgtgattgcccagctcggcctcccaaagtgctgagattacaggcgtgagccaccgcgcccagctttgtttgtgtttttttgagatggagtctcactctgttgcctgggctggagtgcagtggcgcaatctcggctcactgcaacctctggctcctgtgttcaagcaattctcctgcctcagcctcccaagtagctgggattacaggcgcctgccactacacccagtaattttttgtacttttggtagagatgaggttttaccatgttggccaggctggtcttgaactcctgacctcatgattcgcctgccttggcctcccaaagtgctgggattacaggcctcagccaccgtacccggcctatttttaattttttttttcagtagagacagggtcttgccatgttgccccggctggtcttgaactcctgagctcaarcaatccacctgcctcagcctcccaaagtgcttggattacagatgtgagccaccatgcccggctgtttaagaagttttaacacacgtatacacctatgtaaccgttgcccagttcaagatatagaacattttcatcaccccccaaaatcccttcacagtcttttccagtcaatacttcccatttcctgtcctgacagtatcactattctgacttctatcaccagagcttttccattcttgaacctcatataaatataatcatacatatgtactctcttgtgtctggttttaatattttaatgttgctgcatatatcaaaaggttattcctatgtaattttgttttttgcttttttttcatgaggcattttatttgtaaatatgtataacatctctagaaaaagaatcccaggattttccttcctgtgtgttttcgtcttgcttctttatggtccatgatgccagctgagactgtcagtacaatgaaatcaaactggccagatggaagcagattattctgcatttctctagatctttgagttgcacatcaaatctggggctgatcatgccacacttgtttagactgcctgtgaggttcacaacaatttgcctagctctgtgatcatcmatgatttcaaattcgccaatataaccatgcttcatcatcacagtgagaaaccagacgatgactttggagcatggcctaagaacctggtgtttgtctctcttttcagcattgttgatgctcttgagagcatcagccaggacattaatgtgcaccactgtggtggcgtggaaagatggcaaaaagagccctgcrtgattttgtaygtagaaaatcctrgaatacccacaaaaacctattagaactaataaacaatttcagcaaggttataggatacaagrttaatatacawaaatcaattgtagccaggcacggtggctcacgcctgtaatcccagcactttgggaggctgaggcaggtggatcacaaggtcaggagttcaagaccagccttggtttcagactggtgaaacccagtctctactaaaaatacaaaaattagccgggtgtagtgttgggtgcctgtaatcccagctactcgggaggctgaggcagataattgcttgaacctgggagatggaggttgcagtgagccgagatcacgccactgcactccagcctgggtgacagagcaagactccatctcaaaaaaaaaaaaaaaaattaaattgtacttcttctataaaattgcaatgaacaatataaaaatgaaattaagaaaacaattcctggctgggtgtggtggtgagtgggtcacctgaggtcagaagtttgcaaccagcctggccaacatggtgaaaccccatctctactaaaaatacaaaaactagccagttgtggtggcacacacctgtaatcccagctactcgggaggctgaggcaggagaattgcttgaacctgggaggtggaggttgcagtgagctgagatcacaccagtgtactctagcctgggtaacagagtgagactctgtctcaaaaaaaaaaaaaaaaaaaaagaaaagaaaacaattccatgtataatagcatcaaaaagaacaaattacttaggaataaacaagagaagtatagacttttactctgaaaactacaaaggattgttgaaagaaaataaagaagatctaaattaatggaaagacatcccatgttcatggattggaagacactattgttaaggtggtaaactccccaaattaatatatagattcaacccaattcctatgaaaatctcagctggcttctttgcagaaattgacaagctgcttctaaaattcatatgaaaatggaaggggtgccgaatagccaaaacaatcttgaataagaagaaagagaactcacatttcctgatttcaaaactttaaaagcaggctgggtgtggtggctcacacttgtaatcctagaactttgggaggccgaaacaggtggatcacctgaggtcaggagttcgtgaccagccttgccaacatggtgaaaccccatctctactaaaaatacaaaaaattagccaggcgtggaggtaggtgcctgtaatcccagctacttgggaggctgaggcaggagaatcacttgaacctgggaggcagaggttgcggtgagctgagatcacaccattgcactccagcctgggcaacaagagcaaaactccatctcaaaaaaagaaaaaaaaaacttataaagctacagtaatcaagacaatgtgatactaacattaggataattatatagctgcatgaactgaaattgagagttcagaaataaacccttacatttatggtataatgatttttttttttttgagacagagtctcactctgtcgcccaggctggagtgcagtggtgcgatctcagctcactgcaatctccgcctcccgggttcacaccattctcctgcctcagcctcccaggtataataatttttgacaaagatgtgaaaacaattcaatggggaaagaaaagcctttcaacagatggtgctaagactctgtctctacaaaaagtaattttaaaatttcctgagagtggtggggtgcatctgtggtcccagctacttgggaggctgaggtgggaggatcacttgggccctggaaggtcaaggctgcagtgagctgtgattgatccactgcactccagcctgggcaaaasaatgggaccctgtctcaaaaaaaaaaaaaaaaagtttgtaggtttcatttgtttgctttgtttgtttgttctgagatacatttacaggtagaattcttagggtttggtaacaggttacatgtggagcccatgggagtggaaggagttcaaggatgatggcagattttcagcagaggcgatgaggggctagttctgcctggaacactcttttcctagacactggcatagtgtccctcatcttattctggtttctgctcaaatgccacatcttcagaggtccttccctgtccatcctgactaaaatgaaatccctaccctttatttgttcaacgtgtgtatcagttagtattagatttggctggcagtaacagaaaactccaaamtagcatttggataaacacattggaattttgtttttctctcaaattttagaaatatagaggtaatgtggtggggggaggggggaggctgatatggggcagcttgatgacaaggatgcaggttctattctattttgttgctttgttttgtatgggcatcattcccagagttatctcttttttttaattagaataacacacatgtattatctacgatttttgtaaccacccagagggttcactttgcccactgcctagacagagctgatttatcaaggtagagaattgcaatagagaaagagtaactcatgcagagctggctgtgtgggagaccagagttttatcattactcaaatcagtttccccaggactatttctctattgcaattaaatccatgcaccatgggtcagcagtgaccggcctgtagagacagtagcggagtcaacccccagtccaagagaagtaggcggccacttggactggcctctggatccgtcaccagagggaggctaccgaaccaggattacccttatggcaggtagtcttaagggcaatcctggacaagctcccaaacttgtaaccgcccaacaggttcaccttgcccactgcctagacagagctgattcatcaacaggggaattgcaataaagaaggagtaattcactcagagtcacctttgcgggagactggggttttactattactcaaatcagtctccttgagcatttggggattggagttttaaggataatttggtgggtaggaagcagccagtgagtcaggagtgctgattggttgggtcagagatgaaatcatagggaattgaaactgtcttgcactgagtcagtttctggctgggggccacaagatcagatgatccagtttatcaatctggggggtgccaactgatccatcaagtgcaaggtctgcaaaatatctcaagcactatcttaggctttacaatagtgatgtaatccccaggatcaatttgggagggtcagaatcttgtagcctccagctgcatgactcctaaaccayaatttctaatctttttgctaatttgttagtccttcaaaggcagtctgatctccagacaagaagagggtttgttttggaaaagggctgttatcatcttgttgtatttttatttttattatttatttatttatttatttatttatttatttatttatttttgggggacagagtctcgctctatcgcccagaatggagagcagtggcccagtctcggctcactgcaacctctgcctcctggattcaagcgattctcctgcctcagcctcccaagtagctgggattactggcgcccgccaccacamccagctaatttttgtatttttagtagaagcagcgtttcaccatgttggccaagctggtctcgaactcctgacctcaagtgatccgctcgccttggcytcccaaagcgctaggattacaggcgtgagccactgcgctcagcctcatctttgttttaaactataaactaagttcctcccaaagttagttcagcctatgaccgggaatgaacaaggacagcttggaggttaaaagcaagatggagttggataggtcagatctttcactgtctcagtaatattttgccatgggkgtttcatgtttgtgggtcaggagttgggataagctgagctaggtgtcctgccttgggtcatgctttcctgctcatgtggttgtttgcagcgttcggttccttgtagctgtaggattcacatcttgcttcttctgagaggcctggaggctagaagtccaaattcaaggtgttggcaggcttgtgctccctctgaatcttggagaagaagaccctcccttgcctcttccagcttccagtggccccaagcgttccttggcttgtggcagcatcactcccatccctgcctgcatctttgtatggtcatcttctttctgtgtatgtcccttcacatggcgttctccctgtgtgtcccaaggttatctcataatccaagatgattgcaggatctccagccactctgcctgtcctccagtcagcgggaaggaggaatggcaaagaagcaggaaagccacagaatagctgtgtctcttaagggaggctccagaagctactgagacactctcactttcayctctggccagagcttggtcacatgcctgcatccgactataggggaggctggaaatggaatctttattctgggaggcctgagttcacctaaaaattggagcattgattagtttattaggacaaaggggaaatggatattgtgggatacagctgtgtcagctgcgcctgccttttctcctagtgcctggcctaatgtatatttaattagccatttgtttaccatctgtctctcccgatcagaatgtgggctgtgtaaaaccaaagaagaaaactgaggtaccagttaaaaaaaaagaaaaagaagaaggctgggtgtggtagttcacacctgtaatcccaacactttgggaggccaaggcaggcagatcacctgaggtcaggagttcgagaccagcctggaacatggtgaaaccctgtctctattaaaaatacaaaaaattagccaggtgtggtggcatgcactgtaatcccagctactcgggaggctgagggaggagaatcgtttgaacccgggaggcagagtttgcagtgagccgagatgatgccactgcactccagcctgggcgacagagtgagactctgtctcaaaaaaaacaaaaaacaaaacaaaaaaaacaacaaaaaaaaataagaaaaagaaaaaaagaagaagaaaatgactgaggtgagtctcaatcaatttagagttaattttgccaaggatgagaatatgcccagaaaaaagagacataagccacagtaggatctgtgacccacactttttccaaagagggtttgaggacttcaatatttaaagaggaaagggtggggctgggtgcggtggctcacgcctgtaatcccagcactttgggaggcmaaggcgggcagatcatgaggtcaggagattgagactatcctggctaacagtgaaacaccgtctctactaaaaatacaaaaaaaaaattagccacgcatkgtggcgggcacctgtagtcccagctactcaggaggctgaggcaggagaatggtgtgaatccgggaggtggagcttgcagtgagctgagatcgcaccagtgcactgcagcccgggcgacagagtgagactctgtctcaaaaaaataaaaataaaataaaataaaaaataaataaataaaataaaaaataaagaggaaagggtgagcagtgcaggaaagaggaaagggaaaaaagggaagggtagataaaagagacaaggggttgcattcttttgagactttgattagcttagtgttccctgaacccacagttcacatgtgaaatgaggagggtggaggaacagtcagctatgcattcatactcagtgaatgtgcatttttacataagtaaagtaagcatagaataaaggaagcagtcaaatatgcgtttggcgcaggtgaaggaagggataacttctagtccagtccttgtcctgtacctgtgatggtaagctgtcagtgtacattgtttgggtgaaattcaacagaattctgttttagggtaaagggatttcctcatgagcaaattgtgagggaagccccctgggaagatatgtggcctacctttgcagctacctatgtagggacaaaatgggaggtgttttgggtgacacagttcccaagctaaacactttcctttggcatagggagtttgttggatttttgggttgttcaccacatttccagtgactaggaaagtgcagggcagattaggtgtttcacaaatatgtgttgggtgaataaatgacaaggaggggaattgagaagagtaagtttaaggagaagaacatgactgtgttggaagatactgagtttcgggtgcccatgggacatataagacttgattctcataggcagctggaaatataatcacgaacttgggagggagatgtggctgaagcccttgacaagagtgattctttgggaagggcatagcgagacagacctacagaaaacagcgagagaggagacatactcagcccactcagtggaatcaacccaagccagaagtctccacccccaccccccgggggagggcaacttcttccataacccacttatagcccctctggccttgcagatctgcctctctgtttggtttgagaattccccttataaaggaactctgcagggcccagatccacttgccaygctttaggaatctaagccacgactcagtctcctcggtgcaggttcttggaccccttcactggacctgagtgaaataagagaaataaggacaatatagtaaaataaatattgcattttgtcggaatgacaaggtgggctggagacacactgccttggcttggatcccagcttttccattcagttgctgtgtgaccttgagaaagtcacttaatcaccccgtgattcagtttcctcatctataaaatggggatattacgagtatccacctcattgtgttgttttaaggatcaatcagtcaataaataagtaaataatttagaacaatggtgtatagtaagttctacytaagtgctagctattaatataaagccaaatgtatttagcttacaaagcaaccattatttttacttctctgttttaaaatatattttcttttctttttttttgagatggagtctcactctgtcagccaggctggagtgtggtggcacgatctcggctcatggcaacctctgcctccccggttcaagtgattctcctgccccagcctctggagtagcagggactataggtgcacaccacacgcccagctaattttttgtatttttaatagagacggggtttcatcatgattgccaagctggttttgaactcctgacctcaagtgatcgacccacctcagcctcccaaagtgctaggattacaggtgtgagccaccacgccccgcctaaaatatattttcttttaggaaagcggttcccaacctttatggcactaggcactggttttgtggaagacaatttttccacagacccgtgtgtgtgtggggatggtttcggggtgaaactgttccacctcagatcattatgcagcaggacaagctgcagacaaaactcctcagacaccgagttaaagaaggaagcggtttattcagccaggagcatcggcaagactcctgtctcaagagccgagctccccgagtgaacaattcctgtcccttttaagggctcacaactctaagagggtccttgggagagggtcatgattgactgagcaagcagggggtatgtgactgggggctgcaggcactggtaatcagaacaaaacagaacaggacagggatttttacaatgcctttccatacaatgcctggactctatagataacataaacggttaggtcaggggtcgatctgtaactaccaggcttaggtcaggcagggccaggcctggtttcgggtctggttccttgctttcgggtctggttcctgggcgccaggctacctgcctttagttttgcttctctttctttttctgagtataaaacaatatgagagggtctgtctctcttctctcaattaggcactagattctcataaaaagtgcacaatccagatcctttggatgagcagttcacaatagggtttgtactcctacaagaatctaattgcactgctgatctgacaggagacagagctgaggcggtaatgctcgctcacctgctgctcacctcctgctgtgaagctcagtccctaacaggccacagaccagttggggaccctactttaggaaattatgattataggatatgaaaatcatacacctaaaaaagatcctggtctggcatggtggctcatgactgctaattccagcactttggaaggccaagtcaggaggattgcttgagcccaggagttcgagattgcagtgagctatgatcataccactgcactttagcctaggtgacagcaagactttgtctcttttctttctttcttttttttttttttgagacagagtctcgctctgtcccctaggctgaagtgcaatggcatgatctcggctcactgcaagctccgcctgctgggttcacgccattctcctgcctcagcctccccagtagctggaactacaggcacccgccaccacgcccggctaattttttgtatttttagtggagatggggtttcactgtgctagccaggatggtctcgatctcctgaccttgtgatccgcctgcctcggcctcctaaagtgctgggattacaggtgtgagccaccgcgcctggcatgactttgtctcattaaaaaaaaaaaaaaaaaaaaaaaaaaagccgcgaggtggctcatgcctgtaatcccagcgctttgggaggctgaggtgggcggatcatgaggtcaggaaattgagaccatcctggctgacacggtgaaaccccatctctactaaaaatacaaaaaattagctgggcgtggtggtgtgcacctgtagtcccagctcctcgggaggctgaggcaggagaatcacctgaacccgggaggcggaagttgcagtgagttcagattgcaccactcggccaggcgaggtggctcactcctgtaatcctagcactttgggaggccgaggcaggcagatcacctgaggtcaggagtttgagactagcctgaccaacatggtgacaccccatctctactaaaaatacaaaaaaaattagccgggtgttgtggcgcatgcctgtaatcccagctacttgggaggctgaggcaggagaattgcttgaacccgggaggcggaggtcacagtgagccgggatcacgctactgcactccagcctaggcaacaagagcgaaactccatctcawaaaaaaaaaaaaragagattgtaccactgaactccagcctgggtgacrgagtgaaactccatctaaaaaaaaaaaaaaaaaaatctggccaggcatggtggctcacacctgtaatcccagtactttgggaggccaaggcaggcagatcacttgaggtcaggagttcgagaccaggctggccaacatggcaaaactccctctctattaaaaacacaaaaattagccgggtgtggtggtggatgcctctaatcccagctgcttgggaggctgaggcatgagaatcgcctgaacccatcaggcagaggttgcagtgagccgagatcgtgccactgaactgcaacctgggtgacagagccagactttgtctcaaaaaaaaaaaaaaaaaaaaaatcctttctaagccatataaaaactcagaatctaatttttgtttatatgtttaacttgctgacccatgtcatcttagagcctaggaaccctgcctaggtgttgacatgaactctgtgtgagcattttccagtatatcttggtgctgttgataaagagtcagtctgtaaaatatttgaagagattattctgagccaaatatgagcagccagtagcccatgacacagccctcaggagatcctgagaacatgtgccccaagcagtcaaactacaagtttattcatttcaggaagacaataaaatatcagtcaatacatgtaagaggtacattggttggctgggcctggtggctcatgcctgtaatctcagcactttgggaggctgtggcaggcggatcacctgaggtcaggagttcgagaccagcctggccaaaatggtgaaaccctgtctctactaaaaatacaaaatttagctgggcatagtggcaggcacctgtaatcccagctactcagggggctgaggcaggagaatcacttgaacctgggaggcggaggttgcagtgagccgagactgcaccactgcacttcagcctgggcaacagagtgagactccgtctcaaaaaaaaaaaaaaagtgataaggggttgtggagaccaaggttttatacagatgaagcctccagatagcaggcttcagagaaaagattgtaaatgtttcttattagacttagagagtctgttctattctatcagtctgttgatgttaatgctggtcggatgggactgaattccaaaagggatgaaggtatgatgaagtatgtctgacacccccattccatcatggcctgagctagtttttcaggttaactcttgaatgccctggctgagaggagaggttgaatcagatgatgaggaggatggtgggttagaattttatttgtggtttacaatgctaactcgaaggaaaggattgaggactttttcctggccctgtgaaggtsgttgtgtgtgggtgctgggagaactatcccaggaaactcagggtaactggcaaggtgatttgagattgctctggtccaaaagataacgatttcatttggggaaaccatttcctttggagagctggctgagataaggagctagtctgaagcctgggaaggcctcaacaatctggttaacccttcctcctccaggatacaattctttctttttttttctgagacggagtcttcctctgttgcccaggctggagtgtagtggcacagtcttggctcactgcaacctccacctcctgggttcaagcaattctcctgcctcagcctcccgagtagctgggactataggtgcatgccaccacgtgcagctaatttttgtgtttttagtagagatgggatttcatcatattggccaggctggtctagaactcctgacctcgtgatccgcctgcctcggcctcccaaagtgctgggattataggcgtgagccaccgcgctcggcccaagctacagttctttacgcctatgacttttgtcaggctcagaggcaatttaatgaggatgggatgtctagaaagggacagggtgggactcggatttccttggctcttctgaggaacttttaccttcaaaggggagtagaagccactgcagggtggaaggaaaacttccgcttccccctccgtgaatttgctgaaaagtcaacagacaaaagacgattaagagaaaaggcatacacattttctaatatgcctagaagaaaacacagtgattaccctaacccttcaatggagtacagaagcttatatagccttttatttctgagacagaggctcactctgtcrcccaggctggagggcagtggcatgagcttggctcactgaaatctctgcctcccaggttcaagtgattctcctgtctaagcctcctgagtagctgggattacaggcttgcaccaccacgcccagctaatgttcgtggttttaggagagagatggagtttcaccatgttggccagcctggtctggaactcctgacctcaagtgatccacccgcctcggcctcccaaagtgctgggattacaggcgtgagccaccgtgcctggccatatagcccttttttttttttctgaagctggtaaggagatggggaatatgctaattctgtaattctgcatgatttctcaggagaaagaagggatcagagaattgagattaacttgtaaatggctctctttggaaactgaataagcccgagagacagacaggcattttatccctctaggggtggtgacattcttcagtcttcttttctgcaatagagaatcagataacgggaaggggaagggaaaaaattgttcccccaggggcatccttctggtcttttggtctttcccctttggaggtggggcagtctcttccagtgtctgttgatctttaagggcctttcattcaaaatactctttacacaagggagccgtattttggggtgaattatgttggtttccttcacctccttgggaggtgggaaatgtgtcctgaaaggtcagggcctctctgagtggagatgaacaggtcagggttgagtaaggaggaggctggcaggggcctttatgatacctgagaggactggggcttggatggagcaagagaggcactgatggagtaagattcaggtacaagacttaagtcttgcatcctakgcacggctcttgcctcatcctcatcccagccctaataatgggaggctttttgccggtaaattcccattattaggagctgaaaatgtcaatgccttacaggcgccagtcagcagtgtcaagcagtgggctgggtggggcctgggctggctggagctcccctaccctgtctaaagggggcggtggctgctcagctccagcatatgcggggaaggcgctggctaagataaggagctagtgccatgatgaycacgttgccacaggatcaagtgggtcctgtgtggtgtcacctttaggtgcctgaaatctagattttattttatttattttattactatacatattttttgagacggaatttcgcttttgttgcccagactggagggcaatggcgcaatctcggctcaccacaacctctgcctcccgggttcaagcgattctcctgcctcagcctcccaagtagctgggattacaggcgtacaccaccatgctgagtagctgggattacaggcatgtgccaccatgcctggctaattttgtatttttagtagagatggggtttctccatgttggtcagtctggtctcgaactcccgaccagatgatccgtctgcctcagcctcccaaagtgctgggattacaggcgtgaggcaccggcctgaaatctagattttaaagtgaaatttcttaatttttttttaagggcaggcacaaatttataaaacatcaggtgggccaaataaaatgttacaggccacagttttagcttggtggttgctgatttactgaccctgttataatattggaggtcaggactttgggcaaatgaaagagaaaaggaggcagactgagaatgtgattttacaactccagcctctccaggggctgggtggccagtgtctcctcagcagccttctcccgcaggaagcagaactgtctgcaacgctgatggagtcacagtaaccttcaccccactgagctcaggatctgcagagccactaagaccctggagcaactgccttcagcatccaacagaagctgctaaaaggattatgggycaattcattttagacatttcttccagatgttcccatggaaagctagggtctaaatcagtggtcctcattcctggcagcacctgagtttcacctggggaactgttagaaagtgaaacttggacggcattcacattagtccagtctctgggtggggcttggacatcagcatttgtagaagctccctaggtggctttggtgcagccaggttggaaaccactgatccaactaatagaaatgctaggttgggatctcttccgaggcatctctttaggacaggctgtgcatgacagtcccatagtgtcagggttctaagatgctccaatggtttaggcactggtcttaattttcgttttttcgctctctttgagaccttaacaaactctatagggctgggcacaatggctcacgtctataatcccagcatttttttctttttttctttttcttctttccttttcttttctcttctcttctctcttttcttttctttctttttttctgagactgtctcactctgtcgcccaggctggagtgcagtggcacaatcttggctcaccacaacctccacctcccaggttcaagcgattctcttgcctaagcctcccaagtagctgggactacaggctcttgccactatgcccagctaatttttgtatttttagtagagacagggtttcactatgttggccaggctggtctcgaactcctgaccacgtgatcctcccacctcagcctcccaaagtgctgggattacaggcgtgagccactgcgcctggccaattccagcagttttagaggtcaaggcaagaggatcccttgagtccaggagttcgagaccagcctgggcaacatggcaagacctcatttcaatttaagaaaaaaaccaaaacacccaagctctataaccttcacatcctcattgactgattaagtgcagataatgatatttgcccttctaacctcaccaggctgttatcaggagaaatgaagcaataaatgagaaattgctctgcaaactgtcaacgttatgtaaacattgctattcagagtgtgctcccaggtgcgggaggtacagctgttatctgttggagatcactcctgaagtaacattcctagtgccatgggtcagatgggaattggtacagacattccaacttagaaggcagcctttattgtcttataagcaggtgcgtttcctggggtggcagcctggcactggtcactccaaccccaacttgtgtaggaggtaccacagtaaatgagtagagagagttcaggggacttgaagggaagtggagggccatctggagagggarggaactaaggactccctgtgggttggggtcttcctgaggatccagggagtaactgtcaaggagccttagcagggatctaagagctatgcaagagcaaaaagaggcaaattattaaggaaattagtgaagtcagcactggaacaacagagaggggacacagcagtgcagcatgggccctggcctcaggaagctgtctgattggggcagataggaccagccccctagaagacagtcacccatatcagttaggcagtcatgactcagtgttacttatctgaggcccaggttgcatgaggggttgggggtgggatggacagagcactggctgggcatcaggactaggctggagtcctggctcaaaactctaccacaacctgacactgggcaagatggcccacctgtggcatcccaggttcctgccctgtaaagaggagtctgggtgtatatccagatggactgtgagcacagcctgagtttgccctgtcgaggtgctgaggcctgggagattggggtgagtagctgtggtccagggaaggttggcaagctgggccttagatgagaggggatgcttggtcaggcagaggtgagtggagaaggcagggcaaggaagggaatatgagcggcgaacaaatggagtggacatggtgggggcagaggatggtgggaagtggccttgttgcggccagagtggaggaagagataagtgggaaagagtggagtcgattacagaaggcctcggaaaccaggcagagatgtttaaattggctctctcaggaaggagagggccatgaagggatttagggaagggtcatgacatgattatgctgcattttagcaggattaatgtgacctggtgctcagaatgacttggatggcatgaggccaggagccgaggaggacagttagaagactcttgtaatatttctggcacagggagatggactgggagttgggaggtggcaataggtcaggcctagagacatttctcaggaaatattgacaggccttggggcctggttgcattcatggagtggggaggaatgagtcaccttgagaagcagtttccctctcaaaggccagggaagacaaagcagaggcagctttcctgcctgcaaacaggacatttcagggtaacctggctcttccaagcgtcagcttctccctggctccagctcagataggagttgtaacaacgggttgggcatgggtgatggcaccggctggtggctgggttaagggccatgtttttgattatgcattaggcttattcagcctgccaagtgccaggccctgcgcttgtgtaggagacagagcaattagcaaaacatagtcctccatcctcaaggagtttccagccctgtgagcttggcagatctgcagaactcaaatgaaatggcagttgagaacaaccatcttgttctcattcactccattttgcttaacggccatgtaggtagttccaaatgtttgatgtgtaccagaaaatctctctcttcctggtttataattatgatccagggcaaatccaggttttgttgggcttgaaaattaaataaattggcactctctatggaaaataattcaaatataaatatacaaatatcacactgctaggccctcccagggcctagaagggtaggaatgaaagtgagagtccctgaagctttaaccgcattaacttttcagtcagttctatgatacctgccattccttaagtgtgtattatgtgcacgtattttgcgtacagtattacacaacaatcaaggggaggtgaggtgggcattagtgtcttcatcttatggatgaagacacagtctcagaggtgattcaagatgcccctctgcataggccctaaggcagggggtggggactgtgacctggacaggaagctggggcctcaggactgcatctaagctcctccttttctgtgggtgatggtggctgtcaggcccctgaacctacgtcatccctccctctgatttgactgtacctttgctrggcctggtcaagggctagggactcctaaagtcaagagctagggtagaggttgggggttggatctcagggcaccatatggtgcagacttggttgcaggaaagtgacctatttaggcagaggggctctatacaactgggaccacagcaaaccctagaggtgagcacctgcttcaaagactcacagatccaagctgtgatcctagatctacaacttcctggctgtataaagtccagcaagactgaggcctcactgagcttcaatttccttacctgtctaaccagaatagcaacaacttgtttgtatatttgagctcattacatgtcattttgtaaggcactaaagytcctggaggcttccggaacacagaaataattaatctaagaatcctaaagtggctgtcctggtagcacctctagggagtcctcccatcctacgtaacttcctctgggaaagtagaaaacacggcacctgggaaggggcgctgaaccgtgccccaagtcccagtgggcctggatgcccaagagcaagaggaggcccagaggatggggacaggccacgacctgtggcccaagtcccgcccagagggagtgcgccctgagggagagccaccggagctggtgactcgggggcgggtgctctggggtgtcgctttgggttcagcaatacaaatctgccagctggagattaggcggggcacgccggggagaggtgatgcactgccgctgaagacccaggtaggccggtgcgttcggcctgggygaggaaggcgcgggacccgggtgcgaggactgcgtagcgtccccggctcccgcttccgcccgctttccacgcccacttctgcaagtcccctccggcacctcggcgtccaccggactcctaggggcgagccctcatttccgaggaatgggaccgccttcgtgcccccggggctgccagtccctagactagccctaggggcttctcgtcccggcggagccgggcggtgcctcctgcctgcgcctcgcacctccccgcctggcacggcccacccgggcacggcgccgccacgcgtgaaggcccgcatcggctccctacgtgggggacgtgcaggatgatgcggggtcgggggggatttcgctgcgtcgcccgccccctttccggcgcaggagggagcggccgccgcgtccccgctccccggccgggacgccaccgccgggcgttgcagaggcgcgccgcaaccaatgggcgtggaggaggtgggtcggctggcggctgtcaccctccaggggacgggagcgcggagaccgggagagcgcgagctgtcgccgcgccccgggccgagggggaggagccgggggaggaggaggaggaggagcmgccgagcagccgccggaggaccacggctcgccagggctgcggaggaccgaccgtccccacgcctgccgccccgcgaccccgaccgccagcatgatcgccgcgcagctcctggcctattacttcacggagctgaaggatgaccaggtcaaaaaggtgagcccccgcccgcgccgccgctggtcctggccgcagccttgcgttccggcatccgctcgccgcctccgctgcctccatcctccggcgcccggccttctccgggccagcatcgagttggactgcagggcgcaaggaaagccttcgccttcgattctaccggcattgtcagtgtctctgtgtgtgtgcgtttttgggaggggggcaatcgggcggaagacccccgagaccgggctgcctgctgcagtgtccttgaaacgggccctggatgtcagataggcccccgggctgtgcggggaggtggccggtgggcccttccgcagggcctgttcgggagggtccgagcgccgtgggaggaggtgtgatcatggagatgctggggaggtgatcgagcagcaggcgggggtgctggctggaggccaggcctcccatatttggggttcctggcggagggtgtcgggtgccccggagaagctgtcgccgggctctcccagttgtttgagctgctcgttaatctgaggacgaggtgacccgcccggcttcccggaacggggaggggcggcgaggccaccggaaactttgctcataggcctcgtgtctggagcggcacgtctgaatggaattttttattcctcttaagctgtaatttctagccagcacaggagctcaaataagcgactggtcatttgagttgggtggacgcctgtggcatgcttgttctagcacttggacgcatgcatcctcctgtcctgaggtgttgttgcctttgacatcttagtgtaaaatactgtccgctggcaggtcttaaaggtgtatttgtctcttctgccagctgtgctaccatattttaaagaaacagcctaagctgtagggaaagacgcccgttttatcagtgccaggtctggtacaggctccaggcccacccaccctgaacgtggtgacgttattgctggggttagctgggatggactggcaaagtcatcttgactttggcgttcagacagrtggagttctacaggtgaaaggcaggagtgacaggccttgattttctgcccggcaagccatagggtgttccatcctcttcctgtgcatctaagaygactccctcatctggcaccataggaaacaggcctactgagggcagcgaccttatcaaggtcacccagtgagttagaggcagagccagtcagggggatccaggtctcccagtgcctccacccaggaacttcaccagggtcctcctggaggtcagcttccaggagggagtgggtactgagagacaaagccgctggggaccctgccgtgatcttggatcccatggtgggtggggaccgggagtgaggtaggtaggagataggcttgggaatgccatctgccattgctctttatggctttaagcactctggggttgtcaaaccgtggcactcgaaacacttgctcctatggagcaccctggagcttccctctggccactgacctgggagctgtgcgtgcgggtgtgtgcatttcatgagttttctctagtggtgttgtgcatcactgatgttcttcccattggaccagggagacagttctcccggcatggcaagaagtgcccagaacaggcctcctgaagccaagagttcactgtcctcctgcacgtggtgtcctttatagctcaagacagtgggctgctgggctggggggtgcctgggtgaccttgtaaacctccagtgtccacacccaccaccacccacaacagactgctggctgttggctgccggtggcctccagcagctgagctgggctgaggtttggactccattcagtgggacatgttttctcagacatacagtgtctagggtgggcccagagctctccactcctgtgggtggctcaattcacatctatggatgcacagtctatctcctaggcccccgtaggtacctgagtgtgtgattcagttgacccttccatccctcctcactccgagtttgggattctgatgttcttcccttctcttccccgagaaccttgctggaggaaggtcttaaggccaaggtttccaccagatattatttgtcaaggagattcttaaaaacaagatgtttgcttgcatttcaccacggacttcctatgctgctttctataggggagtacgtggattcctgccagggggtccactcattttgcatagtggactgtgtggcacagccatctgtgggtgtggtcctggctatgattgcgccaccgcactccagcctgggccttctaaggacagtgacatagtgggtacttgctccagtgacctactcagttttgcccaagtgtgcagatgctggggaccacatctgctcttctggggcccaggatttcttagagaccagctctttccacgtaccactcaccataggaaaggctaggtgaaggtgcgggaccccctgttcttcctgtggggctggactctgcctgcctcccagcagggacctgctgaggatggttcccccccagcgtgggcagccatgatgattcagccctccagctgtaggcagcctccggggctctggagacagacctggcatccctcagtaactctcatctatcttcttgccctcagagccagaggtaggagaagggaagctggggaccatgcyggggaagtttttgggattgcttagaatccaaacgtgatcatgaaaatggtgtcatttctttcttcattgcctatgaggcacatcaataattcaactccataaaaatatatcctgggttgaaacagttcaggtgtctgacttcccagcttggaaccccattatccagacggcatctgcataaattggttaatgggtgctgttgaagagggtgtactggcattaggctgagctaagcacaaaacacatatattcctttcactcttctagtgcctgtaggaggaaagggaggcatatgtgtgcttgtgaaggattccattcatcagaatcccagacatctgccagttctgcagctagaggctgggttctttgacctctaagtaactttaaacacgcatctcatctcgccagcttcttccactcggtttagccattaggagcttggagcagggtgaaggattgcatagtgctctgtttgtttagaaagggaagatgggtccaggaaggtcagaacttggcttctaaagaaagattagacttcctttcctccaggcttgtcagaatggtgagcaaatgccagtggattttctctgggcgagatccccataacgctaagtgatttccactagtaggtgatcatgaaaagggtgtcatttctttcctcattgccttgaggcacatcaataattcaactccataaaaatatatcctgggttgaaacagttcaggtgtctgacttcccagtttggaaccccattatccagacggcatctgcataaattggttaatgggtgctgttgaagagagtgtgatttgtccaatggccgaactcaggagtccttgagtacttgacccaggaagacaggggagagtaggcttagcaattaaagggttgcccaaggtacattccttagagcctatgtgttccagctgcaaaagcaagcattaaaaataaataaataaataaaaggccgatgtagtggctcacacctgtaatctcagcactttgggaggctgaggcgggtggatcacctgaggtcgggagttcgagaccagcctgaccaacatggagaaaccccgtctctactaaaaatacaaaattagctgggtgtggtggcgcatgcctgtaatcccagctacttgggaggctgaggccggagaatcacttgaacctggaaggcagaggttgcggtgagccgagatcacgccattgcactccagcctaggcaacgagagcgaaactccgtctcaaaaaaaaaaaaaaatgcccattcattattgctcaggggtgagagaggtgatagttagaaaattgtgaaaaatctggctgggcacagtggctcatgcctgtaatcccagcactttgggaggctgaggcaggtgaatcacgaagtcaggagttcaagaccagcctgaccaatatggtgaaatcccgtctctactaaaaatacaaaaattagctggacgtggtagcatgcacctgaagtcccagctactcgggaggctgaggcaggagaattgcttgaaccggggaggcggaggttgcatgagccaggatcatgccactgcactccagcctgggcaacagagcgaaactctgtctcaaaaaaaaaaaaaagaaaattatgaaaaatctgtgggttcttgcagtggcaaagaaaaaaaagaaaaaattatgaaaagtcagcctgggcaacaaaattaaacctcatcttaaaaaaaawttttttttagcctgctttggtggcatgcacacacctgtagtcacagctactcaggaggctcattgagcccaaaagattgatcccaaaacagtgagctgtgatgctatgattgtgttaccgtactccaggctggatgatagagcgagactctgtctcaaaaaaaaaaaaaaaaaaagaagaaagaaaattatgagaagtgtctcataacctctcaattctgatgttgtacaaatattcagtgagagcttcttggtgaatcttgactttataatccctgcctttcctaccttagatactcctagggtttctcccaagagaagccccatcactttatctggttggatagtttgggaatgtcatgaaggaataaactggcaggcagggtgtctgtgaggtgctttcacatctggccaagctgtgccatgctcccacgctcctactgttctccggagaagacataggcagctttccccttacaagactgatttggcatgactgggactgtctgtgtgtgtctgcagtcagggattcctggcagacagatttagccactggaatcacctctgagcatgcctgagaaggtccagggaagacatggataaagacagggagctgtatacctctgcatccaggaatcagttgtggtcagactgctggcacctgcttatggatttgtttttatttttttatagagacagggtctcaccatattgcccaggctggtcttgaactcctgggctcaggcagtcctcccgccttggcctcmctaagtatgcttattgatttgaaaaccctgaagatcaaatctgatcacaggagctcaatcatttctttaaaaaatgtttgatttttttattatgtgcagaggactgtgctaggctggggtgacaactataaacaaggcagaaacggtcccagttctcatggagcataaaatatttgctggccgggcgtggtggctcatgcctataatcccagcactttgggaggccaaggcaggctgatcatttgaggtcaggaggtcgagaccagcctgaccaacatggtgaaaccccgtctctactaaaaatwcaaaaaaggtgccagatgtggtggctcatgcctgtagtcccagcttctcgggaggctgaggcagaagaatcacttgaacctgggaggcggaggttgcagtgagctgacactccagtctgggtgacagaacgagactccatctaaacaaaaataataattaaaaaaaaatgaagtatttgctgtgttatatgtgcaaagcatatgggctatgagggcccacagcatggtgtggtcataccttgggtgggaaatccctaggctaggaactgcttacagctaggctgcagatgttagctccttaagtgcttcaggaagctgctcccatccccagttctggggatgtgttagtctgtttggagtagcaggacaggtgcccactgccttctggcctaataaaccttaacaacgggatcttttgcaaccacttaatatacactgggttgtgttcattgtatttgatcttaaagaaaaataggtaaaaattttacagtttgattggtcttgatttctggaaataacattgacttctggtaaacagtacacatcagggatattatacttagaaactttgtaaggtggagtcaaaattaattgtcacaaaaatgtgtattttttttttttttttttttttttgagatggagtcttcgctctgttgcccaggctggagtgcagtggcacgatctcagctcactgcaagctccgcctcctgggttctcgccattctcctgcctcagcctcctgagtagctgggactacaggcgcctgccaccactcccgtctaattttttgtatttttaggagagacggggtttcactgtattagccaggatggtctcgatctcctgatcttgtsatccgcctgcctcgacctcccaaagtgctgggattacaggtgtgagccaccacacccggccatgtattttcttattctttttttttgagatggagttctgctctgttgcccaggctggaatgcagtgatgtgatctcggctcattgcaacctctgtctcctgggttcaagcgattctcctgcctcagcctcctgagtagctgggattacaggcaccagccaatgctcctggcctgcatytttttttttttttttgagatggggtctcactctgtatcctgggttggagtgcagtggtgtgatctcagctcactgaaacctccatctcgcgggttcaagtgatacttctgcctcagtgcccccccctgccccccagtagctgggattacagtcgcctgccaccatgcccggctaatttttgtattttaaatagagactgggtttcaccatgttggccaggctggtttcaaactcctgaccgcaagtgatctgcccgccttggcctcccgaaatgctgggattacgggtgccagctactgcctctggactgcattttttttttttgagacrgagtcttactctgtcgcctgggttgtagtacagtagcacgatctcacctccctgcaacctctgcctgccaggttcaagcgattcttctgcctcagcctccctagtagctgggattacaggtgcctgccactacacccagctaattttttgtattttttgtagagacggggtttcaccgtgttggccaggctggtcttgaattcctgacctcgtgattcacccgcctcggcctcccaaagtgttgggattacagacgtgagccaccgcgcctggccgctttttttttttttaatggctttttgtctctgggcatcctggaacacttcgtgagtgtcatgtcgggtatgaattatatatatatgtaattgagattacactataaatgtttctgcacacaactatactaacatatgtgtaggtgtgtgtatgctttcatatgctctttcaaaagcctcagcgaggttgtcagtacaggaagtattattcccgggcttcccagcacggctccctccccagggcatcctgctgcctgccttgtgtgttgcagacagaaggcaagcaatttattccccatttagaaacagagactgaaggcccatccagaggagataaaacatttttctaaggtcgaaagaaaatcaggaataggattcagagggctcttcttgcttcctctgtttccttcttttaggagaaaaacctgtccttgttgattttaatgttttaccttggaacctgtattttaatactgtcccctcacaaatcaatacatttgagttaattttttattatgaaatatttgaggcacataaaagaagattgaggttcacataaacacctctgagtctgctactcagcttgagaagttatagacacaattacaattacattacagacacagttgaagccctttctatgccatctctgagatagtttgctgcttctcccttcggaggtgacctctgtcctgaatttggtgtttatcttttcatgcatgtttttacgcttttattacatatgcatatgtctataaacagtatatggtattgctttatagatatatggttttgatcttttgtaaatggtgctatactgactatgtgtttaagcaatatatggtattgctttgtgtggttttaaacttttttttttttttttttttttgagatggaatctcattttgttgcccaggctggagtgcagtggcgcggtctcagctcacagcaacctctgcctcctgggttcaagcaatcctcctgcctcagcctcctgagtagctgagatcatacctggctaatttttttgtatttttagtagagacggggtttcaccatgttggtcaggctggtctcaaaatcctgacctcaagtgatccacctgcctaggcctctttccaaagttctgggattataggcctgagcccccacactcagccagttttaaactcttataaatggtgctatactgtatgtatccttccgccatttactttcttttagctcaacattgtatttttgagattttaaaaatgttgatctacgtaactgtttcattaaactgctctggtttcttacagagtataaaagctccctagttaattcatctattctgcttttgataggcatttgtgtttctaatgtttcaagtgacaaacaatgccttggtgaactttctctagaacaactcattcagcgcatgcacaagtttctctaggctctaagctgtgtacctagggctgagatcaccaggcggagagatgtgtgcgttttcccatatacgagattctgccaagttgccatccgtggtcatgccagttcacactcccatcggaagtatgtgcaggttgcctttgttccacaccaacccttgttatggtcaaacctttgcaaatttgtaatagatgagttttagtctgtttccttcctcagttgtttccattcacatcacagtattcgagctgtgtttaaaattagcccatttcctgagttaccttatcagagtccttgcttcagagtcccacggactgaagttgacagctccatggactgctgctgctgagatatctgcactggggagggatagttgatgcagggaaaggcttaggatggctctccatggcccctggtgctgtgggctgactccgttaagcttttctgggagttgaaacacacatttgtgagctttcacttgcacacactttctctcttcccgggtggatccgacccgggtagggcaggcttatctgttgcgtaaatgtgcccagctctgctcagagaaaactcaagccagcagcctctcagaccgtcttccgtaaaaggagagggtggctgtacccacgtggcagggaaaactgaaccgtgaagtcggcggctcagccctttgcacacagaagctgagctgtccctgtgcgaggcagaaaatgtcggctcatgttcatcttgagtctatgcctgattacaggctccagactcggagacctcgagggtgccttacagggaagggggcattcagtgcctactaggcgcccggcttttctttttcttagcaggggtcttatttaatcatttctagtactcatatgaaccaaagccaacattcattgttgtattcattgccatgtactgtgctaaaggcatcgtgagcctttgcttagttcatccccacaacgcccttgtgaggtgggtgtgatttcagacggtgaggcccagatagtgaacgatagagccagcattcagcctcatcaaggctgatggcagagctcctgcttttattattttctcaattgagttataattcacctaccatgaaacgcatcattgtacagtgtacaattcagtggtttctaatagatttacaaggttgtccgagcaccatcaccatctaattccagaatattttcatcaccctccgaaaaaaactacccgttagcagtcacttcccatttcttcctccacctagcttctggcaaccactatctacctttttttttctttttttttaaatggatttgcctcttatggacatttcatataaatggaataatataatatgaggccttttgtgtctagcctcttttatttagcataatgtcttcaaggttcatccatgtagtagcatgtgttagcacttcattcctttttattgctgaatgctattccattgtatttatctactacattttgtttttccatttgtcagttgatgggcatttggactgcttccactcttttcggctgttatgaataatgctgctctgaacatttgtgtgtgaatttttttttgtatagacatgctttctttctttcttcttcttttttttttttcagatggagtcttgctctgtcaccaggctggagtgcagtggtgcaatcttggctcagtgcaacctctgcctcccgggttcaagtgattctcctgcctcagcctcccaagtagctgggactataggcgcatgccaccatgcccagctaatttttgtattttcagtagagacggagtttcaccatgttggccaggatgttcttgatttcttgaccttgtgatccacccaccttagcctcccaaagtgctgggattacaggcgtgagccaccgcgcccggccagacatgctttcatgtctgttgggtgtatatgtaggaatggaatttcttggaaaacccctgcttttaatcgatttaaggaggaaggcatcaactccattcagaaatgagcaaacgaaggccccccaggtggtgaattgactttctgatgaccacacaactcatgaatgacagggataggaacactactgctggtcccctgattcagaaatccatgttctttccaccattacacccaactctcattgtgcagtttagggaaacagatgcaaggagggaaagactggggtgggagaggggtggaattggcttgggatcctccaggttccctgccccccatctcctgcccctccccagcaccagcatggtgtctcctgcctgtgcctgctgcctcacccccagccccatttgcttagtgttgatgagccccttccacttgggaaggaaatggatccgataaggtcrttaacagtgaaatgttaggaatttgccctgtttttcaaatctcccttttcatttgtctccctctcccattcttgtctgcatttaaaagaggaccccccaggagggcaatgcttaacctgcatgaaaaccccctcaatgctccttgcgatgcccactcctggcckctgcctgggggtactgtaagcagctgtcgattccatcaattgattgacacatggggcttgtcttcagccatgttattcacccagacctcatgtccctgatgtctcctggtgccttctaggaccctgtctgggtgggtgtggtgagtgaagtaggagacccaggctactgctgtgataaagacaccacctcacctttacaaagttctgtttcatttataaaatacttgatttaatcagatgcttactttagttggatctttccatcaagcttggatgtaggaatttcttcctgcatcttacatatggggcaggtgagtcccaggaagtggaattcatgtgatctcggtggccagaaagcagaagagctaggatgggtacacagacctccctaacgccagtgggcaattcttgcagtacctgcagaaccagaacggtggtccagggctccagactccaaagccattgatggggttcaggacatactatccccaaatagtaatatggcatttgagaaaacagcagaagcaggaaggtctctcacctttcccctcccttcttccctgatgcagactctcattcaagaaggtgtctaccttatacccagaagaaagggacatccttatctctggagatacagggacacagagaagaacaaacagggcctgccaagttctcttcagtttatcactattagatcatatcccctttctccagtcacacttcttcacgatcatccacttcttcatcaaacctgacatagggaaatatgcagacttacctgtttcttttctttttttctttttttttttttgagacagttctcgctgtgtcgcccaggctggagtgcagtggtgcagtctcggctcactgcagcctccaccttcctggttcaagcaattctcccacctcggtctcctgagtagctgggattacaggcatgcgccaccatacctggctaatttttgtatttttggtagagatggggtttcaccatgttgactagactggtctcgaactcctggcctcaagtgatctgcccgcctyggcctcccaaagtgctgggatcacaggcatgagccgccacgccgggccagagttacctgtttctttggaccttcatttccttatgaaggcttctgcgtcacctaaaaacttagattaatttgtatacattgttcttgttactctgtcttttgttataggggcctcagccataaacctaagatgggaaggaaggatatttcttttcagctactgcgtgttctacatttcagcggccttcttcatagaaactgtcacccaaggctctgataatggagatatgtcagaaatgctggggctgtgtgtccagaatagtaggcgccagccataggtggctgttgagctcttaaaatgtagcaagtctgatttgagatgtgctgtggcatataaactccacacaggttttcaaaaatttcatgtgacacaaagaatatgaaatagcccgttaatagttttctaatattggctgggcatggtggctcacacctgtaatcctggcactttagaaggctgaggccagaggatcacttgagcccaggagcttgagatcagccagggcaatatagcgagacctcatctctgcaaataattaaaaacgtcagctgggcatggtggcacacatctatggtcccagccacttgggagtctgaggtgagaggattgcttgagcccaggaggtcaaggctgcagtgagccatgattggagtgcactgcactccagcctaggtgatggagccaagaccttgtctcaaaaaaaaaaaaattttttttctgatattgattagacatagaaacaacattttggatatactgggttaaataaaatacattatttcatttgggagtctgaggcagaaggattgctttgattgtttgaggctgcaatgagccttgattgcaccactgcactccattctgggtgacagagtgagattatctaaaaaacaaaattaatttcatctgttctttttaaatgtggctagtaggaaacttaaaattgcatatgtggctcatattatcttcctgttggacagtgctctgctagatggtaaattccatggctcaggagtttgcactctgcatttaaagcagtgggtttctgggcatccttgggcctcagtttcctcatgtgtaagccgcagtttcctcatctggaatccattatctcgaaaggacccatccagcttgagcagtattgtgaggtgaccatcaagttccctaggcctcattttctttctttctttctttctttctttttttctttttttgagacagactcttgctctgtcatccaggctggagtgcactggcgcaatcttgactcaccgcaacctctgcctccctggttcaagcggttctcatgcctcagcctctctagtagctgggattacaggagcgccgcaccacacccagctaacttttttttatagttttagtagagacgggttttgccatgttggccaggctggtcttgaactggccaagtgatccacccacctcagcctcccaaagtgctgggattacaggtgtcagccattgtacctggcctggcctctgtttcatctgtcagataaggtaaatgattcctgccttgttctctgcccccacttttcaaatgagagaatggacgaggaaatacttggaaagtgtacacaactgtacaaatgccaggtgttatcattgtcactcacccagctcacacctgtagacaccttgagtagccaagtggaggacggcagcttcctggctaacagagtaggcagacaacagagccctgagcctgggcaggggtcctgagtgccattctgcctttgccttggattgtgtgagagctcctggaccatctgcatgtctgtgtgccctggccaaatggacagatgaaaatgacaccatgggctgctgaaatgccatgttctgaggactctaaagtgtcatggagctcctgtgtatggtatgtgaggccagaaggcagatttcatgattgctgttttactgatggaaatacacaagagatcgaagtgacttgctcagggtcatagagggaggcagtgcccatggccgaggcctgaggtctttcgatttctagctcagtccagtcccaccactgcagtatctccaagccacagcattgggatttggttgtctcacagtgaaagtaaacctgtctgcactcagatccttttctccctgttgtcgggaggtgctgggacagtgggaattgtgagactggaggtccagaggctggctgtttgctaagccatccaccaggaggctgagaagtaagcctgttgtgcctgccctgccacattccagggctgttctgttctccccgagggaatgggggcctgctttatttttagctagttcagtgtgacagccttgttctctttctgggcaaggacttggccacttttaccagtcaggaagctccctttagaacctccaggccctactcaggttctcctaggaagagggggccaagggaaggggagctgaagttggagtgccgctctgcttgctgggggcctggggcatttggcttaactgcacagccctaggttccacctgcctcatgtggggttcataacagctaccttacacattgtgcagatttggatggaggagcttagagcasccagcgtgggccctgtccacattcacgttgctagaacgtcagtttcttcatcaagaatggggatcctggctgggcgcagtggctcacgcctgtaatcccagcactttgggaggccgaggtgggcagatcacaaggtcaagagatcaagaccatcctggccaacatggtgaaaccstgtctctactaaaaatacaaaaattagctggacatggtggtgtgcgcctgtagtcccagctactcaggaggttgaggcaggagaatcgcttgaacccgggaggtggagtttgcagtgagctgagattgcgccactgtactctccagcctggtgacaaagcgagactctgtctcaaaaaagaaaaaaatggggatcccattttcctcatgatttgttgtgcgtaaacagagttcattgaaacagaaccaacagtttacacatgctgagagacacatatgaacctggaagaagagaccgggcaaggctgtgtccccaggatggggtttttgagtgcctgagggatggttttggctttggtgatgatctcacacagacctgtcactgaggagccctgcggtggaattgattatcccagacacagttcctctggtagcttgcaggtgactcagcttgaatatgggagtgggaatcccgattatctttaggcccctctgtccctctgggcctcagccatgcagtggtgaagtgctgaggggaaggcaggggttagaagtgcctggaactctgtaccttaaagtgagaggccgctgccgggggagaagggctgggccattcggggaagtctccgggccttatctgagccagcaaaccctctgagacctccctaggctagtcattactggaggcctcccgcccagcacaggagccacccaacctggcccaggagccaccacgtggtgcctcctagggctcctgggcacacaaagggcccagagggcatggctyctgtacccctggcactcacggtctagctggcggtgtggaccatgcatgtgtccctgcaacgcccaggaaagacacacaccacgaagtgtctcccaggcagatcgactcctacatagtgaacacctaaggccgaggggatgctgaggagaggagtggacggtgtggggtggggcggatcatggcatgtgctcctgagaaggtgagttgggaggtgagctttgggaggaagaaggagctggggacggagaggcccaggaggcagactggacggggcttgcgaggaaggacctttgaggtgatgagccaccatcagggtgctgggggttagtggttgctttagggaccccactagatcagggctgcctcccctcgtggccatttccctccctgctcagagaccggctgccgagagcaggacagaaactaggttcccggctgccacccacactactgaggtggggctgggcagccgcagaagccatgtgcagtcaggaagaggagtccggggctgctgggcgggcacagaccacggtgcgggcccaggctctcagcttgctatggctgttgaacttccttcccagactgtgtgaaaggggaaggagcagatcggacagcttgttgtggctctgatcccagctggaggggagaagaggcctcctggaggtcacactggagtggcgtgcttttggcaaggccaggcagccatgctgttcttgggtggctggagctgtggcggtgatagcccctgtagtaccgcatctccctctccaggaagcccctggccctggctctccctggactgagaggatagagcacaggaccaggaatcagggagcttgctgtccaccccagtctctgcaagtatgtcgccctggccagttgaggaacctcctggccmctcattcttgcccagggtgttggaagtgatggtacctgctctgcttctgcagacaggatgctgtaaggaccaacaggtaaacgcgctgtgccaattagagaggcctttataggtcaaagtcataggaacgcacccacttgacagatgggaagactgaggtgcccacaggatggcagagccagaagtcaaatgcaggtgtctacatggccccgactgtgccctgtcatcggaccgggaggggtcctgaggaagtctttagtacggctttgctagtttgagtcttagagagtgtctgcaggaaataggaagcgggaagtaggtttttaaagaaaaaagtgtttatgatataattccatttttgtaaaacaaaaagaaccatccatctctttatgtatgagtgtttgtttagggaggaagatagtcctagtacatagagctctaaagtccttgtacataaagcagggatatctctggggagactgggggaagaattaataatttttacttttatgcatttttatgatgttggaatatattttacaataagtatatattactgttattgcttcttttttgttgtttttttgagatggagtttcgctcttgttgcccaggctggagtgcaatggcgtgatctcggctcactgcaacctccgcctcctgggttcaagtgattcttctgcctcaccctcccaagtagctgggattacaggcatgtgccaccakgcctggctcattttgtatttttggtagagacagggtttctccatgttggtcaggctggtcttgaactcccgatctcaggtgatccaccagcctcggcctcccaaagtgctgggattataggcacgagccaccgcgcctggcctattattgcatctttaaaaaaaaaaatgaaacagtgtaaatgtttcaagtagttttgttagaatctttcatttgccatttttttcaggcatattgcctcccagctttagttttctaccaatgggtcaatagcattttggtagatgccttttttttttttttttttttgagatggattctcgccttgttgcccaggctggagtgcagtggtgcaatctcagctcactgcaacctctgcctcctgggttcaagtgattctcctgcctcagcttcccaagtagctgggattacaggcatctgccaccacacccggctaattttttttgtatttttagtagagttggggtttcaccatgttggccaggctggtcttgaactcctgacctctcaagtgatccacccgcctcggcctcccatagtgctgggattacaagcgtgagccaccgtgcctggccggtagatgtatttttcaggcattgagatgaaaggagttaggggtacatgattatgtcacttagggatgggagggagggaaatgacacttgatgcttactttgtttctgcacattaaaatcctccccataaccctctgaagtggaggatttattatctccatcttaaaagtgagactcagagagattaagtaacttgtccaaagtcacacagctaataaatcggatttgaacccagctctctgtccacagccctgtgtactttccaccatgtgaggaaaatggaaatgcttaaggtgaagccccaaatgggaggttacgagccctggaatctagacccagctgccatttctaaactccccaacttagcttgaatcatgggtctgtttcctctcctagataatggagataatgatgtctttcctgcctacttcactgggctgcagtgacaggagaaagggaactagcattaaagcacctgcttcctgcgtggcacttggcatccacaagctcatttcacttctttctacacagttcaaatgggataatgtatgtgaaggtcctgtatctgaagggccagtgcacatgtgagccattgctaattgtgatgttaataagcacccaggacccgttctctctgagtcagtgtccttagcaaagggaagtgaattctgatgttgaaatctctgtcctcccctaagctaacatctttcttaacccttcagggtgcacgccacaatttccttttgtaagtggagcgccttgcttggaaagttcattttaaaggcctgcgtcagcagcttcagtcacgcctgctgttctgcagcattctcgatcctcacgggagggtggatgagagagggagtgaaattttccatggctgtgcacccttccacggggtggggtgaaaatggctgggatggttaccagtggttactggtgcctcctgctgcgaccggcctgttcacttgggcatgtccaatcttgcgtttgttttttgtgcatgttctgttgggagcaggaggtggggctggggtcgggcacagaaatgtttgtgagttgattgcagtgctaggccattgagttctttccttggttggagggctctgagccagggaagcttggcgaggctgtgtgttctctgctgatgacatgtcctcctgctctgcgggggtccaactttgggagccgctgagagcttcaaggcccccttggtccacaagaaggagaatccaggacaagtgtctggaaagtgtttgagcaagagcrcccgccctgtgcagccggtctggctaccctcataggaagggctcttcactctgggcagcggtggacagaggccctggaggctggatgcgggttctcaggcaagagtctgagggacccagctcggtgtctgatgtctggtgtctgggactgggcgccttcccatttccatcccagcctgaccagactgaccagagtcccacatattcgtctcagacactggtttgagagkgagcatttgagggcctgggtttctgtcatgactcctgggaacctctgtcttctgatagatggtccacagaccgaggcttgcagtggaagcagctggaagtggtgctgtgcggtgtcctccccaactcccaaatggagtgtggggagggattcttcgggcactgatgtttggctggagcagtaaagcagcggtgatgtggaggcagcacctaagagaaggggacaggattatggagatgtgagtgtgtgtgtgtgtgtgtgtgtgtgtgtaagtacttgtgtgtgtatgtgtgagtgtgtgagagtgtgtgtgtgtgagagattgtgtatgtgagagtgtgtgtgtgtagagagagagggaagaggggaaaaggaaggaggagagtaaagatctggagatgctgtggagaggaggacagaaatagaaaagttgaaaggccagactttggccaaatccccaaagaccaagagtcagcctttcttcctgggtttctggcagagatctggagcaactgggcaggagagatttctccaatgccctttcttcctccctctctccttcaacccactgcccattcccagcctctttcccagggagacaggcgtggtccagtggagtgccaggaggggctggtctgaacgaggaagatgcgttttgctcagtgaagtgctgggttctctgggcccctggaagttttctgcaggtgtctctagtcatgtgcttttctccagtgcctccgggccacttaaaggcccacagtccagaggggcatgtctgctgagtcctgcaccaggtgcctgcctggctgggcagtgtggcagrtaccagggagctgacttctcccctggcagcccagccccaggcctagggtatttgctggttcagtggccccttctgatctcccgaggaccagtggaaagaaagggcttcccttcattgtcctcattcatgtaaaatccaggaggccccagtttcagttccggccttgcctcaattgggcctcccttttggccccagtattcatgtctcttctgagaggggttgtacctcatgacgactcatgaacctgaacaaaaggaggaaaaccctccctccatagcagcttgaggaccaggccgttctctgtgtctgcagcctgctttttgatttgagcttctaagctttatttggatttagcttggttgtcctgaaacgttggggtttttggatcaatgtctgtgtgctgagctgcaccttgacttagaaggcaggatagctgtggagttatggagagctgccttttctagaagcttctcctgtccagcgggaaaaccccaacagctctacttggatctgccttctgcagagcaggggaccagtctttcttaaggggcagggatgattgtatggaggagccttagacttgcaggtataaaacctcactcccccagctgtgtgctttgaactaatcacttagcttcttggaccatcagtttctgtgtctgtaaaatggggattaagaacatctcccagacagttttgaaggttaaatgacatactggatcttgatatactgatatactgtaagccacaagagaattatatagtattattccaggatccagcattgtttgaattcctcctttgtgtcaagcaactgggtgagttccaaaggtctattcaatatgttttctttccctggggaactcacgcagtatcataggagatggacagcttggtaaaaggataatcatgatgtgtgaggagtgtggtcgttggggcgtgtccaaaatgctggagtagcaatgtrccttttttaaaattaaaattaaaaaaaattttttgagatggagtcttgctgcattgcccaggctggagtgcgatggcgcgatcttggctgactgcaatcttctctacctcctgggttcacgcgattctcatatctcagtctcctgagtagctgggattacaggcatgcaccaccatgcccagctaatttttgtatttttagtagagaccgggttttaccatgttggccaggctggtcttgaactcctgacctcaggtaatccactcgcctcggcctctcaaagttctggggttacaggcatgagccattgctcccggccttaaaattaaaattaaaaaatattttagaggtgcgatatcactatgttgctcaggctggtcttgaacttttgggcctaagcaatcctcctgcctcggcctcccaaagtgccaggattacaggcatgagccactgtgccagctagcaatgtagcttttattgtatgatcttgcgcttgctcctccattctccacgcagcagacacacaactctcatcatggttgtaatcagtaaagccgtcccaaggctcgctgtgctgtgggatcccgcttgtatttgtttatgtggctcatcaggccctgtgtggttgagctctggacagtctttccaggcacaccgtctgcttgttcatcacaaaaaccaccctccctccccttcggacttcacacatgcccttgcttgtgcctgggcatgctctccaacttcgcctctccaggaagccttctctcccatgcttgcaacgtggctgtctctccctgcagacccagggcactatgatggcaagggctgctgatgaatgccaccagccagaatagggcatggcttgtctctcctcccagggccatgtttttggcaattttatttcctttaaaaaatatatatacatatttctttctttcttttttttttggagactggatctaagtctgtcacccaggctggggtacagtggcaggatcatagcaccctgcaacctctgcttccccagctcaggcaatcctcccgcctcagtctcccgagtagctgggactacaggggcgtatcaccacgcctggctaatttttgtatttttttagagacgaggttttgccaagtttcccaggctgctctcgaactcctggccccaagcaatctgcctgccttagcctcccaaagtgttgggattacaggtgtgggccactgctcctggccaattgttaattttttttttttttagagacagtctcactctgtcacttaggctggagtacagtggttcaatcatggctcaatgcagcctcaacctcttgggcccaagtgatcctcttgcctcagcctcccgagtagctgagactacaggtgtgcatcaccatgctgggctaatttttattttttgtagagacagggttgttgcccaggctaatctcgaactcctgggctcaaatgatcctgctgccttggccttgcaaagttctagaattacaggtgtcagccaccatgcctggcctcttctggcaatttctattctggctcttggtggttcctgattgcccttctttgagctgctttattgtaaagggaaaaaggtggtagggctagtggttaggagtgggggcaaggatcatccttgggcgcagagagtgttggcagacattttgggaggcctaggtgggtggatcacttgaggtcaggagtttgagaccagcctggccaacatggtgaaaccctgtctctactaaaaatacaaaaattagcagggcgtggtggcgcacgcctgtaatcccagccactcaggaggctgaggcaggagaattgcttgaacctgggaggtggaggttgcagtgagccaagattctgccactgcattccagcctgggtgacagagatagactatgaaaaaaaaaccaaccccaaaaacaaacaaacaaacaaacaaacaaacaaacaaaggaaaaaacaccagtgttaaggtcttttcagccttgtggggctgtaaatctgtctctctatccagtgggagccttctgtgtgcaaggctccatgtgaggcactggggaggtcagggtgacacgcatggaaagctgggatccagaccagaccctgcctaggggtcagtgctgaaggagtggtgatatccagcctgaaggacttggacatcttcaggaggaagtgacagttgatttgaaccttgaaggttaggtgagctgggaagaaaaggaagggcatttcaggtagaggtgacagcagaaggaggagagcctggagcacctactaggaatggtagaggtggtttggccggagttcagagagcacagagccacacctgcagagggtaggtgccttggcagtggggaggcattgcaaggctttgggcagaggcatgacttgattagggttgcactttaagaggctgatgctgcagtggtgtagaagatgggttggaaggaagagattgaagataaactgttacagtggatcatcagcaatccaggcacacagagcagcagaaagagtggatggtgaaacaaaagaaccttcctcggtggactctacagggatagtgccatcaggacaggtgtctagctcaattctaggcacctagctggtgcccagtgaatccttttttgggagaataaatgcgaagatgccatgaaggacaaacaattagtgatagccagtgacaacccagggtgcctaaggttaggagcctgggcagcttgaggagaacggggaactcaggaagaggagcaggttgggtcaggcctggtgaagggtgggagtagtttgactcggaggtgcagggcccatggcctggcacacaggcccggcacatgggtatgggagcccaggggctgtctccattcattgaggctgggtttaaggtttctgtgctctgggcctgccaccctgtgttctcagaagggtcctagccctttggccgccatttctgtctttctagaagtcttgcccrtggacacctgccagtactactgtctcatgttaataataatagctgatgtttattgagcagttactgtgttctaagtgcttgtgtctcatttgaacttgtcctatatgttaggtcctatctatcatctcagtttttcagttgaggaaactgaaattcacacagctgttaagctctggggctaggattgaacccagttggctggctccagagcccttgttcgtagcctctctgtcattcccatcccagtgagagtgagccagccaattctcagagagagaaggaggcttgaggtgttcctgatactggaggaaacctacctccatcaagtacttgggggttgaagagcagcttccatgtcatatttgagggttggaaaggatcttagagatatcgggttcattttacaggccaggaactagggctcagagcatttgcaagcctgttctgggtgacatggatgacagcagttgaatgaccttccgccatgcgatgtgccagcgtgygtgttcctgtgcctgtgggagctggctatctcrgcgggtgggtgcctcaccttgccctgtcctccccctcgacctcactctccttccttctcatccccctccagattgacaagtatctstatgccatgcggctctccgatgaaactctcatagatatcatgactcgcttcaggaaggagatgaagaatggcctctcccgggattttaatccaacagccacagtcaagatgttgccaacwttcgtaaggtccattcctgatggctctggtaagtctgtcacccagagattgaaccctgagggctaaatgttctgtgaaatcttccttctaactwcatttgttcatacatttgctcattcattcattcaccattccatcaatctgctctcccatccatccatccatccatccgctgatccatctgctgatccatccatccatccatycatccgctgatccatccatccaatatgtgtctactgagaccttatgccagtcactggggataccatggttgggcaaggctgacctgctgtcattgactttactgtctagtggcttgtgatactttagaaagtgtagtgtttatgggtctcgcagatactgtgtgggttgctcttatgtcttcagaacatgaagaactccagaacaaatgaagggttcattttagggaaatctctccatcagggaatcaaagcttccctctcttcttatcccagataatagcaatcctaatggacaggtgggtctcagacttaaaggcagagattccagaccccctttggacagatttcacagatgcagaattgaggcagcccccaaaacaaagaaatacagaggggaggtagaattgaaagaaaaattgtatcctttcactctgcatcctgtggctcataccctgcagtggggcgttgggggagggccccctgaggattgtctgtttctcctccccagaggagtggtatcagcccctgcacctggctgagcggagactgagaagtcgcagtctggcctgctcagtggaagctgttcttcccggcagacccgcagttactagtttgtggaggtgaatgctgtgcttgctccagcgtggcgccctcacaggaatcccctgttagctgtgttctgtgctctagggtggggctcacctgctgtaggcagcagagggagggagagcaggaggaagtcaggtttcccttggggttgtgagtacacgaccagtgagtacagctttcacacacccctgcgatttcttccctgctctcgaggctcttatttaaaggagtgatttggggcatcttgtatgcagcctgcaaaatggacgccaggaaactgcagctgttgcaactgatgttcttgaaagatgggcaagtgggagtaggctggttgcagcaggaaaagacctctgctctctgcctgcagtcatcctgaatgagatttggacgctgataaagaggccttgtgctgttcactgtggccacgggtggggtctacttcatgctcacatattagcatgtatatctctgatgtaagcctactccacctccmcccttttgtttaggtgttgattactagcacctacttctagctttttaagaactactgaagagattctggccatcagagtgaatagactgtggtctaccctgggtgtgttcgcttgtctctggctggagaagaaagaactttatatatagttcactcttgctttttcccagccatggatgtcacctacagccaggagcactggaacctttccaggatgaggagagctatgtagcagaggcatggctctgactgcttccagctgagagaagaggaaggagcggggaggggagggggtatgggcagcacccaggagagcacctgctttggctttgcttgggagagctcagaaggctacctgatccctgcgaggcacctggccctgtgtgactggctcagggcagacacaggggaggagacactttgcctcctacccactgggccctgctctcaagccagctgtgtcccagggacctatgtcagcaggggtgctctccctctccttcacaaactgtttccaggattgagagtctcaaggtgtgatccaagtgcagtagaaatccagccatttgccatattggctactcctccaaacaaggcttagaactcatactcatttgtgaaatgtatttttcacccccttttagagattcatagaaacggcacccccccattccaaatatttatgggtgggttcagttcatgtgccccagagcccacacttcgcttgcaatggtccctacagccccgcaaagacattgctgttgatgctaaggacttggatacccaacccccagtccacttcctgccccttcgtgttgtgccgggcttctgtcttcacctccccctgcctcttggctcctttatcatccaagaatcaggagatccctgcagtaatcagaatctgggtctcttaatagtaaatccatagtgctgttccctttttgaaatgttaatcactgcttcaactgtagtaattagtgacagaattagtggtaatcccaaaccacggagggataaattggcgctcaccatggtggagcaatgcctaagtggtgatgtgatttccaaggcaaaggaaggaaacaagcctttcctttcttgctgaccttgaccctggtcgactagacacagagttttggaactcaactgactttccagaagcatttctgaaaacatatctgatacatacattctgatacctatcagcccatttttaattagtttctttcttttttggtcattttttttttaatgggcagtgaggtttttgtttttggtattttgtagagatagggttttgccatgttgcccagactggtcttgaactcctaggctcaggcgatcctcccacctcccaaagtgctgggattacaggcgtgagccacctcacctggcctgtttttatttttattttttagttgttcttcaataatctgtatatcattaaaaaaaccccaaaaacctaaagtggctttttgctgctgcrtatcatttttgaggtagtggatgaatgaataataaagaaggaaaatattgaagcctcttaacattggtgatttggctaaatagaattccctcttcaaagctactgtagggagcaagggaaaacgtcccctttgccctctgaatgttggctgaaaaatcagctcacaaaaggcagattaataggagaaagggcatacacatttattaacatgcatgtgggagaatcacagactgattactcaagtatcccggtggggcccagatacttacatttcctcttttcttttcctttttttttttgagatggagtcttgctctgttgcccaggctggagtgcagtggcacgatggttcaagcgatcctcctgccttagcaccccctacgtagctgggattataggcacctgccaccatgcccagctaatttttgtatttttagtagagacggggttttgccatgttggccaagctggtctcgaactcctgacctcaggtgatccacccgcctcggcctcccaaagtgctgggattacaagtgtgagctactgcgcccggccacacatttcctcttttcagaggggaggcaggagacagggaacagtaaatgattactagggagaatgaagatatcagggaacagagattaaccagtaccggttctctttggaaattgaataggagacagattttttttttttttttaagacagtctcgctctgtcgcccaggttgcagtgcagtggcatgatctcggctcactgcaacctccgcctcccgggttcaagcaattctccggcttcaacttcctgagtagctgggattacaagtgygcaccaccacgctgggctaatttttgtatttttagtagagacgaggtttcaccatgttggccagactggtctcgaactcctgaccttgtgatctgcccgccttggcccctcaaagtgctgggattacaggtgtgagccaccacgcccggtttaggaacagacatctttaaaaaggtccattcaggtgtggtcagattcttcagtcttcttttctgcaatagataatgagataacagggagggtaaggataaagttctccttggagggtctgcgtggtctttatgyagataggagaaaagcattttccagcatctgttgatctttaagggcctttagttcaaaatactcattataccagggagccatattttggggtgaagtattttgggtttccctcactacccagtctcttgggaattgctgtccctctgtgcccagcctcccccattcgcgaagtgtcccttttttctccttttctcatttatccctaaggatattgtaagcactaattagagtgtaagcttttggaggctaaataggaatcgatacttcttggtttcggcttcattgttcctacacagcctttacccaaaagagaagtttttacccaaaggagaagtaaaaaaaaaaatttkctagaagcttggatgtgccattatcttttttcatgcaaagcagagccatttacagtgtagtcacggttgttttggggccctaaatattcatactactgttttccagtcaacggaaggaaaatatttaccttctcttcttgcagcatttgggtggtctcagttttcttatatggaargatagttgggttatctcaagtattctctctatctgtgaaacctcctgagttgaaggcrtggagttcccatcatgcagctggattgtagatgggcaggaatgcctgtgtatctcatgtacagaattaattcattgaggctgggcacggtggctcatgcctgtaatcccagcactttgggaggccgaggcaggcrgatcacctgaggtcaggagttggagaccggcctagccaatatggcgaaaccccgtctctactaaaaatacaaaaattagctgggcatggtggccggtgcctgtaatcccagctacctgggaggctgaggcacgagaatcacttgaacctgggaggcagagttgcagtgagctgagatcacgccactgcactccagcctgggcaacagaaactctgtctcaaaaaaaaaaaaaagaagaatcaattcattgagctggactcaggcaggcatttcccgcaggcagagtttttgcttgccctgtattccagcacaggctggtactcgagacacatctgtcctgtgtttgttttccattatttgctggtaataatggctgtcattagaaagtggagaattgccagtagcccttcggatgtgttgtttaatgagctttctcttgagcggttctcccagcttcagtggaaatgagaaatgtgaggaaaggtcacaggcaggaggccccagtagcaggaagcaaggtttgagaccaaagattgaaagaggaagttgggaggaaacctattactgcagaaagaggctgagcttgtagccaaagagaaaaggaaataaaaatctagaacactgaatcggtctctgggtttgccactcccaacctgtgtgaccttggagaagccacttaacttctgagcctccatttcctcatgggtaaaatggccatggtaatccctgccccacctgcctcaccaggctatcatcaggatcaaatgagagtctttggaaactgcaaaccaccgtgagttatggtgcgtcatcgtcatcctcatcagtcttatgatataataactggctttggaagaattccttgggaaagtctttcctaaccaatggagccagtccaaggaccgcacccagcaggcctgaatgtgtaagccgagcccctgcaggaaggatgcagagtttttcaggattcgctggcatctctgtgatgttacaggggaaggaggcagagaaaaggggcaagccaaggcaggctgtctcacccccaacccctgagctagccacayaaaatgtgggtgagaccacaggctacagctccagtacctctgcaagggggtgactggacacgacagctctgaatcagggagccaacccgaggtaaaagggactgataggtcccttttgttatggagggcaagtgggtatttgggggattcatttcctgacaaagaatattgaactaacctggaaaccttctggttgtagctgaaggaaatctgactcaaatttgtttaagaaaaaaagagaattctagtttcctataactgggaagtctcgctgtgagttgacttctgtatctagggattcatctgtctcttactagttcagtcagctcctttcctgtgtgttggcttcattcataggccatctctcctcttacagtggcagggacggcccctgcagccctaggctgacccctccccttatagccagcgatctctgtgcaaagagcaggccttgctccccatggacctgtgatggtcttggagagggctgtgattggcttacttgggttatgtgcycatcctgaaccaatcacgatggacaagatgggtgacttgggatgcccctggatcccatgcctggattacgcattggtacccctggagctggagtggggattcagccccacttccaacctcataggtgaaaaatgggagggtagttatctaaagagatgctggacatccaggaaagtttatcagttatcttgttgtccttaacagacatcattcctcagtgtcttttgcccggcagcgtataggaccagcactttgggaggccgaggtgggcggatcacaaggtcaagagatcgagaccatcctggccaaaatggtgaaactccgtctctactaaaaaatacaaaaattagttgggcgtggtggtgcatgcctgtagacccagctactcgggaggctgaggcaggagaattgcttgaacccgggagktggaggttgcagtgaaccaagattgcgccattgcactccagcccgggcaacagtgtgagactccatctcaaaaaaacaaacaaacaaaaacatgaaataaataaatgtttaggtgaacattaaaacagcaaattaattaagtaaaatattaaaataaaaagtaccgatcatttcatctcagtgtagtatttgcttttgtgccccttttccccctatgcacaagtggtttatagttgtttatcagactgagctttcactgtcttcattagagaatgaagcaaaataaaaccaaagctggccgggcgccgtggctcacgcctgtaatcccagcactttgggaggccaaggcaggcggatcacgaggtcaggagatcgagaccatcctggctaacacagtgaaaccccgtctctactaaaaaaaaaaaaaaaaaattagctgggcgtggtggcgggctcctgtagtcccagctacttgggaggctgaggcaggagaatgatgtgaacctgggaggtggagcttgcagtgagccaagatcacgccactgcactccagcctgggcgacagagcgagactcygtctcaaaattaaataaataaataaataaataaataaawaaaaccaaagctaggccaggcacggtggctcacgcctrtaatcccagcactttgggaggccagggcagtcggatcatctgaggtcaggagtttgagaccaacctggccaaggtggtgaaacctcgtctctactaaaaatacaaaaaatgagctgggcgtggtggtgggtggctgtaatcccagctactggggaggctgaggcaagagaatcgcttgaaccccggaggcggaggttgcagtgagccgagatcgcgccattgccgtccagcctgggcaacaagagtgagactccgtctcaaaaacaaaaacaaaaacaaaaaaaacaaaacaaaaaaacccaaagctataaggaatcatggaagttgaagagccccagaaaagaagtgtagccattcctgatgtgctgaagtctctctctggcccccacttttccttggggatccttgtccctgagttctgtccaggaggcagttttcatggttatacattatggcttcggattcaaatgctgactctgccacttactggttgtgcgtttgggcaagttatctaacccctctttacctttacttgctcatctgtagaatgggcatcctgacagtactgacttcatagggttgtgaagattgaaaataaaaggatacgtataagcacttagtgattggtacagaaagactcagtgaatgttagctgatggatggtcaaataaaatgtttctgatattctagtgactcacctgcgaggagctacttcatactgaattcaattttttcagttatttcaatttttttttttttttgagacagagtcttgctctgttgcccaggctggagtgcagtggcatgatctcggctcactacaacctccgcctcctgggttcaagcgattctcctgcctcagcctcctgagtagctgggattacaggcacctaccactacacccagctaatttttgtatttttagtagagacagggtttctccatgttggccaggctggtctcgaactcctgacctcaagtgatccacccgcctcagcctcccaaagttctgggattacaagcatgagccactgcgcccggctgaattcaattttttaacctagtggtggtgtaaagtactgttggagttaggactccaatgggagcccaaagaaaattctatattgatttgaacaatgccacaaagtcggggtcagaatttccaccaaatctatgacacctgcttcccagcattctcccttgttctctctctttcctttggaccacaaataatttaaaaccagtggcttcatgtgatatatacatataatggaatataatcggttcataaaaaggaatgaggtactgatccacgctacagcatggatgagccttgaaaaccttatgccgggtgaaagaagccagacacaaaggacctaatattatacrattccacttatatgaaatgtctggaataggggcatctgtagagcagaaagtacattagtggttgctgggagatagggaggttgggaggaaatggtgaatggtygttaatgggtatggaatttcttttgggatgatgaaaattttctaaaattagatagtggtgatggttgcacaactctgtaaatatgctgaaaaccactgaatttttcactttaaaatgggtaaaaattgtatgctatattattatatctcaataaaactgttattaaaaaaacaaccaaccaatatgtgaaataataagaaatatacatgttggtctctgcccctagtctctagcatttagcttctaaaacccttgtaatttcttgagcaatacaggtgctaggagaatctttgatcctggtcctgactcagagctcctaaatcccttggaatttcttgggtgatakgagagtctcttttgttccttggtgggaccctggatagcctcaggatggggggctggttgccagggggaaccaaccatgtgatcagagggttgctgtcagccccaacccccatgccgcctccagggagggagagagcctgaaaatagagcgaataaaccaatggtcgatgatttaatcaatcgcaactgtgtaatggtgcttccacaaaaacctaaaacaggccaggtatgatggctcacgcctgtaatcccagcattttgggaggcccaggtgggtggatcgcttgagcctaagagtttgagactagcttgggcaacatggtaaaaccctgtcactacacaaaatacaaaaaaaagttagccagatgtggtggcacgtgccggtagttccagctactcgggaggttgaggtgggaggatcgcttgggctctggaggttgaggctgcagtaagctgtgatcatgcaactgcactgcactccagcctgggtgacagagtgtgaccctgactcaaagaacaaacaaacaaaaccaaaaaaaaaaaaaaaaagcaaaaagaagaaaacctagaatgactgagttctggtagcttctgtctagctgaacacatggaggttcctgggtggcacatctggagggggcatggaaactcctgccctttctcccatgcccctccctgtgtatctcttccatccagttcttcatctgtatttattgtaatatcctttatagtaaatatgtaaatgtaagtgaagtgttttttctgggtctgtgagctgccgtagcaaactaatgcaacccaaggagggggttgtaggaaccccgatttatagtgatcagccagaagcacaggccacaacctgtgcttgtgactggtgtctgaagttggagggagggcagcctcgtgtgaacgagccctcgacctgtgggatatgatgctatctccaggtagctagtgaaataattgaattgaattagagagcatggagctggtgttcactggagaattcactgcagaattacttgcttggtgtgtggggaaaaacccacatgcatccagggtcacaggtgtgttctgtgttgtggtgagtagagaaaaggaaaaacatactctggtttttcctctgtgtgtgtctcacatgatggygtaactgctttgtgcttaataaacagcaagcaggggtgctgtattagtccgttttcatactgttaaaaagaactgcctaagactgggtaatttataaaggaaagaagtttagttgactcacagttcakcatggctggggaggcctcaggaaacttacaatcatggtggaaggagaaaaggcatcttcctcacaaagcggcaggaaggagaagtgctgagcgaagggggaagagctccttataaaaccataaggtctcatgagaacccactcactatcacgagaacagcatggggggaaccacctccatgattcagttacctccacctggtctctttcttgatatgtgggcattgtgggggttacaactcaagatgagatttgggtggggacacaaagcctaaccatatcaggtgccttdaatgaatgaatggaccaccagtccctgtgaccaggcagctaatgagcatttgctgagctgtcctgggtgccaaggacagagaatcccaagttgtggtctttccctcaaggaacttgagaacgaagataggaacaggctgggcgcagtggctcatgcctgtaatcctagcactttgggaggccaaggcaggtggatcacctgtggtcaggagtttgagaccagcctgaccaacatggtgaaaacccatctctactacaaaatacaaaaattagccaagcatgggtggtggacacctgtaatcctaagtannnnnnnnnnnnnnnnnnnnnnnnnnnnnnnnnnnnnnnnnnnnnnnnnnnnnnnnnnnnnnnnnnnnnnnnnnnnnnnnnnnnnnnnnnnnnnnnnnnnnnnnnnnnnnnnnnnnnnnnnnnnnnnnnnnnnnnnnnnnnnnnnnnnnnnnnnnnnnnnnnnnnnnnngaacagtgacattcaatgtgagaattccttggtttgttgtttatttctttataccttcattaattccacaagtatttgctcagtttttacctacattccaaacaccattgtaagttccagaaatatagcagtgtgtcagggcttatagcttggtagaatcaaatacaaagataagtcagctttattgttaaaaacagaaagcaaaccttattttgtgttgaaaatcaaaagctcaagggacccagaataaccaaagcaatcatgaaaaagaagaacaaagctgaaggaatttcactgccaatttcaaaattttcagcaaagcaacagtaatcaagacatgtggtactggcatgaaggtagacatgcagactaatggaacagaatagagagttcagaaataaatgcatacaggctgagtgtggtggctcatgcctgtaatcctagcactttgggaggccgaggctggtggatcacctgaggtcaggagtttgagaccagcgtggccaacatggtgaaaccccgtctctactaaaaatacaaaaaaattagccagttgtggtggcacacgcctgtaatcctagctacttgggaggctgaggcatgagaattgcctgaacccgggaggtggaggttgcagtgagcygagatcatgccactgcattccagcctgggtagcattccagcctgggtaacagagtgagactttgtctcgaaaaaaaaaataaatgcatacattacggtcaattgacttttgacaagaatgctaggactattcaatgagggaaagaatagtyttttcagcaaatggtgctgggacactggatatccacatgcaaaagaatgaagtttgacmtacacctcataccatatataaaattaacttgaaatggatcaaatacctaaatgtgggagctaaaactaataaaactcttagaacgaaatacaggtttgaatctttgtgaccttggatttggcaatagagtcttagctacaactccaaaagcacaaacaataaaagaaaaaacgtaaaactggacttcatcaaaatttaaaacttggccatgyttggtggctcatgcctgtaatcccagcactttgggaggccaagcaagaggatcacttgagcgaaggcatttgagacagcctgggcaacatagtgagaccttgtctctaaaaaaaattaaaaattagccaggtgtggtcgtatgcctgtagttccagctacttgggaggctgaggctggaggatttcttgagtccaggaggtcaagggtgcagtgagccatgattgcaccattgtactccagcctgggcaacagagcaagaccctgtctcaaacacaacaacaacaaacataaaatgttactgcatcaaaggataccataaaaaaaagaaaagacaatccactgaatgggagaaaatatttgccagtcatatgtctgataaaggatttgtatctagaacataaaaagaacttttacaactcaacacataaaagacaaatgaggccgggtgcggtggctcacgcctgtgatcccaacactttgggaggccgacgcaggcggatcacaaggtcaggagttcgagaccagcctggccaacatagtgaaaccccgtctctactaaaaatacaaaaattagccaggcgtggtggtgcacgcctataatcctagctactgaggaggctgaggcaggagaattgcttgaacccgggaagcagaggttgcagtgagtcgagattgagccactgccctccaagctgggcaacagagcgaaactccatctcaaaaaaaaaaaaaaaaaaaaaaggaaaagataagccaagtgtttaaaatgagcaaaggatctgaatagacatttctccaagtggccaataagcacatagaaatgtactcaacaccattagtcatcagagaaatgcaaattgataaagaagtcagactgtaataagtgttgatgaagacatggagaactgaaaacttcatgcattactggtaggaatgtaaaatggtgcagctgctttgaagaatggtggtaattccttgaaaagttaaacatgggttactatttgacagcgattcttgtcctaggtatatatacccaagataaatgaaaacgtgtccacacaaaaacttgggcacaaatattcatagtagtgttattcataatagccaaaaggtagaaacaaaccaaatgtctgtcagtaacaaatgaataaataaaatgtgttatatctatagagtgtaacagccattaaaagggataaagtctcatatgcactataacatgatgaaccttaaaaacattttgcttagtgaaatgagccagtcatacaaggtcatataccgtatgatttcttttcttctttttttgagacagggcctcgctctgttgcccaggctggagtgcagtggcgtgatctcagctcactgcaacctctgtctcttgggctcaagagattctcctacctcagtctccaagtagctgggattacaggctcacaccaccatgcccatctaatcttttttgtgtttttggtagagacaggggctcgccatgttgcccaggttggtctcaaactcctgagctcaagcgatccacctgcctcagcctcccaaagtgctgggattacaggcatgagccaccgcacctggccactgtatgatttcattgatatgaaatgtccagaagaggtaaatctatagcaacagaaaatagattagtggttgcctagggctggagaaggatgaggggcttgggaggtgatagttaaagggtatagggtttctttttgaaataatgaaaatgttataaaattggctgtgctgatggttgcataactccgaatatactaaaaaccattgaattgtatactttaaatgggtgaattatatggtatgtgaattaaatttcaataatgctgttacataagatataatgataaagatctttccctgcctaggaaaatgatatgccccaaagcagtctagtatttactgccataggattgagagcttggtggatcatgtgctgtggaaggcaggggtggccgtcacccctggcgtggtagatattaggacagtggggatgtcaccttagcatcacgagtgaaacatatcttaactgatttttctgggagcatcgtgaggataactaatgagatgaagggtagagaatgtttggctgtggcttaatggttggaactttgcccatggccgcctgcctttgctgtccgatggtctcagcctacagtcctgctctgccccctgaggcccaccccagtgctgcacatgtcactcccgagggaggtaaccatagcagaccagtactttggccactggtacttttatgtgaccaagagggacttctgttaaaagcatcctctgggtggaaacaacccaagggtccatcaacagatgaaaggataaacaaaatgtagtggatccatacaatggaatattattcagtcttaaaaaggaatgaggctgggcacggtgactcacgcctgtaatcccagcaccctgggaggccaaagcgggtagatcacctgaggtcaggagtttgagaccagcctggccgacatagtgaagccctgtctctactaaaaataaaaaaaattagccaggcatgctggcggatgcctgtaatcccagctactcgggaagctgaggcaggagaatcacttgaacctgggaggcsaaggttgcagtgagctgagattatgcctctgcaytccagcctgggcaacaagagcgaagctctgtctcaaaaaaaaaaaaaaaaaaarggatgaaattctattgggggcagggtggctcatacctgcctatagtcccagttacttgagaggctgaagtgagaggatcttgggagcccaggagcttgagactgcagtgagctttgatcacaccactgtactctagcccaggtgacagagcaagaccctgtctctattaattaaaaaaaaaaagagtaaaattctgaaaatatggatgaaccttgaaaacgttatgctaagaggaataagccggtcacaaaaggacaaataactgtgtgattcttcttgtatgaaatatccagaataggcaagttcatagagacagagagtagaatcgtggatgctggggactgagggtgaggggaaatggaarttattgcttaatggttatagagtttgtgttggggtgatgaaaaagttttgaaaatagtggtgatggttgcacaacattgtgaatgtacttaatgctactgaattgtacrcctgaaaatggttgcagtggtaaattttatgctatgtgtatgttaccacaataataaaacacaaccctgaggagtaagcagaaccctggaataattgatgtcagagctgacatgcagagacccagggcaggcactgggtggacctcagatgtagggctttgtctgagttgaaatgcggtgtgattttttatttctgcatagcagtgctgtttttgaaataggttaagaaactagagaaacatggggtgggaatttgtacttaattcagtacttccattcccctatagtcagaagtaagagactgggattgcttgaagctatttctgtctaaggactctggggtaggatagggtttcttttgcctactctgcgtatatggcagtggttggatgaagtttgcatgattgctgctttctggctgataacagcatgtggcagggggaggcagacagggcctacgccctgccaggaagcgggcatggtatgtggcttccccttaacatttgaatctcatgtgatacctgttgtctccctaaacagaaaagggagatttcattgccctggatcttggtgggtcttcctttcgaattctgcgggtgcaagtgaatcatgagaaaaaccagaatgttcacatggagtccgaggtttatgacaccccagagaacatcgtgcacggcagtggaagccaggtgggtccctgctccctccgggtcaccccgtcgggccagcatccccttggttacctccaggaaccaggcctcaaagcactggcatcccaagcccctggaagagggttgctggaaagagtccctcatagatgcatatgtaaaaggactcctgggcagaggatgtgacagcctgcatgggggccctgcttaaacagaggctctccgtctgggcaaactggtgtagtggaagtgggctgcttggactagcagagtctgggtttgaggagggaggctccgcagctctgttgggtaaatgcactcattccctgtggatcctggggtcggttccccagtgcaggtttagcagagccctgggtgaaaatgcccytttctcctggtcattggcctcacccacttactggaggccccggccttgtagggtatggctgtggccttgtygggcaggaatgaggtctcacagctctgggctatttgggggcttcttgttacctgatttagaataccattgcacaagcccttggcacagaaagcagaggaagcagggaaatcacggtcccctccttttacactcctgttggggctccccacgctgggcccccaggaagggctgcccttcctccctgcccaaggggctgtgggcatgcctaggaagggcctgtccacctgccccctcctctctgggtgcggggagtggtgggtctgtagctcactgaggaccctgtgatcagggctcaggcagcccactgcaggttttcagtcatttctgggtccctaagcccgtcgtggggcaaggtgcactcctcctctctcctgtagacattctggctcctccagtctggctcgcctcctgagttgtggctgctgtccagcatatgtactcagagctggccaaatgtttgctttaaggagggtgtgctcaccgcaaggttcatgactaagatttccagggaactctggttctggggtggacttcgagatgagacccaggagccttctcttgactctactgtgctcttaagttcttgtgggtgggacctggagcaagccaccaagccttttctttgtccaagagacaagggctaatcctggctaacctgctccctgggatttgggttcagagcccttcagattatgtcacagtgagtgtcacaggtgacactgtcactagagcaggtgagccactttatagtaggccaccaaagctgggtgcatcactactggatggccctgcccaagggctcccctgctactcccattactggggctgcagagactggcccatccatctggcgcctgcacaaaggctgccagctggtaggtctcttgaccatgcccagttggctgctgcattgcttctccttgcaggtggccagcagcccatggtttggcatcctgcactttctgtttggaacacacactggcctatcactctgtttcccaaggtccttgggttgagctacctaagcctggcgcattcaacactgagactcaccctgtgctgcaaacattccctgtgtgttttacaaacattccctgtgtgttttggcttgaccttttaggagcaaggtttgttaattaagggagtaccctcaccttcttaccactgccctcttcgtctctcccagcctctatccccatcgtcccctcttctcagtcctagaatcactttatttcctactgtctctgtttcttcctctcctccttttaagcagcctgaaaagaggatgatgacgataatcatgataatgtagtaccattatagcaaattcttttttttcttcttttttttaagacggagttttactcttgttgcccaggctggagtgcagtggcgcgatctcagctcaccacaacctccgcctcccgggttcaagtgattctcctgcctcagcctcccaaatagctggaattacaggcatgcgccaccacacctgactaattttgtattgttcgtagagatggggtttctccatgttggtcaggctggtctggaactgcctgttcaggtgtgagccaccacacccagcccagagcacttttaagctttaataaattcagaagcacaaatggaacattcttaaaatatcacttacttagttgtgggaattttgaatagtaaatgttttaagtttttgtattagccatcatttgccatctttaataagagtgactgagtctttatttttattttaaattattaaaaaaatttttttttaaagatgggatcttgccaggttgcccaggcagatctcaaactcctggactcaagcgatcctcccactttagcctcccaaagtgctggattatagatgtgagccactatgcctggccatagtgtgtgtatttctcaaataaagagtgtgttgtcaggcaagaagagaaaataatgttkttttttttttttttaagacactaaagctttgagttcagagcggttaggtgactttttttcctggttgatcgcagacatagtctagcctggggcgggtcacttcctgcctctttgggcaggcttgtcaccctggatcaccagcaytccagaaacggcctttccttctcaatggtgcactctggggagttgtgtttggcctggatccgggaactggtgacaggtcccattcatgggaatccatttgagttctgccccttcctgaggcagccttcccttcacccggccttctctcccgaggctgcaggagagtctggagcctccgagtgcagatggcgtggggcgccaggaccaacttagtaatgagtttatatcagtctgcaatgtaggtcgcaggaagcttagccggcttctctggggagggtcatgtgtcaactcagcctaagatgccagctgctctgcagcctgagtaatagtgactcagggatagaaggtcctacattaaaattgaccaggcgttctwttactctggcaacaaagtccgactttagagctggcttgggggggatctggggaaagatgggaacagcagtaatgacttctggccccctcatgaggccctgcaagtaaagccttcaggcagctggccttgtctgggagttcgggctggggccacttcatgtgactatggtttggctctcctaagacagccttcttctgggttccaaaaagctccatggctgtgtcactgccatgtgtaagggaggtctagtgtcatgagagtcatgtgaaagagacaaggggttagctaggctgtggcatggctgccaaaagtgtatatatatacgctcaggttggattactagaggcagagagataaagaagggaggttcttagttctactaaccactcttctggttagaacacacatagaatattatcttctgttctgattatattttgagacagggtctcactctgctgcccaggctggagtgcagtggtatgatcatggctcactgtagcctcgacctcctgggctcaggggatcatctcatctcagcctcccaagtagctaggactacaggcatgtgccagcatgcctggctaatttttaagctttttgtagagaggaggtctcactttgttgcccaggctggtgtcaaactcctgggctcaagtgatcctcctgccttggcctcccaaagtattgggattacagacgtgagccaccatgcctggccctggttatattttagagatgaagggaattattagagagatccaaaaagattaccttagaggtgttgagcctctcctcatgggcagtattcatgtagaagctagggacccagtgttccaggctctttctagcagattcctaagatatgtatgtacctgataagtcatagataacatgttatagcacaggcaagcttaagctacartgcggtagataaattgtggtatattcataccaaggaatactgtgcggcaatgagaatgaacagttgtcaaagacaactccgtggatgactgtcatccacatggtgtcgagtgaaagaacacagacaccaaagagcacacayggtctcatttccctttagacacaccaaacaaacaggcagatgtaactgagggtgatagacgtcggggtggctggcagttgcccttgggctgggtggtagcggtagtgactgcaggggcagaagggggcatattacaggtgtttctccatctcgtgtttctccatctgggtgctggttacatggatagctgcagcttgtgagaatccagtgaactctgcacttaggatgtgtgtactttttggggtatgcataagacacttcagtaaaaagtaacattatgacagtctgaattgttaagtcactccagtgggctagaggctgtggaattgccctcagagtttctgaaattttcagagagcgtggcgtygggyggggcgggaakgccactccacctggtggctggtggagatccgtgacctgtgtgttatgaaggcatagctggttttctrttatttttccatttttctcagtacccagatgttgcatattagtgaccactgagaggccagttctgttgaaggctttgaattgcttcttaagagctgtacttgcccacagggtagcttttgaaaagtgactcttctctgcattcacacacagcatggcttttcagacagggccaccaggtcccaggagtacgagcactttgtttgggtagatgtattcctttctgtgtgtgtgggagggaatggtttatrtttttctatgaaatgctaagcctgctttggggccccctgactgctctcatgtttccttcagctttttgatcatgttgctgagtgcctgggagatttcatggagaaaaggaagatcaaggacaagaagttacctgtgggattcacgttttcttttccttgccaacartccaaaatagatgaggtaaggatgttctgggattatcgggctctgcagatgccccgggatggaaaagctaacaagcccttttctccacaacttttcccctttgttggcagaatggtttgcatgtctggtatttttaaagaaacatttgcagaagttagtgtggtatcatgatatagtgtttactttttcacttaaacttyagttatttatgtatttttggagacaaatcagggtatttttggccaccaggtagacagaagcatttattaatcttaggcaagcaaaggaaaataaagtagttttaatggtggtggagagaggtgggaaagctctttgccagaattgcatggtgtgatgtttacctggaaactgccctggttactgcgaatatgctcagggccctgtccctcaggtgccagggctgcctctccatagtggagctgatcagtggctccagccccagggatgcccttggcgacctccgaggtgacttgttgtacccaccttcctgtttgtcatctatttgttttttcattcgttcattcattcagcaaggatggactgtgatgataacactgaacttcagcactgcaggaatacaaaataaatacatacagccttgttctttttttacatggaaagacagaaaccacacacaccacaaacacaaaccacccatgaataaacttctaataatatgaattctggggttgggtgcagtggttcatgcctgtaatcccagcactttgggaggccgaagcagaaggatcacttaagtccaggagttcaagaccagcctgggcaatctgtacaaaaagttagctgtgtgcgttaacatgtgcctgtagtcccagtgatgtgggagaagcttgggagatcgaggctgctgtgagccatgattgtgccactgcaccccaacctgggggacagagtgagaccttgtctttttttgtttgttttttgagacagagtctccctctgtcgcccaggctggagtgcaatggcacgatctcggctcactgcaacctccacctcccaggttcaagcaattctcctgccttagcccccctagtgctgggattacaggtgcccaccaccatgtccggctaatttttgtatttttggcagatatggggtttcaccatcttggccaggctggtctcaaactcctgaccttaggtgatccgcctgcctcggcccctcaaagtgctgggattacagacgtgagccactgcacctggccaggctctgttttaatacatacttcacaggtattgcacataatcttcaagcatctctatgagttaagtgcttatgattcccactttacagatgaggaaactgagtctcagaggggctaagaacctgtccaaggtcacctagccaggaagattccatgctcgtaactggtctactctgctgcaagttagtagcatttgggctcagggcaccttccacacttgcagggagcacccctgggtccctttatgccattagggtaagcgtcctttcctgggcactgcttcctgtggctggaacccttacatctgtaaaatctgtggaatcagcaagaaggggcttgagagcacagcaggccaagatgagcgcagaggtctccccagggtcacagggcttattaatggcaggccttggaccagggtcccaggccccacctcccatccagtgctccacccacctccaacatgtctaaatgcctccgagatgttctgtctgacctgttatgctttcaggaagctgtggccatatgtagactcttaatctggttctggtatctgagaacgcccctccaaggtgttcagatcagtttggcctccactgtgtccttccaaaccctttggcaaggcctgttttcagtacaagtttcccttggcttttgagaactgagacatgacagtcactcccccttccccttcccttgtgagaggtgggcctggaatgaagagactttggtggactgcgtttcaccgttgtttacatgtgctctctgcagctattgactgagtgccatccctgtgccaggcatgggctaggccctgggagagaatggccagagtgtatttattttgtattcctgcagtgctgaggtttaatgttaccgtacagtaggtcccgtaacagcagatgtagcctgttccccatgaaggtgcagccttctatggacagaagtgttgcaggaggtgggagggaatgacttcctgggcacgagagcctgcagggtggagcagacatgcccaagagggggcattgtgaacagagaaggagccagaggtggggggtgtccacctgccagccttcaccccctctggagaatgcttcctaggctgggccagggtacttgctgtggcgccagtggagcacagaccctcaatttcccatccagaggcctgtgcatgttaccccttagggctggctgagaacttcaagattgtccacttctagatcagctccctgtttctagaggagcacagtgaacctcagaggagtgaagggaactgcccagcaggaaatgggcagacagtatgaagtgggaccaggtctccagattgccagccccacctttgtcccacaacacctggttctctgaggctttggaggaggaagagggctgcttgagaggaggcagatagtgtccagggcttttgcagttcctgacttagcttagttgctgctgagcaaagaaccaccagttctcatcaagggctgccctccctggtgcatactccagtctgtgtggctcccaccgtgagctggggcggggcccatgtgctcagaatgctatccctgagctacctctgcaggcctgcggggcctggaccgtgaatcttccaaccctgctgcatttatagtgacttgccccattcagagtaaaacagccaagtataacaattatttttctgttctcatatctttttagtttttttttaagaaagcaaaagcaatatgtaaaactatcaaagtaagataaaattatagaatgtttaccattggatgtctatccttgatgtttctctgctaatatgcaaagtgaaataggatcatactgtgtaaataggggagtcaccacttacaaatggcggttaagtcccaaagctggtgaagaggcacaaatcatgtatagtccacatcattccctaaatgtctgggacctggctcttaaaagctcagcagccaagaattatcttagcattttgtttctttttccaatttggctctggctttcttttcccagggctgtggaagccggggtctggttgggaagtggggaagggggccagggatttctcttgctcccttttaaaataggtctggctgcgcagttggcatccagttagattggcaagccatgtggcattactgtccccacatccacttgctttcttctggagtgaactggatattgtgagcaggtttctccccaccctatctttgcccccagagaagcccattgtgtggatgatcgggagatggaaatgagtctgggcccctccccaagcccagtgtgatctgggaggagccacttggcccctatgggcttctgcttcatccctgtcctggagcaatgcccagggccttggggtgctggaggcctcccagccctcatccagccccatccattcttctttgcaggccatcctgatcacctggacaaagcgatttaaagcgagcggagtggaaggagcagatgtggtcaaactgcttaacaaagccatcaaaaagcgaggggtaatttctcctgggccctctgcctcagccatgcaggggtgtggggagcagggctgcattctaaaacagaccagtgcccttcctggggggcagtagtgccaaagcctgaagacccaggcaggggagagttgagggctcacagtgtggaatgatgaggatggggatggtgcaaagcccagctctcggaggygctgcctggagcacccaggcctggagcagggggtcacctcctgacaggagtgctgggctattcagggagtgggtgtcacggatgcagcctgctgtgcttagaacaagggcagaggagcccgccttatcggggacgtggacctcctgtggaggtttgcagaggaatgtagctccatgagtaaaatccccactacccaaagactcttaagccaggtaattaaggaaactgtgaggttttcatcatttaatcaccatgctctgatctagttaatttgagtaccagctgtaatgaaaccagyaccactcacaaaagcaggggttctgaaaacgggagcacttctgccaagcgctgttaaggtgtgtgatctctgctcccatgtgtgagtggacaatgacaccccgttatctgtccccaggactatgatgccaacatcgtagctgtggtgaatgacacagtgggcaccatgatgacctgtggctatgacgaccagcactgtgaagtcggcctgatcatcggtaatgcattcccctttgcccatccatttgttcggcccatctttccaggtggctctgcaccctccccgttgtgtggtcatagcttctgatcttgtcctgcccaggcactggcaccaatgcttgctacatggaggaactgaggcacattgatctggtggaaggagacgaggggaggatgtgtatcaatacagaatggggagcctttggagaygatggatcattagaagacatccggacagagtttgacagggagatagaccggggatccctcaaccctggaaaacagctgtgagtccttgacttttgcttctaaccacatatgtgagttaggggacatttgatgaaagatttgggatgggagatgaaaagggcataaagccaagtgatcacaaacagaaaagcctgtcacattttttttttgaggcggagtcttgctctgtcacccaggctggagtgcagtggctcaatctcagctcattgcaacctccacctcctgggttcaagcgattctcctgccttagcctccaagtagctgggattacaggcatgcatcaccatgcccagctaatttttgtatttttagtagagacagagtttcaccatgttggccaggctggtctcaaactcctgacttcaagcgatctgcctgcctcagcctcccaaaatgctggggttacaggcatgagccacctagcgcggcctaaagcccatcaaatttgcattatttgttgctccttgtttggtgagatgcacagctgtagagtctgtagctgaaaagcacctttaaaataatcttctctttgtttaattacactatgattgtgtccttgtaaaacatcatgaaaacaaaaagcacagaggcattgatgcatcttggtgtggggctcacaatgaacccatctgatggggaatgcggccagagttgagcaggtactggtggtcaggggaggagatcaagaggtgaatgggagcccaggagctcagtagcccctgaaaaaaaaaaatcctcaaattatcccctgctgcatgaaaattaataaatatgaatggttcaaaaatgcttccccaacaaagcacaggaaagttagtgtaaatgtaaggtttaaaaaatatctctatgctgtmgtcacgagtgttgctgttcatggtaagagaggccaacatggtatgtggggcatctaagggagatgagtgtccattcattcatcacatatttattgagcacttactatgtgctgagctctgtgctaggctctgaggatccaaaacagcaccttccctcccaagacttacaatctagatggggaggtagggcagacatgcaaatatctgttgtgcagaggagttggggtaagaagagtataagtcatgtagacgttagggagaatggagaagcaacctccattcttactatggcaatctccgtatctccaatgtcaagcataaatagacacaccagagttgataaagaacagaagtaagagtgatattattcaggttagagtgggtattgctttctctgagccacttatttcctgaagtgcctgctcacatttctctgtgatgctggcatgctgctagctctctctgatctacccagcctcccagcagccttatcccagagttggatactgtcaacctacagagagatgttcactgactctgtagacctaataacccttatcctgatgctagagggacaggaatttactagccatattgaaatgcatgacccaaaagatctcagtactgcagggtggacagttggcctttccacctgaattaatggattttcatcaatggcgagctccccaccagtggaggtggcagcagtgaataaactaggtttctcagtgagggaattcccaagttcttacacccagagttgagcatcaccattgcaggctgagactgtggtaccagcttggtgacaagggaccccagttccaaagctctgacagtcaaaggttttttaccatacccccccccaccccgcccaatccattgaccccactggcatgacatgaacttattactgtgcctatttgtatgtttcactgaatagccctgaatgtgcttgatggcagtgctgcctcaggcacctctggaggtattctgtgacacatggcatgtataccctgttgcatctctaaaattctcaaatctccacattcccaagcacatgtgaccccaaagggtttcagataagaggttatgtacctgtagttactatcagtcacttaatgagaagtctcttttcttagaagtgcaggtggggcatgccacttgtggtaactcgacaggtaatgcccaggcccttatccttggttcccagtttgggaaccctgcatggcttgggtgtaaacttggatctctctgctgtccattgatgtttgcctgaaattttccaaagagatgaactgtatcccaaggctaaactataaactgtgtttacagttggcttgcaataaatatttttgggatggatggatggatgggtggctgatgatggatgagagatgagtgggtggctaaatgggggtacagatgagaaagtgaaaggttggggcaaaatctcttttctygaatatgtttctcagttgtattagtctgttttcacactgcctataaagacatacccgtaactgggcaatttacaaaagaaagaggtttaataaacttacagttccatgtrgctggggaagcctcataatcatggcacaagtcatgtcttacatggatggcagcaggcaaagagaaattgtgcaggggaactcctctttataaaaccatcaggtcttgtgagacttattcaatatcacgagaattgcgtgggaaagacttgcttccacgttcagttatctcccactgggtccctcccactacaacatgggaattcaagaagagatttgggtggggacacagccaaaccatatcactagtttactgcatactgtaggccaggtctcattgagaacaattccaaggaaatgacaaattcccaagttgcatcacatattcctggaaataggctgtaggctaaagagtttttttgcctaagcaaatttttgctgtgcccccaggcttctatctgaatctttggatcttccctatgtcgtttttccatggaatgcctagttcttgaaagccattttaccctctttgtggcagggaaagacgtttgctccatttgactgatgggaaaattatggccctagaataggacagaggtgacccaagactcattgttgaggtgtggtctggtgtaggtttggggatttttgccctgtttgaaggtttgaggttttcagagtgagcttccagaatcttttctcattggtaatcagggaggatctagggaagtgatttttcatctctgagtacatgttagagttacatagcggtcttttaaaaaaaatactgatgtccaggcatcctctcactaatgattcagttggcctgggttgcccagtcctctgtattgtaaaagctccctgggcgattccaatttttaaccagggtttttttkttgttkttgttgttttgttttttgagacagtcttgctctgtcacccaggctggagtgcaatggcgcaatctcagcttactgcaacctttgcctcccaggttctacgtgattctcctgcctcagcctaccaagtagctgggattacaggcgtctgctgccacgcccagctaattttgtatttttagtagagatggggtttcaccatgttagccaggctggtctcgaactcctgacctcaggtgatccagccaccttggcctctcaaagttctgggattacagacgtgagcccccgtgcccagccattaaccaggttttaaaatctcagtgtgttagatttgtgcaaaggctctcagtgcccaagtgggctctagactaccaacagctactcattccatttgctttgattggagttagcatttaactgagtacctactgtatacagtggacagggaggacattgtcataatagctatgtggctcctgccttcattggtagttactgcatttgggaggcagcagaggaacctgctttgagtgttcaggccccaccttgccccagagccagaaggtctgtttctaaaagggatcagtcttttggtttccttgtctcgcccttatattccaggcctttgatattcttgccacatgcttgtcttatactgtggagttagccccaccttttatatcatttttaattctccttcccttttgtttccttgaggtttttttttttttttctttgagacagggtatcactctgttgcccaggctggagtgcagtgatgtgatctcagctcactgcagccttaaactcccaggcttaggtgatcctcctgcctcagcctcctgagtagctgggaccacaggcagcagtaccatgcctggctaattttaaaatttttttatagagactgggtctccctatgttgcccagctggtctcgaactcctgggctcaggtgatcctcctgcctcaacctcccagagtgctggcattacaggtgtgagctactgcacccggcctgcttgggcttcttgctcttctgctcttgctctgtgttctgcctggaatctctgggatcttgaatcctttttccctgtgattccttatcacatccttcaaaatgcagagcccccaccccacacaacaacacagcaacagcagtgactgcaacagcaaacgctggtggttggtgttcaggagagctctttggcctggatggtggttgagtaactgtgcgccttcaagtcagcacccagatgccttttctttctgtggttctgctgctccatggaatctctcggcagctccggtcctggtttgcttggccatgggcctctgtctcttttctttccttgggcttctacctgaagcagacccagggtgctgagggctcctctttggtgtgcaggtccttgcccatgacttctcgtggttgatgatgctcccctcccccatctcagcccttcctgggcccaccagcaggcagattggttggaacgctgccacgccgcctctcactgcctgtctgtggtcgtaggtgtctgactgccgagacacctgggcattacctgttcagttatcacaaggaaaagggcccgggcgttacccgttcagttatcacaggtggcatgccctgagaggcagatcatgacttgctcgatttcattaatttcacttgagcagatgggaagcacgctgttggaacaggagccggtctccatgagccttggtttgaacagagagaagctcgtgagaggtgctatttgcttgttctgctgctctaacagggcctttagggactgggaaaggacagaccctggccgtgggcctctatctggaaaagggggtatcactatccatgtgtgtaataggccatgtagaaaagggagcagattgttctgggcgtctttagaaggcagagtgaaaagcagcgggcagagggtgccaggaggctgatgttagcgcatcctatggggaatgccctttctcttgtcacactgcccaacagggaaggctgcctagggaggagaacaggcagagaagctggggtagggtggtcctaggtggctgctagcatgatagtgacagctaacattgagtgacacggtccatgagacaggcaggaatgcacagtggttaggagtacaacttctggtgttagatctaactggattcaaaatgtggattgccacttgttagccctgtccatgggcaagttatataacctttctgtgcctctgtttcctcatccgtgaaatggggataatgctaatgtctccctcctagggttgtaatgaggatgaaaaaagttaatacaggtaaagtgctgggaaaagtgtcagacacataggaagggccacaggcactcattgttagccagatattgtagcactatctgacctatattaacccatatcctccatataaccttacaggaaagcagtcagtatctcattgcacaggtagggaggccagggtgagtagctcagtagtggctctgccaggcctccaccagtgctgagattcctgttcagggctacacagaggctgttcccacaggagcctggggtggcaccagacttagaagggcactgtcctgccagggatcctctgcctggctgcagccaggcggtcacgtctggttctgtcaggagcaggaacaatgaggactgtgtttttaaggaggctctgtgccctgtgctgatggttgagggccgggtgctcaggtctcggcagcatccttggcttctgggcggctctggttggaacagattgttttgctgtgtcacagccagctgtgggtgtgccagctgggctcccgcagaggagcggcgggctgctctgatgtgcgcccacctcttcaatctgccctgctcaggggttcctcctggcccctcgtcagccaggatgtgggggctgaatctggctcacatatggcatcgagccctggttcttgccagctcccggctgggccttcagcaatgcrtgttggcttctatctctacacctggctgcctctcccctgcagcattgggctcattctgtcattggtcggtgcttgaccggggctggagctgtgcggtgagctgattggctgtcagtatgcagagcccagccctggagtttagggtaacatcagtgggggaggagtgagttcctcaaagcaaattcttgatccttttggccggagaaggagaaaatcatgccagggaggtgcctaacaaatgtcctgacagcggccccagggggagtggctgcctttccctcggagaagctgtttaccctttctgagctgggaaatggggagaatacttcctggccacctcctatccacagggcttggggtctcccataggagtggaggtgaaagttctttgaaaagtatagcatacaagccaggtgctgtagcttgcatctgggaggrtcgcttgggcccatgagttcgaaaccagcctaggcagcataaggagactccccctctacaaaaatttttaagaattagctgggcgtggtggtctagctactcaggaggctgaggtgggaggatggcttgagcccaggaggttgaggctgcagagagtcgagattgtgtcactgcgctctagcctgggcgacagtgagaccctgtctcaaaaaataaataaataagtaaatacatacatacgtacatacataaagataaaaaataaaaagtatagcatacagtttaggaggagattatcatattttgcacatttctatctggggccttcttgacatctgcaatctaaatccaaacgctccccctgccttcaggcagccttccctgcctgctcctgcccatggtgttctcctagtcacaggcatggggtctggatgactcctgccctctccacagtcggcttggcttccgatccctctccctctgctgttcagtcactcaagcacatggttttgcctgccagcgaggctgggggctggtgaggggtgagtcggggcttcccattccttttatgtctgtcccagccctcgtgtgtggggcgcagaggaaggctgacaagtgccggtgtgcctttctccacaggtttgagaagatggtcagtggcatgtacttgggagagctggttcgactgatcctagtcaagatggccaaggagggcctcttatttgaagggcggatcaccccggagctgctcacccgagggaagtttaacaccagtgatgtgtcagccatcgaaaagtaggyaccatcccctcaaggctttcttggggtgttggggcagagaagagcaattggtcccttgttacttcttgagtcsaagtttggtggcttttccttcaagagtgtcatggctttctgggtccgtgtcctctcactcttagttgacccattctgggccggactccctgaaggcacttgtggcggttcattaaagaatgacatagttagcctcaagtgcacaggtgattttcctgtctagctacaagagcagcctcctctcccacccccatcagcccatcacccccaccctccacacacactcagggtaagattagcgtccaggaagcagactattcgagcaaggagcaaggagctggtaaagcccggagcctgggtttttggaattccacctcccacttccagtctggagacctccagactgtgctgagggcactaagggcaccctagtaacctcaagatgttaattaggtgctccctgaaaaaagacttccttgaccaataggattgggaatatggcacatttatcttccagtttacaatattatggtaaaataaatacagactcacagtaaaaaagaataagaagtataaagtataaaaatacagatttatagtatcatcaacacattaaagaaaacccagtttgctttgacttgtcatttcccaaacttcttttgtgcttgaaaccaccccttccctgccacacacacattctttcagaggaaacctgttaacagccagaaatgtgccctgacgtgcaagtttgagaaacaccggttaacagatgagacaggacagttagaaggaaggacagagccagccagcaactaactgtagccccttggcatcacacaagaaacccgggattctctgtctccttgtgaagatttgcatcagctctctttgaggttagagaaggcagctgctggaagaggaaaggggtttatctggaccaactcttctgccaaatccatgtrctggagtttgttgtatgatcactctcctgagtttccagctgtcccttttcatgagtctcctggtcagtggctgggaaggaaggggagcgggagactcgtggattgtcttgaaaatcactggccaagtcaggaaatgcatgccttcctcttggcctgtttctggtattgactctttggttaccaagaaacacaaacccagctagctcaagaaagcatgtatattataataaaggctatctcaaaaaaaaaaaaactataaaaacatcctacaagagcagatgttagaggcattctctaaaatcaggagcragacagtatcaccagtttctatttggcatcgtactggagtcttagccagtgggttttygtttttgtttttgtttttaaagaaaagacgagagataaattaaaggtatgagaatcaaaaaagaagtgaaactgtcattatttgcaaatggtaaaagtctatatggaatacccccaaaatatctacagacaaatgaatagaatgacgggagaggttaaaaagatgtctggatggggtttcaccttgttggccaggctggtctcaaactcctgacctcaggtgaccctcccactttggcctcccaaagtgctgggattacaggtgtgagccactgtgcccagcccccatcctcttctatcatttttaaaatctcttctcccatcataaaattaatttctctcatattttttggtcaggtagaattgggaaagtcccacactctcctattctcgtattaccttaacatcccaagcttcctttccttttttggtctttatgaatatatttatatggacagaattaagataaacaaaattgatttccccattctctcacttccccatcttgtcttcctagaccccacagagttaaaacttgggactcccccgaccctcccagaacacttgtatattgtttgtttgaggttcgtgccgcagtaacagacacagtatttgattgcacatacagatgtttgctgggtatattcactgtacattttatttaatctggttttttgtttgggggttatttggggcgaggttggttttgtttttaaatattaaaaaaaatctgtcaaaaaaagatgtctggagataagatacagaagtcaactgtatttctatcagcaataataaaaatatgtacatattttaaaacacatttttaagaataattttagatttacaggaaagctgcaaagatagagtgtatgtatatgtgtttgtgtgtatgtgtgagtgtatatgtatacctgtatgtatacatatatattttaaaggcaccatttgcagcaataacaaaactataaagtacttcagaatgaatccaacaaaagatacacaaaacacgtgtacagaaaattacaatttcactgagagacatcaaggaaggatgtataagcatccaggggcaactcacagaccccacgagtgggaggttctcctgagcctcatgagccctgggtggtggcagccatttcgccacctgttcagaggccacatagtcttgcctctccacttctcttcatggtcctggcttggcatagtgcaacctggtacagtttttcctatcactacctggcatttcttatggaggagaacccttcctgggctcttctcaggcatttgacagtcttcatcccataccatcccataccatcccacacatggtaagtggggctgtccctttccagcacctttgagcctcagtgctttgcactgcctcatgtggtcctcagtgcatcagtattggcttctaacttcacaggaataaggaaggcctccacaatgccaaagaaatcctgacccgcctgggagtggagccgtccgatgatgactgtgtctcagtccagcacgtttgcaccattgtctcatttcgctcagccaacttggtggctgccacactgggcgccatcttgaaccgcctgcgtgataacaagggcacacccaggctgcggaccacggttggtgtcgacggatctctttacaagacgcacccacagtgagtctgccctttgctatcattggcactctgtacccattgtgggtagggaccttctccagagatcagacttttgtacccggtaaacgtttttcggcagacaagacaatggtggtcgggggctgtggctcatgcctgtaatcttagcactttgagaggccgaggcaggaggaaggagtttgagaacagcctgggcaacatagtaagacctcatctttacgaaaaattgaaaataaataaatagataaataacatgcttagttctgggcataaggtcagcgtcgcccccttgggaagtatcgcccttagtcgattcttgctggtattgcttctgcactctgtcgttacctcgccctgtcaaaagtcgagatggagatttctgtagctgtcggctcctctgggtggaatgtgtctgtctctcgtccgcatttcatcaggaggaccttgggtcataggtgtggtacccacattcttgtttcagaagctcctgttaaaaccccccaaaccctcagactttacttttttaaatgggcagcttgtctgtgcttggcctctgagagctggagctgcaggagctgtaagttgtccccattggcaaggaggtgctttgttccccacacagccttctggtctgtcagtggccccagccagtcctcatgccatctcaccttagttttagaagccatgttgtcctgtgagaacgtggcttatactttttttaaaaggctaaagggaaattctaagtcattatttaataagttttaatgctagcctgtgacatgattgttttgcacaggacctcagagttgtttcccactgtacatataaatacaatgtgcatgtgaagcacccatgtcagtactgcaccttcacacccagttctgttgatggctcaaagaatgtcgacttcaattgaaatagttctggcctggcatggcagctcacacttgtaatcccagcactttgggaggctgaggcaggtggattgcttgagcccaggagttcgagaccagcctgggcaatgtggctctacaaaaaatcatacacagctgggtgtggtggtgtgcctataatcccagttacttgggaggctgaggtgggaggatcacttgagcatgggggtgcagaggttgcagtgacctgatgtgcctctacactccagcctgggggacagaatgagctcctgtctcaaaaaaagaaagagagagaaatagttttgtgttgctgaggggatagggtttgagccaaggacgtaattgtatttttaaaatatttttaaagtatttgcaaaawtcttgataatgaaacttttattagccatttctttcttttttctttgtaatttcttggctaattttttggacaagaaagcctagggatttgcagcatcacattagaatttttttagattgtggtaaaatacacataacatgaagtatatcatcttaacctttttttttttttttttttgaaggcagggtcttgccctgttgcccaggctggagtggagcggagtggtgtgctctcagctcactgcaacctctgcctcccaggttccagcaattctcctgcctcagcctcccgagtagctggaattacaggcatctgccaccatgcccagctaatttttgtatttttagtagagacggggtttcaccatgttgnnnnnnnnnnnnnnnnnnnnatgagagaagaacgagatgatgagaaagagtaaagtaagagaaaatagcaacaaacgatctgacaacagtaagagagaacataagaagaaagatagaaaagagatgagagaggagaatgaagacgaaagaagaaaaagtgaaagaagagaggtagatagaatagaaggacaaaccaacaagcgcacagacagcagaacagcggccacgaaagcgacagagaaggctatgacatccagactgcacagcaacacaagtaaggagtagacgtgaagagatcacatcaaacgaaaagacatgaatcattctaagacatgagaggggaggaggattatgaagacagggtcgtgccatgagtgcccgaggtggagtggagcggagtggtgtgctactcagctcacatgcagacctcgtgcgtacccaggttccagcaattgctgcctgcctcagcctcccgagtagctggaattacaggcatctgccaccatacccagctaatttttgtatttttagtagagacggggtttcaccatgttggccagactggtcttgaactcctgacctcagrtgatccacctgccttggcctcccaaagtactgggattacaggcatgagccacctcgcacttggccccatctgacttttgaacaccgtgcttttgaccactgtgctgtattatcttcctgtcatggtggagggcaaaatctttttagacctggaattttttgtatgtgatactcatgtaataatgagagtcttctctttttatgtgtgattatgaacgatttcatttttcctttttacctctctgcatttgctaacttttctacagtggatgtatatgatttgtgtaatgaaaaaagcaggtgcagaaaatggaattaggctgggcacagtggcccatgcctgtaatcccagcacttgggaagctgaggcgggtggatagcttgaacctagaagtttgagaccagcctgggcaacatggcgaaaccctgtctctactaaaaatacaaaaaagttagccgggcgtggccccagctactcgggaggctaaggtgggaggatcacctgaacctgggaggttgaggcagcagtgagctgtgattgtgccattgcactccagcctgggtgacagagcaagaccctgtctcaaaaaaaaggaaaagaaaaaagagttaaagagtggagaaagaaagggtggccggaggtccccaataaatgctcagtccagctgttgtggaatgtcccccctgcccccataaggtattcccggcgtttccacaagactctaaggcgcttggtgccagactccgatgtgcgcttcctcctctcggagagtggcagcggcaagggggctgccatggtgacggcggtggcctaccgcttggccgagcagcaccggcagatagaggagaccctggctcatttccacctcaccaargacatgctgctggaggtgaagaagaggatgcgggccgagatggagctggggctgaggaagcagacgcacaacaatgccgtggttaagatgctgccctccttcgtccggagaactcccgacgggaccggtgagggcctgctgggggctgacatgcctgtcctgctcctgccaggaactgagccgcagtgggggaggttggattcgccagtggatgccttcacactggtgatgcacgattttgccagagctagaaactccctcacatctctgttttccatttttattaactgatttgtcatgtgtgtgactcagggcagtttaattttcctggtcagacctcccaggcaagtgctatctctaaaaccacagccctgctcagaacagtgctcttagctgggcaaggtgacacacgcctgtcatccagctacttaagaggctgaggtgggaggactgcttgagcccaggagttcaagaccagtctgggcaacatagcaagaccctgtctcaaaaaaaattaaatgaataaaaaagaagtgttcttaaaagctgggcaaatcccacagcactgattaggttttcccaaagccaaggaaagccagcagaaggataaacactcagtgtacccttcttaaatcttgatagagtatgcatgaggcattcagggcctggggagtttcgcattcaggcaaattgtagaacaaaatccaaccctttatgctaaccttggtagttttcactggagctgatcattatggggaatctgaagagcttttcaggtgggtccttggagtaacgaatgtttgtgacaggaatgtgtcctatgtgtaagttacctaataccacattataagccaccctcacacttagtggcttaaaacaaccacgctttattattgttcatgcatctgtgggtcagttggacagttctgctcatcagggccaggattggctgacctctgccggcctcattcctgcatctgcagtcagctgttgagtcagctgggaggcagatctcagacgcccttccccacatgtccagcagttggctgtcagctggggtgcaggggmccctggccctgtgtctcatccttcagtgggccacctggctgttcaagtggtggcagcaagggctgcgagggagaggggaagacttcaaagcctcctggaagcccaggctggggataggttcagctttgcctctgccacactctgttggcctgaacaatcctagggctgggctagatcccaggggaggagaaattgactccatgtttcagtgggaggaactgcagtcatgttgcaaagaaggattttgcacatgcagggaagggaatgatgcagctgtttttgcaaataccccacaccttgacataaattattattttttgtaggagattttcattgttgcagccctggtgaagtctgtgtattgtgacaggtggtttactcacatgctctcctcccagtgtggctccaagtctgtggtggtcagagatgtggtgcccactcttcctctgagtctgtgctgtgycctaaagggaggagttgcagcttctcctctatgtttgctatggggttctccccttgaaagtctggagtcttggggttactggctgccaagaggcacttagctgtttttgacattctttacgcttttgactgcaacagagaatggtgacttctyggccctggatcttggaggaaccaatttccgtgtgctgctggtgaaaatccgtagtgggaaaaagagaacggtggaaatgcacaacaagatctacgccattcctattgaaatcatgcagggcactggggaagaggtgagattacaaaaccatrgtgcatrtgcactgcacacacggccagtggcaccggcagtcacrtgatgaccaaaatccgccacgggrtgcccacatggatttgtgtccttgtggcccagaagcaccagatgctttttgccatgmctggcttgtgacactctggtggctgagaagattctggaraaggaggctcactctgcatgtgtgtggggtgtgttttcctacgtgtgtgtgtgtatacacactttggtccatgtgcactgataaaattaaaaccacagagagcacgggcgatcctttcttttcccctgcagctgtttgatcacattgtctcctgcatctctgacttcttggactacatggggatcaaaggccccaggatgcctctgggcttcacgttctcatttccctgccagcagacgagtctggacgcggtgagtctctgttcttagggctcagtgatcrggcagcactgagtcccctgtggcctgggtgggctggcccttgaggccttctccagcctcagtgtcattcctagakgacagtcacagtcacagtgggttgagccaggctttrtttcacagcctgcagggcatactgagactcttctctcttcttttctctttgaaagygtcaccttttctgggaaaccttctggtcctccaagcaaaaaaagaacctcatcctcttctgtgccccctgttcatttgattgttgccttgcttataacacttcttacacagttagttcttagtgtcttttgtttctgctagtggtagactccgtgagcaaggacctgtatccctgcaygccctagcacagtgtccaatcagaggagataataaatgtttgttcaatatatgagatgaatcagggtccaggatcagagcttgagcacctgctgactactgattggctgggctcagagctgaaggttacagctcctgtcctttggaaggccacagtctagtgggggagccgagtccctaacaccagcrgctccagctccatgctgtcagggytggggagtggattctgggcagaagraaccaatggtgcagagtcacggaggcaagacccagcctgtcacgctggaagagctgtaggtagctctgggtgtcacaggtggagacgtgaccaggcaggagttctggaggtgggtcttaggccagggtttaaggcttaatgagcagccctaggagagttaggtagggtcacctacctctgtaaaccagttaatccagttacrtcgctgacttgggacttttttcttctgaaacccttttakagctcaggagttagatctgtttgtttgtttttaaagcatttcacttataccttcaccttggattcatcatagtcaacacacacccagtgtactttcttccccaggaagtgttttaacttcaatccagtgaaagctaaaatgtactttaggtagacacagtattactaaactcttaggatccttcagttatagtgtcagtagactcttctgtacagctggttatgccagtggcagcaccaggcttggaatcgggtgatctgggctcttgtccagtattgagtgccgtctttgccgtctgctgagtgaacttagacattgctatttacctaatgtgcctcatgctccatctgtgaagtgggattatttcaracccctatgaggatggtgaggagggtctattcatattttattggtttgtcctcagatgtttgaactccgtctccgatgttgtaagccctcagcagttgttgactcaggagggagggttggaattttgtgttctccccttccaggttaattacacaggactctcctggtgctttttatgttgtagggaatcttgatcacgtggacaaagggttttaaggcaacagactgcgtgggccacgatgtagtcaccttactaagggatgcgataaaaaggagagaggtaactattaaaagaatgttttttaaaatctttactgttttaggggcttctaaaaagtgtatttgcctgttgtaaagaattcaggccaggcgtggtggctcacgcctgtaatcccagcactttgggaggccgaggcgggtggatcatgaggtcaggagttctagaccagcccgggcaatatggtgaaaccctgtctctactaaagttacacaaattagccaggcgtggtggtgcgcacctgtagtcccagctactcgggagactgaggcagaagaatcgcttcaacccaggaggaggttgcagtgagctgagatcacgccactgcactacagcctgggcgacagagcaagactccatctctaaataaataaataaataaataaataatacataaaaaagaattctaacaatacagaagtatgtgacctggccaagaaaagctccctatttcctgactccactgcccgcaataaaataagggctcataggtttgtgttgttaaaagattattattattttttttttagaaaggcaaatcatgactctcatacaaattgaaaaagagagaagcagcccctgacaggtgggcacagcctggcactctcagttaggccttggtgttctcctgtggaacacaaacaatttcacagagtccacaaacaattgcagagcagaaacatcagacacagccactccgtcygggaccatgatggatttagacaagaataagaccagtctgtaaccatagaattgcccctggttcctgacaatatccaatccagagcaaagccccacttctttaaaccttcccccaaaccacaacacagacacagatccaaattaaacttttttaaaaaaaatttttagaattttaaagtttccttttttgagacagggtcttactctgtcacccaggctggagtgcagtggagcaatcttggctcactgcaacctctgcctcccaggctcaagcgatcctcccgcttcagcctccctagtagctgggattacaggtgggcatctacatctggctaatttttgtgtttttggtaaagatggtgttttgccatgctgctcaggctggtctccaactcctgggctcaagcaatctgctcgccttggcctcccaaagtgttggggtttttaaatagaggtggggtcttgctatgttacccatgctggtcttgaactcctgggctccagtgatcctcctgcctcaccctcccaaagtgttaggattccaagcatgggccaccacaccaagccactttccaagatgcccccggggtgtgttctccagtgttgcaatgagtcagtaaagcccaactttgttagattacaggtgtgtttctcgtggtctttggctggaggacattgaaaaaatataaaatgaaaaattcccaagatttaatttaactcattaattaatgagggagtcagtaagagactgttttaaattttttttttgactttttttcaaatcccattacactgagcaaagtaagaactttaaaaaacaaaacaaaacaaaacagaacacttcaaataacagtctaaagagcagacagatacctgggcactaggctgtcagggaagctgaaatgagtgtctgaaagagggctgatttgtctgctgtcttttgcagttaaatagaaaaaaaacaaaaagggctgagttgcatctggaagggtatgctacacaacttacaatatttcattgaaaatatagctgcgggttgggtgcagtgactcacacctgtagccaaggcaggaggaactttgggaggccaaggcaggaggaacgcttgagcccaggagttggagaccagcctgggtaacgtagtaagaccccgtctctataagaaattaaaaaataaaaaattagccgtcatagtggtgcacaacctgtggtcccacctactgaggaggctgaggtgggcggattacttgagcttaggaggttgagtctgcagtgagccgtggttgyggtagtacactccagcctgggtgacagagcaagatctgtctcttaaataagaaaggatacctgctgatctatttttgcctgcttcacaactattagtgttaattcttctagcttgctttccatgcatataccaacacacacacacacactcacttaaaaataggaattataccatatatacaacatgacaaattgcttttttgatttaatatgaaacaggtatccttcctcatcattgcatttagatcaacctcattctttttcctggctgcgtaggattccagcatgtgtctgaattgccttttacatagcccatttgatcttcacttggattgtttcctctttctgactattgcatgtcatgcagtaaatatccttgtatgtgtgcgtttgtgcacctgcagactatttctcaaggacagattctgagcagtgagtttaatattttccattttgccctctgaaaggccataatgctttaaactccaaagggaagaagctatttgaccattgccccttgtctctcctattctatgattcctctaatagtatcatcatctgtaaaatrggtagaatactttcccttccttagatctcatgtttcagatatatccttaatagcaggggtttagtctgtgaaggaacattcattacctttttgtaggctggtaagaaaaccatcttagatgatgaccagtggctctctgactgcagtgcaacagacagaaccggcagcattcaagccaggcatagtgatcctattcctaaagctgtgtccctttctttgcaaaggaatttgacctggacgtggtggctgtggtcaacgacacagtgggcaccatgatgacctgtgcttatgaggagcccacctgtgaggttggactcattgttggtgagtgtcctggaaggtctctttccctgcagaagggaaggctrgggtttccccgttttgtggggccttggcccagcagcttggtcctctgtatggggtagtcttatctgtcagtatcatttcttgaccagctccagagttcagggctggacgaaggcagcagagtctctggcggggggaggtgggggggcctttcttaagacacccataatgctacacattgcttatgatcagactgtcaagaactgaactcttcaggaatgaggmcccaaaaggctcacttggcttgagtggagacaggtacctggagcgggcctggcaaacatggcagctctatgggccttgtatggaggggctctggtcaggtattgcagggggatggggtggggagggagtctgsggctggaaaggaagtagagagcacctcccatgctgaccacacttagagcatggaaaggggcaggatggtcttgggcaccattttgcctttagyagccactgtgtgcgcayggtcccagccactgaagggggttgcasaggggttgtctctgcagctcgktgccttgtaatccaaaacacattaggggtctgggcctcgagcacataattcctgaagcatattgatttgggctatgaggaaaccatttgtcctgctggccctgctcctcgcgtcaggggatgctgggaaagaccccagggagtttcttagccaacatctgcggactctgcctggtgagtgagcagtggcacccctgctactggatcagttgctgagtgtctagagcttgggaagaggccccagcaggctgccttccaggtgccaggaagaacttttcattcattgttaagccacttttcgcttctgttgaaattttaaaaaacctagggagcagctgctggtgaaaaggttgtttggggcctggctttctccacccagcccctccctttctttccatgaatgggcttgggtatgaaatgcaaagctagagtgacacagcagctctcctcctcctgcaggccccaccttccctcctgggaggtcaggcccgcccgtttcctggcaccaggctccagctacatttcatagctactttttctttcctccatcaattgatctctttgctcaggactcccataggcaagatgtatggtttccatgttttggctttctttgcatctcccactcccatcatcttccgtttctggagctcctcttctctcagttttaaccttgggtgaaaagggggctgagaaaacaaagaacaaaaatcatccaactgtacagtctttgaactctacttaagtttcttcaaaggggatgaaaactaccaaagcccttttggtctggccagggggtgtgtcttgtgccctcccgatgaaagttcacctacatcccaccctggatgggtggatggtgctccygggcgcatcattagcatcatcctgggagcttgttagagatgcaggctctcaggtcctggccctagcctcttgaatctggatctgcttcttagggtccccaggtgatccaggtgcatattaaagtatgtgtgtgaagcactcttcctgggctagttgattggtttttaaatgtccagtctattcagtgaggcaagttcagtgaccacaagcttggatatcatggcaattaaaattgctgtgaaagttgcaggatgcttgccttcagtttcttagctcctcatgggctggaacagcaaacagtcggtggtccttctattttgagtgactctgctctagggagttcaggaatggaagtcagagattcctgagcccctggcaagcatatgtcaggttgcatgtgtgcggtgtgtgggtccacccagagaaaggtgcctttttcacagaagaatcctctgatcttcaaaggtctgatacaaaaatgatgaaaaaccattgcttttgaaagccccccttgaaatgctgaagacactgtcctgccctgaactgtgggcttcatcccaaggtatgtaggaaagcttattgagcaggcatagtccacgaccaaccatccttgtcgagaaaagataagtggggctgggcgtggtgcccacgcctgtaatcccagcactttgtgaggctgaggcgagagggtagctcgagcccaggaatttgagatgaacctaggcaacatggcaaaaccctatctctactaaaaattttaaaaaattagccaggcatgatggtggtgcctgtagtccagccacttggaaggctgaggtgggaaaatcacttgagccctggaggcggaggttgcagtgagccaagattgcgccgctgcactccagcctgggtgacagagccagaccctgtcttgaagaaaagaaaaagaaaataagtgaatatctatggtatgatagaagataatcccctaatattttatacacatatatataggcatgtatatattgtatattcatgtgtgcatgatgttgtgtgtgtacgtatatatttcttcttctggtctgaatgttgcctaaacctctaccattgatgctccatctctttgctataaagccatcttctattaaaataaacataaccctgcctggacgggtgaacacattggctcttggttgaaagtcagctaagcaggtgccctctgggtgatgtggctcagactctccatttacatttcaaatttttccatttcaaaattgggaaagaaaaactattactttgttcatcacaaaaaacgtgccccctgcctgtggaacctcaggccccagaccccaggcccagttgcaagacccccaaatgcaaggccaccgctcctcattgccccctcgtgtgttccagggasyggcagcaatgcctgctacatggaggagatgaagaacgtggagatggtggagggggaccaggggcagatgtgcatcaacatggagtggggggcctttggggacaacgggtgtctggatgatatcaggacacactacgacagactggtggacgaatattccctaaatgctgggaaacaaaggtaaccccgcctggtggagaggacacycacagtcagggtgggggcagcacttggctgcattctgccacttgcagtggaagaagtttctaggaggagaggtctgaacagaggtttcaagactggaccccctggctcactcctgacctttgtcttttggacagcagagaaccagggaggacagacccccaacatggtacaagatggcccagggttgatgcctgtctaggggctgcctgtgactgttttttagcctggaggattctggccttccggtccccttgctgtgttcctttcccatcagaataacaagggggtggggtgagggtggctgggcggcaggttggtgtgaagcagaggccctgtcgcaatcgtcctttcctccgtgagcctcctgcaccacctagtggycttgtggagctttgcagctcaggtctcaggtaccatgtctgaaatggcagtgtctgccctttgtctcaagcccccaggaatcaggccatcctctgccacggccaggatgagttggtccaagttgtctccctaggagcagaaagaagggctggagcagcacccagcatgagtcactccctagccccctcaaggtttttgccttttctaaataccacccatgctgttatttacttagtgcttttcttcgaatcagcttacagttttttgtttttctttttgtttgaggtggagttttgctcttgttgcccaggctggagtgcaatggcgtgatctcggctcaccacaacctccacctcccgggttcaagcagttctcctgcctcagcctccccagtagctgggattacaggcatayacaaccatgcccagctaattttgtatttttagtagagacggggtttctccatgttggtcaggctggtcttgaactcccgayctcaggtgatccgcctgtctaggtctcctaaagtgctgggattacaggtgtgagccaccgcaaccagcccttatagtctttttcttttcttttcttttcttttttttttgagacagagtctcaccctgttgtccaggctagagtgcagtggtgygagctcagctcactgccacctcctgggttcaagtgattctcctgcctcagcctcccaggtagctgggattacaggtgcacggcaccacgcccagctagtttttgtatttttggtagagaccaggtttcaccatgttggtcagactggtctcgaactcctgacctcaggtgattggcccgcctcagcctcccaaagtgctgggattataggcgtgagccaccgtgcccagtggcctttaaggtctttactgacatttaatgaaggaggaaaaagaggaagaaccaatagtaccataaagagatggtaactaaaaaatgagtatagtgaagaaccgtgctattcaagtctagctgatgctgtcgcctaccaaatgacctgaactaagaccccctttgggctgagtgcagtctatcatcaaagtaatcccagcactttgggaggccaaggtgggaggattgcttgagctcaggaggttgagaccaccctgggcaacatagggttgagaccctgtctctactaaaaattaataacaataataacaacaataatagtaagacccccttggttaaaaagcrgggggatcagcaagtgttggaagggkttaaggacatgtcagcaccaaactggggtggtctttgtggtggaatgagaaggactgggtgggacttcgtagtggtggcccacccctctgtgattccattctgtttcatgttcttccatggaccacatgaaataggaggaatcctggagttccaaattcyaggggactcttctcagctttgggacactgggcttgggcatgtgccatggaaatgaatcaatcctttgttatttcttgagatccttgagcatggagagggcaggaaatttgaagtcccaagaacaggttgacctccagtgtgttgtggtcactgaattctccctcctgtgtggcctcatcactctgctgtgggcttgaccagtactctgggtatttgcaaaacctttagaaaaatctagaaactttccttttttttgtcttcttgttcctttaagacttagcccagtcatttgcttattctgcagatagtttttgggcactttcctgagggcccagtgctatgctatgctgtgctgtgccctggggactcagagctgaaaaagacacacatgccctgtcctcttggggctgtcactacagcagtggtggtgggaggcagtgagctcaggtgtgttgtgaaggaggagaatggtgaggtgtgtgggaacctgaaacaggcaggtagaacccaggatcaggaggaggacaggctctcggggaagtgaccttggggctgagagctatcaggcagctgaggagggagaccagtctagcaggtagacatgaatgctggtggttttgtttctgatgtgagagagtggaggactccctggtccttcctggtcctcccactctgcctctgcggcagagcacagggctgggcacatggctgttgatgatgcgcttgaggggcagtaggagacgcggagtgaccgtgagaccgaggggtgacagttctcctggccacttcccatagacaccccaggcccctcctcctgtctcaggtatgagaagatgatcagtggtatgtacctgggtgaaatcgtccgcaacatcttaatcgacttcaccaagaagggattcctcttccgagggcagatctctgagacgmtgaagacccggggcatctttgagaccaagtttctctctcagatcgagaggtgagtgggcagtgtcttccctgccagcgcccacccttcagaggtcgcctggctggtggattgtgatgggggtggtagggaccctaggggacattttggccatttttgaggattttttttcctctggaatagcagaccctgggcatttgcatagtgaaatcttataattttattataaattacttttcttggcctggtgtggtggctcatgcctgtaatcccagcactttgggaggccgaggcaggcggatcatgaggtcaggagatttgagaccatcctggctaacatggtgaaacccgatctctactaaaaatacaaaaaattagctgggtgtggtggcatatgcctgtaatcccagctacttgggaggctgaggcaggagactcacttgaacccaggaggtggaggttgcagtgagctgagatcgcgccactgcactccagcctggcctggcaacagagcgagactgcatctcaataaataagtaaattacttactttccttttatccatcctttatgttggggcattatattgatttatttgaaattatgtgtgtaagagggccatatggattccatttcagatggtaaagatgcactacacatacttgtattgggggtgcatagggcccacctggatttatctgaaaggcagcctggggttcagtgccaggccacccaggagctgatgcccctcagcaagttgttccaccttctttctacttttctcctgtccagggtacatttcttcctggcctttgctgtcttcyaaggcacgctgtgtgagaaggaggaaaaaagggtcagaaaaaacaaaagcaattgtgcaaatactgtgttcttcttagaatggtcataataacctaacgtaggctctgtgtaggctgggcacggtggctcatgcctgtaatctcaacactttaggaggccaaagcaggtgaatcacttgagttcaggtgttcgagaccagcctggktaacatggcaagaccccatttctacaaaaagtgcaaaaactagccgggcgtggtggcacattcctgtggtcccagctatttgggaggctgaggtgggaggatggcttgagcccggtggcggaggttgcaatgagctgaggttgcaccactgcactccatcctgggcracagagacagactctgtctcaaaaaaaaaaaaaaaagagaaagaaaagaaaaaaaatattaaaccttaaacaaaaaaaaacctaacaagcctatacattgctcttacccaggcaaaatggtttttaagtatacagttcggtgacattaagtacattcacatagtcgcacagctatcaccaccatccatttccggaactcttttcatcttctcagctgaaactctgtacgcagcaaacactaactccacattcctccctccccccaccccagcaaccaccattctactctctgtctctatggatttgacaactctggatacttcatataaatagaatcatacagcatttgtcctttgtgactggcttaattcacttagcataatgtcttaaggttcatccgtattgtggcaygtgttagaatttccttatttttttatttttattttttgagacggagtttcactcttgttggccaggctggggtgcaatggtgcaaacttggctcgccataacctctgcctcctgggttcaagcgattctcctgcctcagcctcctgagtagctgggattacaggcgtgcgtcaccatgcacgcccggctaattttgtatttttagtagagatggggtttccccatgttgatcagggtggtctcaaactcccgacctcaggtaatctgcccaccttggcctcccagagtgctgggattacaggcatgagccaccacgcccggccataatttccttatttttaaggctgagtgatattccattgcatgcacacactgcattttgtttattcattcatccatccatggacacttggcttgcttccaccttttggatattgtgacaaatgctgctgtgaacacgggtgaccagtatctcctttcagtttgtgtgtgtgtgtgtacgcaccccaagtggacttgcgggatcatatggtaattccctgttcagttgtttgtggaaccaccatgttgttttccacagtggctgtaacattttacattcccaccagcagcccgtgaaagttctagtttctccacatcctcgccaacacttgttattttctgagttgagaatagccatcctaatgggtatgaagtggtatggaaagtcttttcaagcataatagcaaagaaagaaatcataaagaaaaatggccaaatatagctacatagtgtctgtaagtaaaaaaaaaaagtaatcaaacttaaaaggcaacggtaaactgaggaagacatttgtactgtgtatgacaagacgcctagcagggcatggtgggctttggcaggtctggtctacacctgctcttctccaccggctgtgtgctttgcaatactcaatttctcccagcctcagttgccttatctttaaaatgggaataatcatacattcattggttgtttgaggagtaagtaaggtaatgtatgtaaaatatatgttacatggtaagtcctccaagaagcctggctggtcttcattgtaccatcccagttatcgtctctttcaatttaatataaataagacaaatatatcaggagaaaagtcttgagacgtaagaagtagtttatatggccaaaaaacaaatggaaaaaaaagagatcatcctcactaatagagaataatataaattgaactacagtcttgtgatgccttcttataaaactgtcaaaagttgtaaaaaaatgctcttttccagtgaggataagtgtggccaaatactctgctgaagagtaaatggatacaattttctgtaaggcatctggcaatgtgtagcaaaagctcgttgacccagaaatttatcctaaggaaaaacatcagaattgcacacaaagatttataaacaaaccttatcaaaatgtttctttataatagcagaaaattgcaattaacttgaatttctccaagctggctaaagaaatcatggtgcatccctagagggaatactgcagcagctgtttccaatcctgttctcagataaggctgtgggaaattgctcaatgcatgaaacaggaaagagaaagaaaatcacatatcaaggataatcccattttgcatatcatgagaagcataccagctaggaaaaataaactggaaggaaatatattaaaatgttaatagcattttcctagatgttgagatagtgaatggtttagattttccaatttttattttgctagatttgccaaattctccacagtttaacatgtaacacttgcccttgactctgtctgtggatgagtacagtgattgggggyggggggcgtcctttggacgtggtctccaggctgctcttgtgggtcctgcttcatccagccctctggctcttgtcccccacagtgaccgattagcactgctccaggtccgggctatcctccagcagctaggtctgaatagcacctgcgatgacagtatcctcgtcaagacagtgtgcggggtggtgtccaggagggccgcacagctgtgtggcgcaggcatggctgcggttgtggataagatccgcgagaacagaggactggaccgtctgaatgtgactgtgggagtggacgggacactctacaagcttcatccacagtgagtgggccttccagttgggatgcgcagagcttgctgggatccctttgggttagggggtatcagggtgtggtttacgctggggaaatgccctgcgggagcccagccaggctgaaggctgtgcgttcaggagctggggattgtctaggacaaggtaatgaacagtttgtagggtttgactgggatccttagggagacagagaagtggcttcacttggccagctcacaccagtggcatgatgtgaccctcaccccactcctcctggtcccccttaggtgggggctaggcagtgggagaggaggtgagggtgggcgtgggctcactcataagcctggtgagctgtagccaggccagaggctctgttgggtaagtggggagaggatattaagaaaggggaggagctgggtgcagtggttcacacctgtaatccagcactttgggaggcctaggtgggaggactgcttsagtccaggagtttgagaccagcctaggcaacatagtgagaccttgtctgtacaaaaaaattttgaaaattagccagggatggtggtgaaygcctgtagtcccagctactcgggaggctgagggaagaggattgcttgagcctgggaggtggaggttgcagtgagcccagatcacgccactgtactccagcctgggcaacagagtgagaccctatttcaaaaaataaaataggaaaggaggakagccactctcttgttcatctgctgaatcagtttgctaagacttggaagggcgggagcggtttgggccctgggcttcatggcagggaggggtagggagtggcctccctctggtcaggcatctgaccccccatgccagagaaggacatgtgattgcacttgctgtgtgattgtgatccaccgcatgtctcaccttatgaatagggtgaccatattatttatttattgtctacactagggtactcttgccagtcaagagtgctaataattattactctgggactgtaggcaaactaggaccatcccagataaatgaggccatagtgtcaccctacttataagcaacctcacccgactcagtgtagacattacctgcttacctcatggccgtggcttggggtggaaccatctgtcttgctccatcctcacctctgtctctcccscttaatagctgtccttgccatcagctgaggcagcacacaggagtggtttagagctaggctttggagccacatactcttggatttaaccctggcaccgtcacttagaatctgtgtgcaattgcttaatccctgcaaaatctcatcttcctcatgaggtggcagccactggcaggactagaaattagagctgtaaaatatggggcacctagtaggtcctcaaactccttggctcaagtgatcctcccaccttggcctcccaaagtgctggcatgagccaccgcactccgcccacctaataggtccccaaccaaggacagtgactacttttgagagcccctcaccacaagcatcttcagcctggccctgcccttcattttgagcccaacttacaagcatgtagattcagcctttgttcagatactatcttcactggaaggcattcctgtctttgggggccaggctgttgatggtggggcgctgggggtctcagggttgcagctggagatgggtgatattcattcctgcatagcctcctgaaccgatccagtgcttggctggcttgcacctgccttaatgatccatgtcagcccctaacatcctccttggttttgaggtccccctggagcctcaagctccgatgtgggtgtgtgtgttattcatgtcctarccttcataagccatacagagcagttgtgtttggattcgcagttgggcctccctgctgaaaactgtgacaatgggattgaccgtgggcccactttcctcccagccattctcaactggccacagctgcttctaagcagcctgcctcccaaccrtgttcaccctccttgttgttgggttcagagtctctttgacttccgatgcttatgtcctgataaacccatcacaaagtcgaagaatcctaagtcgaatcatcaccagtcagggggctgtctgtgctttggtgttttcgggtaggcccagygtctctcatcttcctccaactaccttctgttttcwcgtcctttttagcttytccagaatcatgcaccagacggtgaaggaactgtcaccaaaatgtaacgtgtccttcctcctgtctgaggatggcagyggcaagggggccgccctcatcacggccgtgggcgtgcggttacgcacagaggcaagcagctaagagtcygggatccccagcctastgcctctccagcacttctctcttcaagcggcgaccccctaccctcccagcgagttgckctgggagacgctggcgccagggcctgccggcgcggggaggaaagcaaaatccaactaatggtatatattgtagggtacagaatagagcgtgtgctgttgataatatctctcacccggatccctcctcacttgccctgccactttgcatggtttgattttgacctggtcccccacgtgtgaagtgtagtggcatccatttctaatgtatgcattcatccaacagagttatttattggctggagatggaawatcacaccacctgacaggccttctgggcctccaaagcccatccttggggttccccctcccygtgtgaaatgtattatcaccagcagacactgccgggcctccctcccgggggcactgcctgaaggcgagtgtgggcatagcattagctgcttcctcccctcctggcacccactgtggcctggcatcgcatcgtggtgtgtcaatgccacaaaatcgtgtgtccgtggaaccagtcctagccgcgtgtgacagtcttgcattctgtttktctcgtggggggaggtggacagtcctgcggaaatgtgtcttgtctccatttggataaaaggaaccaaccaacaaacaatgccatcactggaatttcccaccgctttgtgagccgtgtcgtatgacctagtaaactttgtaccaattcaaagacccgagtgatgcttaatggctggggacggggggacaggcagaggggggtgcagtttcttgggatgtggcaaagaccaaacactggggagttttgtggccttctgggcggaggagtttttttttttgagatggagtcttgccctgtcacccaggctggagtgcagtggcacaatctcagctcagtgcaacctctgcctcccgagttcaagtgattctcctgcctcagcctcctgagtagttgagactacaggcgtgcatccccacacccagctaatttttgtatttttagtagagaaggggtttcaccatgttggccaggctggtctccaactcctgacctcaagtgatctgcctgccttggcctcctaaagtgctgggattatagaacaaggccacttggcttccaggctgcttgggttcagtgagaggactgcaacactggtcccctctctgccatccccacccggatcctgcccttcatcttcctctctgccaaccccaagacaaaggatgaaatgtgctctgccccacccctcccctccctctctacccaaacacagatgaaatcttgaagcagcccaggctggctgcacgctcccgctcccggatcttttttctttattttttatttttattttctgtagacagggtctcactgtgttgccagggctggtctccaactcctgagctcaagcaatctgcccccctcagcctcccatagtgctgggattataggcgtgagccatcgctcccggcccaccccttctggatcttagattgacctcatccctaggaaattaacccttgtctgaccttttactctcccttcccacccccacctcaagagattcctggtctatccccaggctaccattttggattctcccccagccttggtgggttccatgtcactctgcacccaagcaccttgtgatgtcccaagccacagctgcggctctaagtggcttcctgcgagaccgattgccagaccacctggtttggtgagatcagagtccctttattaggggcatggtgctggtgtctacggagcagtgattttttggagaacacagataacattacaccttccagtgtgcattgacaatgttacatggctcttctgcaggggaaccagggcgtggaggctgagttggcaagcaggaggtgtgcccctgggatgggctgggccagaccgggagctttctgggagttgggacagttgctgctttctgccctctagcttcttgctgcagaagtgggagtgggagctgtgctgctgctttgtaggtggcttttgtgtgaaatagttaaaagtcatggctaacagccaggtgtggtggctcacatctgtaatcccaccacttcaggagacaggcaggaggaatggttgagcccaggagttcaagaccagcctgggcaacatagcaagaccccatatctacaaaaaacttaaaaactagctgggtgtggtggtatgtatctgtggtcccagctacaggggagactgaggcaggaggatcccctgagcccaggaggttgaggctgcactgaatcatgatggtgccactgcactcctgcctgggtctcagagtgaggtgagaccctgtctcataaaaaaaaaaaaaaaaaaaaaagaaagtcctggctaccatgtattgggcacttaatctggtctggcctgctagtttataggcattactcccattgttcctcacagcatccctgtgaagtagttttgatactgggcagaggtcaaagtgacttgcctgaggaaacacagctgatttttttggctcttaatcaccatctacgtgggctgtatctgacttcttaaatactgagacagagaagccctcagctgactcagtcactgggctttgtgaaataagaagtttcctcctttgtatccacagcctgatggcgaatcagggtcatggttgcattgcccacagatacgttttgtttaacttatgcaaagtttatgaaaatttgggtcaaattcaacaaatctggaagactcacatacaaatgtggatttatagcttctcttgaaagatttagaagatctagcaacagtgggctcccattatcatgtggcaacgtttgtccagagctgagtagttcttgtcccctttgaatgcctgtcctctccaggttgccatggcccccaccattccctattagctcaaactgagggtggaagtcagttgccttttatcatcacatttgcagtttttcttttatacatattcttgtatgccccaggaaggcatttgagcttgcatctcttaaattagataaatatcagcttacactgtcttttctgacccttactggatcctctgaagtgctctctgagatgggtggctgagtcctcttaaagtcagcatcctttctggagttctggccccatgttgtctttgtattggtatactgaaggatggggcatgagctgaactttcagatgtggtcttctcgattggctacttctcaaagggtgctacacctcattctgcagccaggcacaaggcttcagggttcaataggcacctatctcagtccatttgtgttgctttcatggaatacctgagactaggtaatttataaagaaaagaggtttatttggctcatgattctggtggctggaatatccaagattgggcagctgcatctggtgaaggcctcaggctgcttcttgtcatggtggaaagtggaagggaagtgttgtgtgcaaagagatcacatggtgagagaggaagcaagacagggaaactgaggacaccacactctttctaacaacttgttattttgggaactagtccattcccacaagagtgatgattcacttcaactggaaggcattaatctattcataagggatccatccccaatacccaaacacctcccactaacccctacctcccaacactgccacattgggatcaaatttcaacatgagttttggtgggggcaagcaaaccatacccaaaccatagccctgatccatcctggggacgccccgcctccccactggtagcctcggagggggctgtgtccccagccatgaacaaagtctccttagtgtgacacctgttgactctcgtggagagggaggtcgtgggagtcagctcgagcttatcttccttggtgggtgtgacccatgggcagcagcggaaggcaagccggaatccagagcgaaacctgggggagcgaggggcaccttgagccagggagttaggggctcaggagctgtgatgtgactgcccccacccccaggaaactgactcccttccagaggaaagtcactgtctctctccaagagcctcccatggctcaggggctcttgagagatgccttcgtgggtgagtttgatttttggaaactgccagagtgttctggagctgggtctagtgaatgaagtgggtgactaagctgatttaggtcatctgttattacgaacaaaaaatgaccccagcataattactaaaaaaaccaaccaaccaacaaacaaacaaaaaaaccagcagatgttcttgtctgacttgttaactggcttctaagggaggagtcaaagaagaacctgctaaaacacaatggaggctttggcaacttgggagaacaaggatgcttttcccaaggggactacattgaaaaacccacactcggagccaccaagttctgatgcatttgcttgaaaacaaacagctctccccatggcagcactgaacgggagttcagaggaagcacacacggtgagtggaagaaatcagacggcagaaagggaacgctggctgctcagagaagggaatgatccagaagtgatgtcaggatcttgtagagcctggggtgttgtttagactcccagggactgtatctcccttgggtagcaggagagtgatcaacccacagacacagtgggctggtggcccctcccagatgtcagagtccctgtctccaggttttcaatcccacaagtctttaaaagagaaatgcgtggtgtggggataagatgacaggccttggagacccatggagtcctggctttactgtttgttgtatgaatttgggagcatcttactttctgaagctcagtttccccatctgtagagtgggggtgacacctgcttctctcctattatctacttccctctcaggagatagagagttctggcctcctgcaaaaaatcatagctccttatttccttttggcctgccccaggcgggtgaaatgtctgagccacaaagatcccaatggcattatgagtagcctggctacctggccagggaggtgacaaaaaacatgaacaaagaggtccaaggccaacttcgcccacatcattgtctcactgaggtgagactgtgtccacctcttgccgccccttatttgccccaccttcagggtttcctgccactgaaaggcctgctctgcagaactcctggggctgggttcctccctgactcaccaccccccacctctccaggtgccccagagcaagtgcaggcccctctctgggactcatttcctcagaatcacgaggcgtagggaaactggatgatgccaggagagtgagattctggccccctccttcctggctgtctctgacagggtcacttcccagctgccctgaaagtccctggaggacagggcatgcactgtgagctttccagggagcagcctgccccacccctgtgctggccccagcccccatccactgcttccactgccggatgggtgccattcacttggctccaggaaagccctcagtaggaagcttgtgaaaatactagaacagaagtcagtccctccctcccgctacttagcttttctttccttcgtctgtctgtcccaccccctctctgtgactctcccctccccttcatctctctggccctcccttctctcttctcttgccccagacacagaacccagaagagccagcaggaacagacagacagtgagagctacagcctgggagacggtgaggatttggggaggaagggggctcaagctaggcccaggccagagggattattgtgctgggggctgagtgtgaggacggctttctcatgtaggctgggggcacagggccacaggttccggcaggaatgaggatggatgcttgagctgtgcaggggagcccacctggggctgggcagtggggccctgagggcagagggtggggctggagtgggggctcacctgtggttgagacagcagtagatgatgggattgtacatggtagagctcatggccaaccagaagagtgccaggtagacttgctggatgaacttgtggcagtagatgtcctcctggaagctgcccaggatgaagtagaggtggtagggcagccagcagatggcaaacgtcagcaccaccagcaccatggtcttcacaaactggtccaggagaggctcaagttacttcttagtgcccaagccccagccccagccctccgagggcagacacagaggaccccttgcacccacctgggaactgctccacacacagaccccgttagctctattactcaggcctctgagcatgttttgcccagaccttcctgagcccccaacctcagaggcctgtgctcaggccggtccctctgcccatactgccatccttcctttgaagtcctcactccttgaagcccagctcaatggccacttcctacaaaaggtgtctgggaccccttcattcactgcagctccccctccctggagagtggctgagctctctctcctaaccccatccctgggggagcccctgtgtcagctatgcgttcccaggacgccccctctctgggatccgtatcggcacagcccttctctctgtgggctgtaaggttccaaccagggacccctgcctctgcccacgggtcagctcctggacctccccctcctcagagcctggcccctgcaggcacactcctgctccgtttggcagcccagcatgccaattacaaaaggtctgggggctcctgggcaccctgatcctcacgtaggatctgg

SEQ ID NO: 94146 - DNA, 165226 bp, Homo sapiens
agtcttaagtgcccaggctttaatttgcaggggatggagtgagggaattacgatccttacactcctgtggtcccaccaaagtcatccaattagagatttctcccaaattgagagggcatgccgagaagcagaaagagaaaaataaatccactgtaatgaacattcatgaaatctttaaaatttggatgtgagaaatgtgtgagaccacccaaaccagcagtgcttctgagaattatacaaaagatgatttaaggaaaggcgtagttacaagaagtcaacctttcctaataagtgtaggtgaactgctgaacaaacagcccccaagtctcagtggtctcataagctcatttctcaaagcatagttcaaagcaggggggtagagtggcgttggggggcgggtcttccatttagccatccagagacccaacgtcatccatgtcatgactctgctgccctctaaatcttcattcactcagctgatagggaaagaaaaagactgcccacttccactcatgttccattggccagaattcaataatgtggcctcatcttactgcaagggaggctggaaaaagtgcccaggagaaaggctgtcatggatatgggtaagcattagccgtctccacttcgggtcccttccagtgaaccttctcttcccgaaaataggtttaaaattatgtgcctgatctttctgaaagagggggtaactgaaagaggggaggatttgaaagccagacccaggagaatcactaatgagttctgtagttgattggcaaagtgtgctataggaatggggagtacctcctttgtgcaacatatttgtgcttctcagttgcatctctcaagactaaagttcagcctgttctacctctggggatgttcaattccaaaaattttccactaattgttctgtaaaagcatgggactaagagctgtaagaacttagttggaattcactcctactacttcatagctatatgaacgcgagccaatcttttaatcttgctgaacctcaattttccaccctacttccctaccctactatcttcctacctcacagttattgtgaaaataaagtgagtcatatttgaaattgtctgtaaactctaaggcataatgtagccagaatacattataataactgtaatttatgagtcctaaatctctttcaagcttcaaggggttttagtatttggagatgtgatgatcaagtacttaagtacataagaacaaaaattttaatatctcatcagaaccatggttcattaagcccaatattgtcattggcagagaaacccaagggtatgcagaaggctgcggttattgtccttgatgtcaacgtcaaaggctagcgacaaaacccwacatgttctaattccatttagtaatcaattatgacattatcctctatgatttacttcaatcttttaaaaggtatatttgtattatcatattgtgccctcttgttctgtttttggagtgaggccttaccttttcatttctaagcttactatgttagctcctttcagatttcaagggaaaggaacagaggtatttattgcaaacttctatgaagaagaaaggaaatccaggaatttgtctcagcagctgtatttgtaggtgtggtgaacctgaatatagtttcttttctctttcagaatataagaaaaaaatattaatagccactgagcacttaccctatggcagggactacccgaagcactttatgtaaatatcacagaactgcacagcacattgggaggcaggctccatcatttccatatgtggaaaacgagaatcagagaggctaaggaacttgcccaacgtcacagagctggtaagtgtatttgaacccaaggagtctaaccctggaatgtgtgtcatccatcaaaagtgtttctcagggccatgggcacactggctcacgcctataatcccagcactttgggaggctgaggcaggtggatcacctgaggtcaggaatttgagaccagcctggccaacatggtgaaatcccatctctactaaaaatacaaaaattagccaggtgtggtggtacaggtctgtaattccagttacttcggaggctgaagcacgagaatcatttgaacctgggaggtggaggttgcagtgagccgagatcgcgccactgtactccagcctgggtgacagagtgagatgctgtctcaaaaaaaaaaaaaaaagaaagaaagaaaaaagaaaagaaaagtatttctcaggccagacgcagtggctcactcctgtaatcccagcactttgggaagccaaggcaggcggattgcttgagcccaggagttcaaggctacagtgaactaggtgacagagcaagaccctatctgaaaaaaaaaaaagatatctctgtggtgctgttaccaaatgctgacttggcatttacttctcagcttctgttgctgccctcccctttggggtgtcttcattaaacgtgtcctgagagggaatacgattgagtttgctcgccacgtgtcagtttagatgacccacaaaccccacattagatagggttctcatgataagccacttcatcccttaaatccagcccacatggctgtcctgggcaggtacccggccctattggttttgataggataataagatcacatccacaaagaaaggtctgggggcatggcaggcagctgaaagtttttggactatccagtcttgcctaaaatgcagaatgttctgacttcaagggctctccctctgctgttgccttttgagactgaagagtccttattctttctctgacattgtttctggtcttctctagttctattatgaattaattgagacatagaaatcagaaccatatgtatcttttttcccagtctgaatgcatcaaggtttcaagaaaggaagataatctttttcttttgtttctagcaccttcatgttgaagcctctcagagcatggtctaattttttttacagggcataacagtccgtgatggtacagctccagtggatctttctagtgtcatctacagacacgtcccttgaaaagccctatgtgagaaccacactcaattgtcagaatgtggtataatgtactctaatgccctcatgccattgctcacgctgtgtttccctacttgaaacgttttccgctaccccatgcttttggtatggcgttatgatagagtggttaaaagcatgggttctggggtcaaataattatggatttaaattccagctctgcttgggcaagtgtcttaacccctgtgagccttagtctctttacctttcaagtggggataatcatacttatccccggggttcagcactcaattagagaatgcacatcaagtggtcattgcaatgcctaagagtaaacactcggtaaatgttaatatttcaaggcccagcttggacacctctgcctttcctttttccttgctctcccttaaacaagatcccctattcccccatggcactggtcaatttttcatctggctaccataagccattgtacattaagtgataagatagtattccaacatgttaaccatttttccttctgtgatttttttttttttttttttttgagacggagtcttgctcttgtcgcccaggctggagtgcaatggcgtgatctcggctcactgcaacctctgcctcccaggttcaagcaattctcctgcttcagcctcccgagtatttgggattacagatgtgcgccaccacctcgggctaatttttgtacttttagtagagacagggtttcaccatgttggccaggctggtctcaaactcctgacctcatgatccactgcttcgggctcccaaagtgctgggattacaggcggcgtgagccaccgcgcccagccttgtgatctcttttccctaatttcccacccctctattcaaaccactggtctttttgtactaatacctcaggaaaaggacatggcagcagaaaacaaagaaatgctgagactgttcctggcttcttggtttcaaaactccagtcccttagggtatcagaaagaagttatagatttgatctgggggaaggactatgagggactgtggcagctatggtctaagggccaacaccgttcagcattagccgattgttgccgtataggactttgggaccatggctaccagagcctcctgcttttgaagagaaactaaaaacaatcaggattcttaaaaagtgagtataatatcaaacatcacccattcgttgcattttttctttcaactcactcattcaacacaaatatattcaggaacaactgatgggttagaagttggaaacacaaagacaaacaagatagttcccgtaccaagagctcagtctggataatgagacacataaaaagaggatatggcattgagtgataagtcttaggttagtgatttccaaagcataatcactggaaagcaacagcagggaacttactagaaacgcaaatttgcaggccgggagtggtggctcacgcctgtaatcccagcactttggaaggccgaggcaggcggatcacctgaggtatggagttcgcgaccagcctggccaacatggtgaaaccccgtctctactaaaaataaaaatttagacgggtgtggtggcgcatgcctgtagtcccagctactaaggcggctgaggcaggagaatcacttgaacccaggaggctgaggttgcagtgagccaagaccgagccactgcactccagcctgggtgacagagtgagactctgtctcaaaaaaaaaaaaaaaatgcaaatttgcagccagcgcggtggctcacgcctgaaatcccagcactttgggaagccgaggcaggcggatcacctgaggtcaggagtttgagcccaaactggccaatatggcgaaaccccgtctctactaaaaatacaaaaattacctgagtatggtggcacgcgcctgtaatcccagctactcgggaggctgaggcaggagaatcgcttgaacctgggagggtacagtgagctaagattgcactactgcactccagcctggacgacagagtaagactccatccccgccccccaccaaaaaagcaaaatttcagccccaatttaccaatcagaaagctgagattagtttaacaagctctccaggtgattctgatacaccctaaagtcggagaatcaccttgataatggaaagcaaagaagactttggcacagacaaccaacacacttgagccaaccttgagatcctctgccatctataaatcactttcacagtcccttctaggctagatgctaaattggttgcaatctggtaatgcacaatgatgagacacaagttgtatcttgtctctgtaataagtaaattgtaagaacttcaaaggcagggttgattctacttttggtgttttttccattcttctcgtatttcagatatcagtgcaatacttagaaaatacggccgggcgcggtggctcacgcctgtaatcccagctactcgggaggctgaggcaggagaatggcgtgaacccgggaagcggagcttgcagtgagccgagattgcgccactgcagtccgcagtcccacctgggcgacagagcgagactccgtctcaaaaaaaaaaaaaaaaaaaaaaaaaaagaaaatacaagtactgaaatttaagtagctctttagtaaataagaataattaacctggtgcaagggttctacctttatgagggagaaattggaaagcatatatgtacttacaaattttcataacttttcttatcgttgtaaaatatacataaaacttagcattttaaccctttaaaatgatgtacaggtcagcagcattaaatacattcacactgttgtgcaaccatcaccattctccatttacagaacttttgcatcttcccaaaccgaaactccgtacccattaattaattggtgcattttgccttgttttttctaataggatttttctttctgttgatttgtatgagctcattttaaattagagagaccagccctttgtcttctgccaatttattttttattaattctatttgttggtgattttttaaaatctgttcagaaaattaaaaattttccgtggaatcataaaatcgtgtttagattataaaatcctttatgatttgactgttgccgtcttgaaagtcttcaacatctcaatgttatgaatatctgcacttacattttcttctaagtttttgttaacatttcaatatttaatccacaaaagattcacttacatgtattttttccccaaatgggtaatcagctcttcaaacattatttactggacaggccatccttcccctactaacgtaaatgtcatcttttcatattaaatttctccatgcgctgggtatttactcctacatcttccatctagtgcttttgagaattttcaacactcttccattacacgcatgtaccatcatttatttaatcaatcttctattggtaggcatttgggacgtttcctgctcttccatactaaacaatgcatagaattttggactacattaaataattctctgcctcagtggttcaagttgcgtaaattatgcgtttacacttttcttcggattacttttaaaatgacaaccactatgttttgctggtctcaattaccagagaattggcaagaaacctgacagctggggcttaggattccctgcgccagacctccgagctacaccagagggcgtactttccttactcggcctcggccacatccgggttccaccgcagattcgggcagggagcgggcggaacctttctaccgcgtctctagctaacacgcacggcggggacagtttaggcctccgcgcaccgttcgccgggagtcttgcagtttgcttggtgcagggaaggcgggcgcggaggttctatctgtttcttcctccttcgtgagcagcatggacgtgctagcggaggagtttgggaacctgactccggagcagctggcggcgccgatcccgactgtagaggtcagtgccaggcacgcagggagcgtcagggacaaggatgcgccctgagggggcgttgcccggagtgctcgggccgccaagggggcgggctggcggtttgtgcgcatgcgccgggcttctgcgcatgcccagagcgtcgcgcttgcgagtcttttttccagagccggcctccgcgtgcgcgagtgaaggctgatcccagaggagctgtcagccgctgcgggggccgagaagccccgctgctggctctagggttggagctcttccagcataggtgtgcgtggggaggactgaccctcgcacttactgtgggggacgtattgcatgtttgcagtcttacagaggacacggggccagggagctcaggccatttgcatgaggcaccacagccggctgtgggggtaaaaccagatcgtctgaattccaagctagtcatctttccttttaacttgaagttccagtttgggttgcaggggaattttaaacgccctcaatatttactaaagaatttgcctgtgtgttttctgggggagagactccacagctttcatcagcttctcggaagttaaggacagctgccccacagcgagctgcccagtgaagtgcggctgtcgacatattttgttatctgataaggcacattttgtaatctctctgagcctcaaaatctacactgacgtggaatagggaagtggagacgtggccggagaagatagcaaaggagagatttcagggaaagagaacaggatacttgaaacctcctcggcaagaccattggatgtttttgaggaaggaaagtaaatccagtagtattagagtgaagaaaaatagaggagaagagataaaagacagggttaagtaagggtcttgattatgaaaagtttcaataaacatctgacagagcttggactttgtcttggagcagagcttttgaagggtttaagcaggaaagtgacatgatcagtaagtctatcggattataagaacctccttggctaggcgtggtggcctgtaataccagtagtttgggaggccaaggcgggcggatcacttgggctcaagagtttgagaacagcttgggcgacatggcaaaaccctrtttctacaaataatacaaaaattagctgggtgtggtggcgtgcacttgtcccagcaactcaggaggctgaggtggaaggatcacttgagcctggaaggtcgaggctgcagtgagccgtaattgtgctgctgcactccagcctgggtgactgagaccttgtctcaaggaaaacaaaacaaaacctctttataatagtttgacaagttaaggaagttgaattagcagttccaacagattcagtctataagtgcatgcaataggctgctgatcatcaggcaaaactattttttttttttttttttgagacggagtctagctctgtcgcccaggctggagtgcagtggtgtaatctcggctgactgcaacctctgcctcccgggttcaagcaattctcctgcctcagcctcccaagtagctgggattacaggcgcccaccatcaccgccagctaatttttgtatttttagtagagacggggtttcactgtgttggccatgctggtctcgaactcctgacctcgtgatccaccgcctcggcctcccaacgtgctgggattacaagcgtgagccaccgtgcccggctgcaaaactgtattttaaccgtgaaaagtgaatatcaaagagccagcattcactgagcacttgctaatgtgccaggttctgtttaaccataacatgcattatgttatttaatcctctgaaataagtactattttcacccccattttgccagagaggcccaaagatgttaagtaaatagccttgcattagaagcctggtagtggctaatctggaatttggactcttgtcagtctgactcgagtcttcatccctaactgctatcggaccgcttctccagagagctgaagaaataagcctgggagatttctatttcttatctgaatttacacagctatgaagtgaacagtgctataattccagccttctgattgaagaataacagttcctcttcctgcactctgtatccaatccaccatcacctctaaaaagtcctgagttcttaatctatgcatatctgaaacttcattcccaccgttttccagcccagaacgactgtcctctcttacttcctaactggcctacctggcacctgacttgtcccaatccagtctgttccttgctctgcagccagagctgtcygtttaaacacacaaacatggttatgttgctcccttggttaaagttcttcaatctctgcctattgctcttagggcaaaatctagtgtttaccatgtttgtaataaatttcctcagtctgaccagtgcttacttctctagtctcttttcccatggttcccccctctccctcccctgagatctttctactctgctcagtttcttctggatcgctctccccttcctatttgtagattaaatcccacatatctataatataacttccctaggaaggcctttcctgattctcccagaagatggtagatctctgctacttgctgccatttccttttaaattgagatattaaaatatttacttaaactttccaacttcagtgttttcgctgcaactttttctagttaggagctcagttttacttgaactggccatgcctggtgtgtatttttttgtgcttatggtagcacagcagcatggtagtatggtagaaacaacacaagctttggagccaattaatcagttacttgttgaataaatatttgtcagtgttactgagtacttacctggtggtgtattattcacagggtttatacaagttcaaaaaatgtgttttctgcctcccagtgtgttataggcttatagagagagacrtgtaagcaagtggaataacatgcaataggtactgtgatacaagtaggcgaggggtattttggtattacaaatggtagctrggatgtgatgcctgaactgagtttgccagatgtggatgaagtgtggtggtgcggaagcattccagatagaaggaggaggcgtaggcacaagtacagctgcaagcacagcatatgatgtatgcctcgctgtggagttaagacatggtgaagagggtggggaggcactgaagagttgtagagaatgaggtgctcagctgtgcacatgaggacatgtacactggctttagtgctgagcattgaaagggacgagcaggaagagtagtaaggaagtattgccrcagaccagctgaaagattatgagggcctcaactggcacaggagcagaggataaatgcgaggaaggttaaaaggaggtcgactcagtagamtttttgttttcctgttgattaagaagagtcagaaagttaggactcccgggtatctaatttgggattgactgggataaatggtgatattcattgagattgagaatggagctgggggaagatttaattttggacatactgatcttaagtagcctctgaggctgtaaggtatcactgcccagtcaatagttggaggggacaggcccatacccagtagcttactgcaacagtgatattcactcactcatttatttattcagtatttattggagtcttttatgtgccaggcactgtggtaacaggatagacagggtcactgcccttgaaagagcccacatttggaactggggggctgtgggatgagatgggggaagctaaacaacactttcaaacagtgttgtttgaaatcctccattcccagccctacttgagaaaagacatcgccagggatagaactttgaagaacaccaaaatttgcagggtggcagagaaaaagaggtgtgacaaggcccggccggaggaaggaaagacataagagaatgataccacagagtgttataagacagtgatcggcatggccaaatactgtggaaagggaatgtgagggggcatcaagggaggtcttttgaagtagcagccttggtgacctctgtcgagctctttcactggcaggtaggtcagagtcctgactataacggaatgaaggagtgggaagtgaggaacagagaagctaaatatggagtaatttgggagagatcgtaagctgaagggcagggaagaaagtagtcagaggagctgctgagtcaagaaagttttaaattttttttttaatgggaggatttgaatactcgttttaaatagaacaggttgaatatcaaggactgaactggggcaaggtttccagtcttcaggagaaggttggcaggattgtgtctgtggcggaagggttagccttagaccaaggaatggatggtccttcctttgaagtgggaggaaacgagtataagaaggggtgtagagagaggaatttgaagatgtgggagtattagctcatagggctgccgtaacaaagtaaccacaaactaggtggcttaaacaacagaaatttgttttctcatagttctggaagttagaagtctgagatcagggtgacaacagagctggctccttctgagggctatgagagaggatctgctctgggccgtcccctactacaggtgtttgctggcaatctttggcatcccttggcttgcagaagcttcactgagacctctaccttcatcttcacatggcattgtccctgtgtgcatctctatgtccaatttctccttttttataaggacaccagttgtattggattagggctcaccttaatgactcattttacttaatcacctttgtcaagaccccatcttcaaaaacagtcacattctgagatactggggattaggactttagcatatgaattttgagagggacacaattcaacctatatcattgtcattcttctatttttaaatttaggtgtaatttatataataaaatgtatggatactagatattcagttacattggttttatagttatgtgctctatgtggacattgcatcaccccagaaagttcccttatgacccttttcagtctatccccccaagcaccttttgatttccgtcatcatagattagctttgcctgcctctcttgtttttgactatacccaggggtctgccaccttccctggccactcctcggtctcctttgctggagctgcctcctgctcctcctctctgattgttggattattcttggttggtctcactttgtggaactcttctccatctacattccataggtgatctcatccatcacgtgcctttaattgccatccacttgttaatctcttcctagtttatatctccaggccactccattcccgaattcaagactcatttgttgcctccttgacatttccacctgaatgtctaatggagatctcaagcttaacacacccaaaccaaatttctagtagcccctccacacctaaacctgctattcctacaatgttcctcgcctccatcaattttaactctatccctctagttgctcaggcaatgtaggaagcaatcaccatatgtgtcatccttctgtagccctgagatgagctctgaccagacagtagttgagagagaatgggagggagaaagaactccctttgggtcttgagacccagctctcccaccagactctctgagccttattttccttttctcaaactggcaaacttcacttaggaagtgtcatgagaataaaataaaggattgaaaagtgcttaaaatcttgagtcatcaggaagagattaagttatattctgtttaggaaacctgtagtgtatgtatgtatgtgtatacatatttatatgcatatgcacacatgtgatttccataaaaatgtttaaaaattattctttttgttttgatttactttcctttgcttattttggaacattaaaataacttatgaaagtactgttgctggtacagagttctgatattcttcttgttttggctcacaggaaaaatggaggctgcttccagcatttttaaaggtaattgtttcacatttaataataattggttatttttcagatgaaaaagtcaagaaataagccattttttaaagattaaatttttgtcatcaacattttttgattttgtatagctgtgtttggaaatacaaggaattataaggtaaaatccctgcctgaaaggtgctggtttggagagtggtagtctaattttagagagaagtagtagtacatgcacagtagcatggcacatgattaaaaaccaaagtgctatcagcaaaagagcaatggtcagagagggccacccaaatgaagtgagacataaaccacatcttaagagaagaaggtttaagcctgaaagctgggtgcagagagcgtggctcaatcaaggtgttcaagaggagcctccacagagtctgcaggaaatagcgaccagtcaagaggagctgctgaatatgatatgatgtggtgtcgggcttcaattcaatttccaagagcttatgctaagaagtaatgagtaccacagtgagagaccacttggcacccgctaggatagctataatcaaaatcaaatgttaataagggtgtggaggaatgggaactatcatgctccactggtgggaacgtaaagtgttatagccactttggaaaacaggctgtcagtttctcaaatggttaaacaaaaagttaccacatcctccagcaattccactcctagatatctgtccaagagacatgaaaacatgtgtccatgcagaaacctgtacacaaatgctcatagcagtattattcataatagccaagagtggaaacaacccaaatggccatcagctgctggatggatacacaaaatgggatgtatctgtgcaacagagtattatttggcaataaaaagaaagcaggtacccgctgcaacatggacgaatcttgaaagcattgtgctaagtgaaagaatggagacttgaaaaatgaggccgggcgcggtggctcacgcctgtaatcccagcacctggggaggctgaggtgggcggatcacgaggtcaggagtttgagaccaccctggccaacatagtgaaacctcgtctctactaaagatacaaaaaattagctgggtgtggtggcgggcccctgtaatcccagctacttgggaggataaggcaggagaatagcttgaacctgggaggcagaggttgcagtgagccgagatcgcgccactgcactgcagcctggtcgacagtgtgagattccgtctcaaaaaaagaaaaatgagtagagttttgtctctactcattttggactctactctagagttcagttgcgtgttatgggcagaggggagagtgctgggaaacgaggctgggagttgtcagggccagtttcctgatcagatttgaaagccgtgttaaggatttggcttttcttctaaaagccgtaggaagctattgaggagtttctaagttggggagtgaccaagaatcaaataaaatggtcgtaaggtcaagaagtttctttttccccctaagagaccaggtcttgctacattgcccaggctggatttgaactcctgagtttgagtgattctcctgcctctgcctcccgagtagctgtgactgtaggaatgtgacaccttgcctggcctttttgttattttttaaaaggagctgcacataaatggagaagaaggtgctgggtgctgggcacagtggctcacgcttgtaatcccagcactttgggaggccaagacaggcggatcatttgaggttgggagtttgagaccgactagcctgrccaacatggwgwaaccccgtttctactaaaaatacaaaaattagctgggcatggtggcgggcacctgtaatcccagctactcagaaggctgaggcacctgaactgcttgatgcagggaggcggacgttgcagtgagccgagatcgcaccactgtactccagcctgggcaatagagcgagactctgtctcaaaaaaaaaaaaaaattttttttttgttaaaaactaagatacaaatacacacattagcccgggccagaatcatcaatatcactgtcttccatctccatgccttgtcccactggagggtcttcatggacagtaacacacatggagctgtcatcttctatgataacaataccttcttctagaatacttgctgaaggacctgccggaggctcttcttgaggaggggtcattcttttcagaaatacactctatgaaatcaaatcaagttgtaagtcattaggcgataggaatttttcagctccattataatcttatgggactgctgtcagatatgtggtctgtagttgaatgaaatgttgttatgtggcacatgaccatatattcatgtactcatattttgatttccgagagtcagattgcttctcaaggaggaaaactctcgaggatatgctagtaagacgatgcagaaatggaatgagaatgcattaatgaaaagatttattaaataaaattcatggattatttttctcattttgattttgataaaaatttgatgttcacctattattagattccattatatgatctattatttgagcatatcatcagtactctttgcacttttgctaacctgtttactttctctttctatctgtttaggtgaaaggccttgtgaaacagcatatagattcatttaactatttcattaatgtagaggtaagcatcagatgttagaaatagacataaactaaggattaattggaagccagagtctttgctaatgttgcattttccactgcagataaagaagataatgaaagccaatgaaaaggttacaagtgacgctgaccctatgtggtacttaaagtaaggaaccaacattcttaatttgctatgtgggttacatctaacattttttaaagtgagtgaagttgctatcaaaactcttttaaaatcattgtcttggccaggctcggtggcttatgcctgtaataccaagcactttgggaggccgaggtgggcaaatcacctggggtcaagagttcgagaccagcctggccaacatggtgaaaccctgtctctactaaaaatacaaaattagccaggcgtggtggtgcacatctgtaattccagatactcaggaggctgaggcaggagaatcgcttgaatctgggacggggagatttcagtgagctgagattgtgccactgcactctatcttttacagcagagtgagactctgactcaaaaaaataaaaaatgaaaaaataaatcattgtcttttattaactataaagtgctcaaattaaatttttaactggcaaattatartgagctatggttgggaaaattttgaaactattaggttttaaatatttaaatttttattttgaaataatgttaagcttaaaagaaaaattgcaaaagtagtacaaagaattcttcaatatttttcaccaagccttcactgatattaacatcttacataaccatagcacaatgatcaaaaccaggaagttagcacagatacgatgttgtctactaatctgtagaccttatttgatgttttctcacaaatgtcctttttctggtgtaggaatcaatccagagctccgtgttatgtttagttgtcttgtatccttagtctcctcaatctttcttggtctttcatgacattgacacttttgaacaatctagtcagtatttgtagaagttcctttaatttgagtttgtatgacgtctgattgggttatacatttttggcaagaataccacagaagcaatgttttatgctgttctcactgattcgtattggggttacagatgccaatatattttattactaatgattttaactttgttcacttgattaaggtaggatcttccagatttctccactgaaaggttactatttttccttttgtaattaataagtatcttatagggacattctttgagactatgcaaataccgtttctcatcataatttcaccaacagttttagcatacattgatgattcttacctataacagttattattgtgggcttatctaatggtgaacctttatttctatcattccttctgcagtgatactggaattctgtacagaatagtttccttttcccctcacatatctctctatattaatttatatcaatttggactcatggatgttttattttattctatgagtactatcatatatatatatccagtcctgtcatttttctgttgttcagactgtttcagctttgaccatagggagacccttcagattgactctggtgtcctttcaagatgccaccattattttttgagcactcctttgctttcttggaccgtaagatatggttcatctggtatgcccccatcccagattgggaatccaaggagccctagagtctcccttttattggaaaatagtatttagattccaagacatggacactaagatttcagcaggtagagctcagaaatatgtgtatgtatacgaacacatatgtgcagacacatctgtatttctttatcctatccatttttacatatattaaaaaccatgcagactgatacctccaatttcagttcgacactgcaggactcattctaaccttttccctttccttatttaacttttatcccaataatgagaaatctggctcccattatctgcaaaatttaaaaaaaaatttttcaatcctagactataaataaagtttcagaattattaactcatacctctgagagataaaatttactagagtgtaggatttgtgcactgtcgtttttatctttagcctctcaatgtccaatcaaaatattgtctcccagggttacttacattagttcttttctttattttttcagtatgtgagacattattatggtttaagagttagacttgcacaaaaaagtatattcagaaaatagttgttccacttccagttctttccaccctgttcccagccactctccataggtaaccaatctcattagtttccgctttatccttttcatccttcttttgcacaaatgagcgttttttttttgtttgtttttttgttttgtttgtttttgcctttatggcctcttctttcttttgcaaatgatagcatatcatcagtactctttrcactttgctctttcattaagtatcatttttagggagctgtatttccagtatttttgtaaagagatttgtaatattttttaaaagatactttgataatatttccctcctttgtaaagctatatgtactatcacttcaagaagatctccaattttaatatttaatttgtcatccttaccaagataagcatttatcaaaacataatctttgtatttggaaggaaaatagcttgtttgcttttatgatcttcgaagaagtataattcataccgcactaatttgcttttcagatatcttaatatctatgttgggcttcctgatgttgaagaaagcttcaatgtaactagaccagtgtcccctcatgaggtaattatgaaccttactttaattggacttgtttgctttaactcagagtctgcccttaatatatactcttaaaagatcatttaaaaatgggatggggggggacattctttggagaaaaagggattaaagttcaatgtggaccataattctactacagaaggagcactttgaagtggtcaggaccctgttgcagagaggagcagtaactgtcagattcctgattctctttcagtgccgtttgagagacatgacatactctgcccctattacagtggatattgaatatacccgaggcagccagaggatcatccgcaatgccttacctatcggcaggtgagaaatgaaatccgtattagagccacactgcctggattccagccccatgatgtgatcccatttcctcatctgaaaaatgcaggaaatgctgcctatttcataggtccaatgagtcagcatgtgtaaagcacttagaataatgtccagcacatagtcgtggttgttactatttattaattgtgaaaccttttctaagaagttgaggaaaatgtttccctttcctactataactctgagctgctagggaaccactagatacaatagcctttcagtgaactctcctggacaggtcttcttggtggataggtatattctgagattgagttttcctggaatttaactttttctcatctacaagtatttaagggagaagttacttatttgcctggtacaagtttggaaatgatagcatccacttgcgtttttgcaatctgcccttcctgattagggaaatatattgactctcctttagaaatggacaaaacccacaatattgtgtggtcaataatggtactagactttaaactcagtccacataatttctgttcaagtgtttttccccctctcaaaagtgctaagagcactttgaacaaacatccatttgttcaataaatatataccaactgcctatcacttcttatgtatgatgctgagtacttaggtgagtaaaagatatacaaaatacagttcctattggctaccttcattcacagctatcagggaagacaggcatatgtaattatggcaccatttggtaaggggtctagaagtccakatttttatggaaacatgcaggtttaacaaatcctcctatacttccctcaaaggaaggggtaatttgtattgtttctytccttagtcttcacttagaaaaataagtaagatattaaaatgttcatcttggttttagcaggactgtttatcagtgttttttttgttttattgttttttttttttttttttgagacagagtcttactctgttacccaggctggagtgcagtggcatgatgttggctcactgcaacctctgcctcccgggttcaagtagttctctagcctcagcctcctgagtagctgggattataggcgtgtgccaccacactcagctaatttttgtattttttgtagagatggggttttgccatgttggtcaggctagtcttgaactcctgacctcaggtgatccgcccgccttggactctcagagtgctgggattacaggcgtgagccaccgcgcctggcctatcagtgttaaggtgagaacttctttctttcttgtatatggaccatacttgtgtccagttaaattttggaccatagctaaattatgaactagattgactattgtgaaggaaaggcaagagagactggaggaaaacataaattcataagattgagggtttaaatcctggtttaaagagggagcatgagtgggcgaaggacatgaacagacacttctcaaaagaagacatttatgcagccaaaaaacacatgaaaaaatgctcaccatcactggctatcagagaaatgcaaatcaaaaccacaatgagataccatctcacatgagttagaatggcaatcattaaaaagtcaggaaacaacaggtgctggagaggatgtggagaaataggaacacatttactctgttggtgggactgtaaactagttcaatcattgtggaagtcagtgtggcgattcctcagggatctagaactagaaataccatttgacccagccatcccattactgggtatatacccaaaggactataaatcatgctgctataaagacacatgcacacgtatgtttattgtggcactatttacaatagcaaagacttggaaccaacccaaatgtccaacaatgatagactggattaagaaaatgtggcacatatacaccatggaatactatgcagccataaaaaatgatgagttcatgtcctttgtagggacatggatgaaaatggaaatcatcattctcagtaaactatcgcaagaacaaaaaaccaaacaccgtatattctcactcataggtgggaattgaacaatgagaacacatggacacacgaaggggaacatcatactctgggaactgttgtggggttgggggaggggggtgggatagctttaggagatatacctaatgctaaatgacgagttaatgggtgcagcacaccagcatggcacatgtatacatatgtaactaacctgcacgttgtgcacatgtaccctaaaacttaaagtataataataataaagtaaaataaaataaaaagagggggcatgtaactagcatttgttgaatacctgctatgtgccatactatgataggcaatgttgtttgttagctccgcattcataaaaawgacctctagtcattagaatgcttatatgtgctatgcattacctaaattacatatataatctcatttattttttggagtaaaaagattttagtttaatccaaattatatttgtacttggttagaaatcaaacagtacataaaaacatttgattcaaaacagtaacctccctccttctctccccttcctcacctttcgtcccattcccaacttcataactatttctgttatttttttctgggggttattacatccataactttattttgtgtgtgtgtgtttkgttttkttttttttttttgagatggaattcactctgttgcccaggctggagtacagtggcatgatctcagctcactgcaacctccgccccccaggttcaagtgattcacccacctcaacctcccgagtagctgggattacaggtgcccgccaccacrcctggctaattttttttttatttttagtagggacagggtttcaccacgttggccaggctggtcatgaactcctgacctcatgtgatccactcgcctcggtctcccaaagtgcagagattacaagcacgaactaccatgcgtggccaatatccataactttaaatgcgatgctttgacctctatttcttaatacattaactgtagacattattttttccctcctgatatacgggatgtggcttagcttacctgtgtcacccactttgcttctcccttcgtcttccaatttttccttcttgtttttaattatctttttggttactgtagtaactgaaatattcttatatcttcatgtcatattacataactttagtcagtatgttcatttcccttggtataaaatgagaatattcttatttctatcttcccattacgatttccyttttaacgtgagttatttagaagacttaagatttcccaattggtgctttatgtcaatttttggaactttgtagagacctgtttctataaatgtttcatgtttatttggaaacaagaggtattctccagttgttttgtgccattgtctgtgtatttccttcagatcagacttgttaattgtgttgtttagacgttttgtatcagcattgctttttgatttgtttgttctatcaattactacaataggtatgttaaaatctcccactatgatggtggatttttccattttccttatggttttgtgtatttttgcttttttgaagctatgatattaggtgcatagaagtttagaattgttaaatcttgctagtaaactgaacctttgatgattgtacatttatcttctttatctcttataatattctttgccttgaatcttattttgtctgctcttagcatagctacatttgctttcttttggttatatttctggcatatcattaaaaaaattattgtctgtttaatcttttatatgggctgggcacagtggctcacacctgtaatcccagaactttgggaggctgaggcgggtggatcacctgaggttgggagttcgagaccagcctggccaacatagtgaaacctcacctctactaaaaatacaaaaattaactgggtgtggtggtacatatctgtaatcccagctacttgagagactgaggcatgagaattgcttgaacccggaaggcggaggttgcagtgagccgagattgtgccactgtactccagcctgggcaacagagcgagactccatctcaaaaaaaaaaaatctcttaaatgtccttatgttttgagtttagttgaagtaaactgcatatggttagattttttaaaaaattgtcttgagaatgtagtttatttttatttgttttatatacatacatatatgcatatatattggagtgtatatctgtcaacttattctatattttaaaactgtctagcttttcatgtttcaggtttttttccatttttctttttggataatggaagattttttttttctcacccttccccaactgatttaaaagtcatatacagtatttctgattgtttatgtttaccttagaaattttgaaatgcatacttaacaaagtttgaaaataaaaaatacctttattctcttcctggcaacaaagaccttagaaagctttaacttggatcaaatcaatcactttgacttacatgcttttgttgtaccmaatttttgttctatcttgttttgttttggtctttttgagacagggtctcactctgtcacccaggccagagtgcaatggtacactcatggctcactgcagcctcaacctcctgggctcaggtgatcctcccacctccagcctccctggtaactgggactataagtgcaccaccacacctggctaatttttgtattttttgtagagacggggtttcgccatgttgcccccgctggtctcgaactcctgggctcaagtcatccacccgccttggcctcccaaagcattgagaattgcaggcatgagccaccatttgtggcatgttttttttttttttgagatggagtctcgctctgttgcccaggctggagtgcagtggtgtgatcttggctcactgcaacctccgcctcccaggtacaagtgattctcctgccccagcctcctgagtagctgggactataggcgcacgccaccacgcccagccaatattttttgtatttttagtagagatggggtttcaccacgttgaccaggatggtctcgatcccttgaccttgtgatccacttgccttggcctcctatagtgctgggattacaggcgtgagccaccgcacctggcctccttggcatgtttttttcacctataaattagaaattgttattgtcttatgaagttcgcatttgtttatatccacacacattagtttccattttctttgctcaccatacatttttacacgtcagacttttggttagtgtttattttccgtcttcctgaagatgaattttttttagaaatttatttagtgagggcctattagtacattagtaacttctctcagtttttgtctgaaaatatctttatgttgacctcattctgagtgaatacgtagcagaatacacaaatcgaggttggcagttattttctcttcaagcacattggttgtgtgcttgacacacacttcgagcacactgctctgtgtcattggttgttgtgaagttattgtgcatccagtcatccttccctttttggtagcctctctttttttctggctgggttttaaaccttatctctaattttggtgtttagtatcttgactgtgatctgcttaggtgtagctttctttttatcttgtgcagatgttaccgtgaggatttatggctttcatatgtctttaaaaatttatggctcttatctctttgaataggacttctcacctattctgtgtattttcgccatctagaagtctgattaggtgttgattagtcgctctctctctatccttccctgactcttaaactctctttcatatcttccatctctacgtctttctgaaattcattctcagtaatttcttcagatgtcttttccagcccagtaattatatcttcagcagtatcaaagctattattatccaacctatttctacatttttaagttagtgcttaaaatttccatttctagtacattttgctcagttctttttccagactgcctggttagttttcatagcctcttgttccttacacttggatgcattgtgctattgccaagtaactgatgagaatcactttgtcttccatgaaggaagtgttgctgtcatttctgactctcactaaagcctgtatgcaaagtttaaaccaaacatttgagttttttgtttttttgttttgttttttgagacagagcctcactctggagtgcagtggtgtgatcctggctcacggcagcttccacctccaagttcaagcgattctcctgtctcagcctcctgagtagctgggactaccggcacacaccaccacacccagttaattttttgtatttttagtagagatggagttccaccatgttggccaggctgctctcaaactcctggcctcatgtgatccacccaccttggcctcccaaagtgctgggattataggcatgagccactgcacccagcctgagtttttatcatctgtactagacgagcagcgtgcctgagaaaatacttcattttgcttggcttccatgtaattgctatttctctgccttttctaacatggtgcatagatagacccttagtgaggtggtgtgcactgcatgttttgtattttttgcagcttttatcattgacagcctacatgtgatattttcttttgttttattttatacagaatgcccataatgctacgtagttcaaactgtgttcttacaggaaaaacgccagcagaatttgccaaactgaacgaatgtcccttagatccaggtatgtgtgaagtcttggatttgtcccactttccttattcttttattctgctgctgctgtggttttaacattttgtctcaaaaacagtaccagcttttctactttataatgaacttgttcacaaaacacccagaaatttgtctctagctttatgctactagtctgtatttctttctttcttttttgagatagtgtctcactctgtcatctaagctggagtgcagtggtgtgatctcagctcactgcaacctctgcctcccaggctcaagcaatcctcccacctcagcttcccaaatagatgggactacaggcttgtgccaccatacccagctcatttttgtatttttagtagagatggtgttttgctatgtcatcctggctgatctcctggactcatccaccttggcctcccaaagtgctgggattacaggcgtgaaccactgcgcctagccctattagtctatatttctcaaagacatactgtttcctcttttatttcaggcttaagactttaatatgacacattcttgtttattgccatgatttgtcagtcttttctttctatctttgcccacgagtttcttttggtatgcctaaaaattcaagaataatcttccagagttactggccttgcctggttgaaaaaaatcaagtatcacacttcagggtgttttaaatgcagtaaagcagtagggagatgaaagtatttttttgtttacatttttaaaaattttatttttgtacctatttctaggcaatttcttttgtaaaatttcaaacttagaacttaacaaaaagtttctcttagttctttaactcgtatttcacattgatttatttgaacttatagttgctttaatcttattcctgtaaagttgcattgttttagaatcccagaagttttggaaagaagttaatgaagaatgtgactttactagactataacagaatgttgcataagtcaaatatgttgtattgtttttgcttatattctgcaggtataaaatgaagtattactttatcctactctgaattgtgtgcaaaaaaaatacatgatgatgcatgagtttttttgaatatggaatattattttggaaacctaatcttaatctaccattaccactgatttgttagaaaacttagagtaaatttgagcttatattgaaaattgtcagttacacttgtacttaagagctctgacaactaatttatttaactatttttttcattcactttttacatatgtcaggggcgggtgattcatagaccaataagatayatttcctgtcctcaagaaattttttatcttgtagctcatttgtataaaatcacgtgctgatcttcagtccataaaacaatatcagatgggcgcaatggctcttgcctgtaatcccagtgcactgagaggctgaggcgggaggatggcttaagacagggagtcagcctgagaagcatagtgagaccctgttgttacaaaaaatttaaaaattagctacgtgtggtggcacatgcctctagtcctagctactcgggagactggggcgggcgaatcacttgaggttagcagtccgaggttgcagtgagctatgattgtgccactgcactccagcctcggcgacaaagggagatcctttctcaaaaaataaaataaaataaaataaaaaataaaatcagcaacccctttgaatcaagtgttagccagtgccrtgaagcagtagtagaaaaggtaatctctgattcacaagattcctgccattactaaatcaacactggttgaggaataaatgatgaagtttttcttgtttcctttgggtaggtggctacttcattgttaaaggagtagaaaaagttattcttatccaagagcagctgtctaagaacaggatcatcgtggaggctgatagaaaaggggctgttggagcttcagttaccaggtatggaaagcagagatggtgtccttaagcaatattggtcattccattagtcctaaatggctatgtttcaatacagagggagccagttattaccctctaaaagcaggcattgtaatatttaagctatctgcattcaatttattatgaaagtctggaagcatagggtactgattttaaaatttcagtgatgggagtctgagacattgtttgaaaagtcactgtttaagctgaattttatgttagcttatagarcatgaaaggagatttaaaaaaaaawawataaaaccactcttcagtttttcacactccttttcagccttttatgctccttttcagccttttaccatttacatgtgtattcctgcatcagtatgatcagggactatttgacacttaatattgaatgacctgtatcatggacttaacaccctattgttagttttctagaccagcctctttcacagtgtattcatttttactacagtctccctttcgaggcttctgtaacttctttttattttcacgtgtaatttgaaatatggaggttaatgagttctgggaatagaaagatttgtggcatagataagatgtgagagtgcggtagtttcctgtttgataacctacaacgaactgattaactcagaatttctgtacttttctttctgatggagaggcagctaacagtaatggtcattcatggagtacttactaggagccaggcaaaatactaggtatattatttgtcacctcagtcctccaagataagtggtactattaacatctccattttacaactaacaggccttaagctcaggggtaccttgactgtaagaggtagatagcctttgaacccagatacggttaattttacaatccatgtcttcccactatctgtaactttggagccaaggcaatttgaatttgaatcctaaagctttgttttctagttatgaggcactggaatgtgcagttasttagcttctctaagccttggtttcctcataagtgattttgagacaatacttcagtttgactatgtagaagattagagctaatgtaagtaacatgggtaacaatgcgtagtagcaggtaatctgtgtgtgttactaatgtggttgattagagcttttaaaatgctttgaaatccattaggaattttataactaacacagataccaacagaaggatattcctttcttttggctttactatataccaagactgtgggtatattttgttgaattactagtttaaaaactcgtatataaattcatttctttttaatttcctcattatgtttaaggcccatatataaaattggccttgtatatatgctctacactggatcaaagtaattcaaggtagagtcaaagtgaagttggtcagaaagtaattgtcactcattcacacacagaacttccatcataatctcaaagtcaaagaaaaatttatagtgtttttaaatgttcactgaagtggcagcagggcaggaaaggaattgtctttttaaagtmcttattagaaaggaccttgtgattgttgttgatcagttgacccttattgattaatgatcattgctattattgcatgttactagcttgaaactaagtggggatgcagtttaaccaacttgtatttactcatagctctacccatgagaaaaaaagcagaaccaatatggctgtgaaacaaggacgattttatttgaggcataatactttgtcagaagatatacccattgtcatcatatttaaggtaaagctgcagctctcttctgaaaattgtaagaattctttctctggtttatttacatatgtaattagagatttggagggtaaggaattcttggaatagaaagatttgtgatgtaagttgtcagtcatatgatgtattttaaattgaaagctggctgggcgtggtgggtcatgcctgaaatcccaacactttgggaggccaagatgggcagatcgcctgagcccaggagtttgagaccagcttgtgcaacatggtgaaaccccatctctaccaaaaaaaaaaaaaaaaaaaaaaatagctgagtgtggtggtgtgcatctctacttccagccactcaggaggctgaggtgggaggatggcttgagcctgggaggcaaaggttgcagtgagctgagattgtgccactctgctccagcctggacaacatagtgagaactcatctctacaaataataaaaacattagccaagcgtggtggcatgtgcctatagtttcagctatttgggtagctgagatgggaggatcacacaagcccaggaagtcaaggctgcagtgagccgtgatcatgccactgcactccagcctgggcaacatagcaagacccagtctcaaaaccaaacaaaaaatcagcttatttgtgaattgttggcctagaacccaaaagacattttccatagaaacaatattgaaatggtatagtcttctcagatacaggcatacttcggagatattgctggttttgttccagaccaccacaataaagctaatatcacagtaaagtgagtcacacaaatatgttagtttcccagtgcatacaaaagttatatgtatactatactgtagtctgttaagtgtgcaatagcgttatgtataaaaaatatatgcctcaattaaaatatactttattgctaaaaaattctaacaattatctgagtcataatctttcagtgagttatagtctttttactggtagagggtcttacctcagtgttggtggctactgactaatcagagtggtggttgctgaaggtggctgtggcattttcttaaaataagacatcagtgaagtttaccacagctattgactcttccttcatgaaagatttctctgtagcacacaatgttgtttgatagcattttacccacagtagaacttctttcaaaaattggagtcagtgatagcattttacccacagtagaacttctttcaaaaattggagtcagttgtcttaaacccagttgctgctttatcaatgaagtttacataatattctacatccttttttgttatttcaacaatgtatacagcctcttcaccaggattagattccatttcaagaaatcactttttctgctcatccttaggaagcaacccctcacccattcaagttatatcatgagattacaccaattcagtcacatcttcaggctccacttctacttctagttctcttgctattcccaccacatctgcagctactttcttcattaaagtcttaaacccctcaaaatcatccttgaggatgggaatcagcttcttgcaaactcttgttgatgttggtattttgacctcttctcatgaatcacagatatacaaacattcttttttttaaagtgaaagcaagtttataagaaagtaaagaaacaaaagaatggctactccataggcacagcagccccaagggctggtggttgcccattttaatggttatttcttgattatatgctaaagaaggggtggattattcatgagttttctgggaaaggggtggggagttccctcctccttttagaccatatagggtaacttcctgacgttgccatggcacttgtaaactgtcactgcgctagtaggagtgtgaggatgaccagaggtcactctcatcaccatcttggttttggtgggttttggctggcttccttactgcagtctgttttatcagcaaggtctttatgacctgtatcttgtgccaacctcctatctcgtcctgtgactaagaatgccttaacctccttggaatgcagcccagtaggtctcagccttattttacccagcccctcttcaagagggagtcactgtgggtcgaacacctctgacatattttcccccttcccttttataagacaaccctagtcctaaggtttatagaaggatgaagctccatcttccataacttcttcaggctgaataggaatgatgatattcctgcctaactattagggtctcttgtattcaagggaatcacagatattcttattggcatctagaaaagagtgaatcctttgtagaaggtttccagtttattttgtccagatccatcaaaggaatcactatcatggcagctatagccataagacttgaaagttgaaattacttctttattcatgggctgcagaatggatgttgtgttagcaagcacaaaaacattaatctccttgtacatctccatcagaactcttggtgactcagttcattatcaatgagtagtaatgtttttaaaggatcttttttcttagcagtagttctcaacagtagacataaaatattcagtaaactatactgtcaactgatgtgctgccatccagactttgttgtttcattggtagggcacatgcagagtagatatagcataattcttaagggccttacgattttcggaatgttaaatgagcactgacttgaactttttctagaccctcacaagaaaatcagcctgtcctttgaagctttgaagccaggcattgacttctccagctgtcaaagtcctagatggcatgttctttcaatagaaggctgttgcatctacattgaaaatcggttgtttagtatagacaccttcatcagtgatcttagccagatcttctgaaaaacttgctgcagcttctccatcagcacttgttgcttcaccttgcacttttatgttatggagatggcttctttccataaatctcatgaaccaacctctgctagtttccaacttttcttctgcctcttcctcacctctctcagccttcgtagaattgaagagagttaggcccttactctggattatgctttgacttaagggaatgttgttgtggctggtttgctcttctatccagaccactaaaaccatctccatatcagcaataagcctgtttcactttcttatcatgtatatgttcactggaatagcacttktgatttccttcaagaacttttcctttgtgtgcacaacttggtgcaggaggcctagcttttggcctgtctcagcttttgacacgccttcctttctaagcttaatcatttctagcttttgatttacggtgacagacatgcaacccttttttttacttgcacacttaagaagccattcttgggttattaattgacctaatttcactattgttgtgtctcaaggaataaggaggctcaaggagaagggagacagatgggggaatagctagttggtggagctgtcacaacacacacatttatagattaaatttttcatctcttacgagcacggtttgtggcaccccaaaacagttaaaatagtaacgtcaaagaacactgattggccgggcgcaatagctcacgcctataatcccagcactttgggaggctgaggcagggatcatttgaggtcaggagttcgagaccagcctgaccaacatggtgaaatcccatctgtactaaaaatacaaaaattagccgggtgtggtggcgcacatctgtaatctcagctacttgggaggctgaggcagaagaatcgcttgaacccgggaggtggaggttgcggtgagccgagattgcrccactgcactccagcctaggcaacagagtgagactccatctcaaaaaaaaaaaagagagagaraaaaaaaaagatcattgatcacaggtccccataacagtgaaaaagtttgaaatattgcaagaattaccaaagtgtgacacagagacatgaagtaagcacatgctcttggaaaaatgacaccaatagatttgcctgaagcagggtcaatctggaagcagggacaaaccttaaatttggaaaaaacacaatatctacaaagcccaataaagcaaagcatgataaaaatgatatgtacctgtagttacatagcagcccatttaacctgttctaagatgtaaatactatacacattcagtgaacagttaaattgtcgtattagttatcaagcaaaataaaaaaatagttggcattatgtgatacagttagttgatcctcagtatttgcaaattccttatttgtgaattcacttacttgctaaaatttatacataaccccaaaatcaatacttgtggtgcttttgtggttattcacagatatgcactgacacagagtggtaaaaacttagaatcacccagcgcacatattcccagctgagattgaacaaggcaacactctgccttcttgtttcagccctcatgctgtaatcgagtgtctgttttgcagtctatttagtgccgtattttttgtatttttgtgctttgttgattgcagtataagatggccccctagtataatgctaaagtgctgtcgaggtgttccaaagggcaaacaggctgtgatgtgccttctggagaaaatatgtgttagataagcttgataagctttgttcaggcatgagttatagtgctgttggctaacttcaaagttaactaatcgatatatattaaatgtctttttttttttttttgagatggcgtttcgctctttcacccaggctggagtggaatggcgtgatctcagcttaatgcaacttcccgtccagtttcaagctattctcctgcctcagcctcccaagtagctgcgatttcaggcgccctccaccacgcccagctaatttttgtatttttggtagagatggggtttcaccatgttggctaggctggtctcgaactcttgaccgtgtgatcctcccgccttggcctcccaaagtgctgggattaggtgtaagccacagcgcctggccttaaatatcttttaaaagaaacacacagaaaataasgttctgtattgattagttgaggaaaatgttgtgaccataggctcacaggaacctagccctatatttttcctggagcaatggttcagtattcactattcagtatttggtataattcagcaactttatagaacataactaccttggataatgataaccgattgtatataggtataaaatgaatcttgataaccagtttagttgaaatgaagagctcagattatttgaggagatactggatgcttcagataattttagaaatttatagtatttattcagtttcaatagttatgatagtggaaataatttttgagtcaaaattagaaaaaaaacaaaggaagagatcctctgaggctgaactaagttcgttgaaacggaaaagcattttgggtataagcctcagaggagtaagaaagaagggaatgagtctttactgttaaagttgtaatcaggtgacagagtrtaggagtcagggaggaaagtagccctcaaatcagtctggtgattgggrtttagggagagagtattggtaagagtattcataagtattgaatggacattgacaagtcaggttctttaactcaggaagcatccatgttctaaatgcaattgtgtgaagaaacttttaggaaattttaaactgtttattgtagcctaatgtgcttttgagttctataaatgagatggagccattttcttttcaggatgatgatgatgatagtcttagtagcagtaccatgatatcagaggrcccaggaagaattcttaaatatactttttcttttctttctttacggtttgcattttttaagcacaaaagtaattttgacttttcttgtagggatcccacagtgcccaatgcagtgttttatgtacatactgatgaataaagaaaattttatctaacggggctgggcgcggtggctcatgcctataatcccatcgctttgggaggccaaggtgggtggatcacttgaggtcaggagtttgagaccagcctggctaacatggtgagaagccatctctgctaaaaatacaaaaactagccgggcatggtggctcacgcctgccccagctacttgggaggctcaggcaggagaactgcttgaacccaggaggcagaggttgcagtgaggcgaaatcgcaccactgcactccagcctgggtgacagagggagactccgtctcaaaaaaaaaaaaaaagaaaactttatctaatggtgtagaattacatctccagcagagggcagtatgttcccatgcatccaaaggacttttttttttagaaagttttatagacacttgaagatgcatagtactctttctttctaccagaaattataaattaattataatgcatataatcttctatcactcatggaaaatgcatgactagactcatgcatacattaaaatcagaaaacattaagtactgttttttggcccggtgatgagtttaataagacagttttgctgggcgtggtggctcacacctgtaatcccagcactttgggaggccgaggtgggcggatcacgaggtcaggagatggagaccaccctggctaacacggtgaaaccccgtctttactaaaaatacaaaaaattagctgggcatggtggcaggtgcctgtagtcccagctactcaggaggctgaggcaggagaatggcgtgaacctggaagccggagcatgcagtgagccaagatcacaccactgcactgcagcctgggcaacagagcaagactctgtctcaaaaaaaaaaagaaaaaagtttcttctgtcaagtttgtttaatgtttatattgtacatctatacacgcatatgcttacatacacacagctgacttaaatcctttttagaatagggctgtaaattaacaatatgcatatttatgtaaccagtagttgtggtttcagacttctccctttctgattataaaaacattccttgcattatttaaatttagaaagccacttaaaagtatatctacatttttggatatatttttccagacagttttcctgtgcttttgtgatatacacatacatttttatttttttcacttaacagtgcattatgaatagctttccctgttatgaatctgcatcattatttttagtgactgttgtgtagaagttgcatacttgtggtggaatttacttaaccactttcctctagtggggcatttaggcgtcatttttttccccaaggctttactcttaaacacaaccctaggatgactgttatacatacctgtttgtgcacattgctgattgttttgtaagactttattcctgagagtggaatttctttttttttaaacttggtgcatgttgccaattattttcctgaaacgtatccactacattctaatcagtaaatattttaaaatttttagtttggataaatgagctaaatattttggtcataaatggtcacttttattggtctcccacaataggtatgttttaataaattgatgggaatttgtttgataaccactatttagacttttccatctgggaggcagcatagagtattggatatcttagaatcagacagatttaggttgaatcccagcatctgcacttattagttatgtgaccttgggcatattttccagtctctttaagtcttgaataactcatctattaaggtgagaattttaagagagttgctgtgaagagcaaacaggatcatgtattttttgaaaagtcctggaaggggagtgccctttttctttccttagttgtctttatggtcagaaacccgggaaaacaaatggggataccagaaaagacacatcatttctctttgagtgttgtgtggccctaacacagaccttgacagtcattaggacttgatggttgttgattataaccaacaattggctgaaagtgacaggaacagcagggtttccagattccatgctgagtctgaatatgatggagaaagcttttaagacatagatcagccttatttatggacttggatcactacaaaggttctcctgcccatgaatcttccccactttacattttgtattcccaagtatgctgcctgcacttatgatggcatctgtagtttgaaagtttttgtggaaaagagaatcaaatttcaagggtgctgggcagtgtttcctggaaactaacttatatggaaatttatcttttttttttttgagatggagtcttgctctgtcaccaggctagagtgcagtggcgcgatctcagcccactgcaacctccaactccctggttcaagcgattcttctgcctcagcctcccaagtagctgggattacaggcatgcaccaccacgcccagctaatttttgtatctttagtagagacggggtttctccatgttggccaggatggtcttgatctcctgacctggtgatctgcccaccttagcctcccaaagtgctgggattacaggcgtgagccaatgtgcctggctgaaatttatcttctttaaagagaaacagttacaaagttagagagggctatcacagttctcttattacctgctgggactactgtgagtaataatagattgattttggtctactttaaagaaacattagagatttctgaatattagatattttaagmagttatttcctttcctgccttcacacaatatatttcaacctgtcaccattagtgtgtgtatcagtctcttttgctcattagtattctttttgtctttaaaagtcacgctttgtagatatctaaaaagacctcatgccactttttatagtgcatctccccttatttttgttcaatggtattgctgattgctagagtgtaggggacctgctgaaatgtattatctctgctattttttcataagtttattatgtaggatttacttttgacttattagaaaaaatgatttcagatatctggagtacaaagaggtccatataaagccagttttcagatgtctaaattatgtctttaaagtaaaatagttgagcattttgctgtcgtttccatagcaatatgtcatttatttgtagctgtgactactgaaggctaaatagtcataaagtcagttcggtctttgcagctggtgtgctttgatgataacttgactgagttatcgcccctgtatttagtgacttgatataggaagagtttagtccttttagagcaaagctttggcagtaatcatgctttttgcacatatggtgtcatttaccatgtgcttggcatatctttgcttcatagcttagaaatatttggaaggcctaagcagtctgtttagatccctgttaggacatttgagaattttatgcagttatgaaatcaccacttagattcagcatcaagacaacttgaagtggcaatccatacgtcaaatgaggaaagactttttcgttacaggttgagcatcccttatctgaaatgcttgggaccagcagtgtttaggatttcaggttttttttttttaattttggaatattggcattgtccttatccttatggttgagcatctcaaatccagaaatccaaaatctgaaatgctctaatgagtatttcctctgagtgtcatgtctgtactcagaaggtttcagattctgaaagctggtcatggtcgcctgtgcctatagtgccagctactttagagggtaaggtaggaagattgcttgagcccaagaatttgaggctatagtatgcactgcagttgcaactgtgaatggcctctgcaccccggtctgggcaacatagtgagaccctgtctcttaaaaaagttggctgggcgcggtggctttggccaggcgtggtgacttacacctgtaatcccagcactttgggagactgaggtgggtggatcacttgcagccaggaatttgagaccagcctggccaacatggcaaaaccccatctgtactaaatacaaaatattagctgggcatggtggcagatgcctgtagtcccagctacttgggaggccgaggcaagagaatcacttgaatccgggaggcagaggttgcactgagttgagattgcaccactgtactccagcctgggcaacagagtaagactctgtctctgraaaaaaaaaaaaagcaaaacaaaaaaacaagcagaaaaactctctccccccccagtttttttttaagtttcatattttggagcattttggattttcagattagggaaaattaacctgtattatttaaacaccaaagaaaggaattctgttctaatatttgtgactggctacttgcagaccaaagagaaagtgtagatgattttacatatgtgccatcaccatcaaagtaaatgcaactcagtgtgcttgagctaagaataatctagttttgtttgtttaaaaattagaactggtaattttttttaggattgctatcttttaatccatgaaaggcttagtgttttaatgaaatcgtgtaatttttaaatagtggagcttatttctagtatccatttgataaatgtttccatatcaaattggaggttaaaaaaaaagactgctaaaactatagaaaaaggtcttgcatcctgagaacttgtttgcaaaaaaaaaaaaaagaacaaaataaattgttttaaattcagatagtgaatttaattccaaaagttggtatattagttatctgtgctgtgtaacagattatagcatagcttctattcattgggaatttaagacttgcttagctgggtggttctggctcagagtctttcatgtgccaggatgtcagccacaagcygagcatagtagcatgtgcctgtagtcccagttactcaggaggctgaggtgggaggttcacttaagcccaggagcctgaggctgtagagcactatgattgcacctgtgaatacccactgccttcagccagggcaacataagcaagaccgcttcaccaaagagaacaaaagaaaagataatcagccagggctgcagttatctgaaggctgaactgaagcagcctggagaatctacttccaggataactcacccccatggcagttgacagaaaactgcaggtgctcattggctgttggtaagaggacatagtttctcaccaccggaccttgccacagactgcttgtgtgtttccatgacatggtagctatcttcycccagagagagcactttcagacagagcaagcaggcagctatagtgccttttatgaccagtccttcaaagtcatcakacgtgccaccttcacatttttttctatagaggtgaggcattgagcttagcctgcacttggggtggggaattagtctccaccttttgaagggagtatcaaagaatctatgaaggtttttaaaaccaccaatgttggcctaaaagggacatgggatctattcagatttcccccaaatcttcaaaactttctataagtttacatcggatcctaaagtatccaaatcaaatttttagaatgcagaccactgaaggtcaaatgtagaatcatagcattttgagctggaagggatctggtttttcatttatgcaaatgagaaaacaaaggcgaagaggttgcatgacagtagtagttgtaatgtctgtgtgtgttgttggtattayattagcacaaacacctcagatctctggacttttagatagatgcccctgttgyactgaggataatgtccttgattttctgcattggaacttgggatttgattttcccttcctttcttttttgtgtggagaactgggaactagggcatcaacactaactacacaattatcctctggttctgtcttctctacagctgaaggaagaattttaatgcaaacataacttttcccctcacttctaagaagctgactattactcttccaggagagatttagtgagattatgctgtgttccttgatatggcaaaattccaggcaaatgtgtgaaggagtgagccctagtaccatatggaatctacaaagacttgcgttgctgctgccaccttgaaacacttaagtgggtttctgaaacctcttaagtgtattcctactttttttattttcttattttttttcccgagacggagttttgctctcgttgcccaggctggagtgcaatggcacaatttcagctcactgcaacctccaccgcccgggttcaagcgattctcctgcctcagcctcccgagtagctgggattacaggcacatgccaacacatctggctaatttttgtatttttagtagagatgaggtttcgccacgttggcccagctggtcttgaactcccaacctcaggtgatccacctgcctcggcctcccaaagtgctaggattacaggtgtgaaccaccatgcctggcccatgtgttcctactttttaagtctcctttgaaacctgcatgaagtttggtttgatatctttagaatagtgaggtaaaacgtgttttaggaaaaattcttttcctttttaggaaaaatatgagtgatttgacagttctcagaaaaattaattttgtgacaagactgattggggttctgcttattttcagcaatgcatcttttctgattcactgccttttggctgtttgtctttacagtttgcctttgtagtcatgaccagttgtctttaccatacctcccagcctccttttttcgtgatgaaactcttagaatatttaaaaattttagcagatagtacacatgcaaaaaatgtttgagaatgtttgttttccactttctaatcaaaatatctgtttcaggtttttctgcagcttgggcaaggctgccaatgccagatggcaccatttctgagagaagagctagcttttgcttagaagtaatacccacaaacaatgccaaattagcataagcaaatgtcagtgagttaacacaaagccaacactctttctatcttttctttccttcctaggccatgggtgttgagagtgaccaggaaattgtgcagatgattggaacagaggagcacgtgatggctgcatttgggcccagtctggaagagtgccagaaagctcagattttcacacagatgcaggtgtgtcttttcatgttgtcctttgctatgaaatggaattggagacttaatgctgctcattgataaagctcatcggatgtgatggctttgggctcatagatttgggaaaggtattggggagatatgggaggagtgaagtttctttaactcactttcgtcaggtttggaggaaggagtttgcccagacaaattaggagcctatggtgcccgacttagaataggggatatatggcgaagaggtgtttgttttgatataataggaagtactgtttttttttccttatttgcctgagtgataatatactttttaaactatggcaactctcgtgtacaggttttgtgtgtgtgtgtgtgtgtgtgtgtgtgtgtatgtgtgcatgcatttctctttaatatctttttttattccctacttcagttgctttaggcatccagttgtatgtggtttctatttcttttcctgaattcccagtgctgctttggacagcaaggaaaacccaggatcagtcccttttactgctgcagagccttcattgacctgctcaggcactcctggttggaccctgggaattttagggcaagactcaaagatgaagactgagaaatacacacacacacacacacacacacacacacacacacaccccatagtaaaaataattgcacttcccttcccacatggagggagccccagcagccatacttaggattttagtcccatatttgcaagtgctttcctaagtataaatcaaagttaacatccctcatagccatcctgggaggtgggaattccccactatagaatcacaacagacagttcttacctatccacgtgtacattgtctattctgtgggttatgtatgacatatgtaaactctgggctgcttttttctcttcacscaggatgcttgtagagaaagcatttcccacttatatctgttagtgtgtattctgaaatcaaatcagtattgatatttttgtagactacactagatatttaggaagatcgaaataggtcagtatatatatataattccaaagcacaaatcagtaaggattattctcatcaccgycttcctctttttctacagttaattaatagttgactgcagttacagggcaggcagcaccaggaagggtggtttggatttaggagattctatttttggcctttatcaaaaatgaaatatttggtaggcatgaatctttgttgtacactaaagttacattgtccaagggttccaagaacatgaagagaaaacattaagaaatatcaaggaggcagaaaatgtagaatctaccctgcaaacaggaatatttggttccattttgggagataccctattctttaatgctgtgtagtgccctacaagtttaccttaatggttcctcagtggcttcagtgaaatccggtatgcagtttatttcaaacatcatcattggggtcaaataaccctagcattgtaaagctgtttgagcagagcccaaacagtaggttggaaaatcattcatttatttctgttaaataggttctgacagaaaatgtcagctaactaaattagatcagattagtgagaagatggcaggaaaagatggaaggaagttaacataagaaagacaaatgttccttttcctcgaaagggaagtataactttgacagtgctcgtactctgtgtgcaggattaaggcacatattagctattgaaactaataaaaggatatagagatgcaaataacccaaaatagttggtatgtagaacatatattaacagttacgaaaacatgaatattctatgctattcaaaatgaagatgtagtaagtacactttatattagtctgttctcacattgctataaagaaacaccgaatcagcctggaccacatgataagaccccatctctacaaacaataaaaataaattagccaggcgtggtggcaggcaccagtggtctcagctgcttgggaggctgaggcaggaggatcacttgagcctgagaggtcaaggctgcagtgacccatgattgtgccaccccagcctgtgtgacagagtaagacctttcctcaaaaaaagaaatacctgagactgggtaatttataaagaaaagaggtttaattggctcatggttttgcagcctgtacaggaaccaaaacctgcttctggggaggcctcaagaagcttccaatcatggcagaaggcaaaggagggggcaaggtgtctcatatagtgggaktgagagcaagagagcrtgagggaggagggggtgccacacacttttaaacaaccagattgggaaaactcactatcaggaggacagcaccaaggtgatggtgctaaatcagacatgagaaatccatccccatgatccagccaccacccaccaggccccacctccaacaatgggcactacaatttgacgtgaggtttggtagggacacagatccaaaccatatcacactttattttatataatagaactttggaagatgtggcactttaatggattgcttaaaacctgtggggttttgtttttttggccaggcatggtggcttatgcctgtaatccagaggccgaggtgggtggatcatttgaggtcaggagttcaagacccagcctggccaacatggtgaaaccccgcctctactagaaatacaaaaattagccgggcgtggtggtgggtgcctgtaatcccagctactcgggaggctgaatcaggagaatcgcttgaacccaggaggcggaggttgcagtgagccaagatcgcgccactgcactccagcctgggtgacagagtgagactccgttttttatgcctcgctttgtagtctctctcacatttcttctgttccctgaagccttctttctgtgttggtcatgtatgttttacaccatcattgtcttgggctctagtatatagagaagaaagtactagctgtagcgggggataggaggcactaggcatgttatcttggcctttgcatcacaagggataccctgctcacctgtgttcctctatttctccctcaaacaagtgaaaaattttagcctttttcacaaggaaactagaaggccaacatttattgaagacagcttagttgggggaaaactgaactgcctatctactcatggttcctgccaactgacctgctttcttcagttacttagttactacttactactaggtcactgcagcaagtgttttcagggttttaatttatcttaaactttaatggccttttaatgggaaagatttagatttgaagtccaaatcttatcatggggacagagtttcattcaattccaaacactgtactaatcactgggagtcaaagaaaaagatgacggaattcccaccaaccaagtctagtaggaaaaacatacatgtaaatagatcattaaaacataatgtgatatgaacaagaattaaaatatgcaatcctgaatgcataaagaattaaaactgcagagaaagaggagtggggttaggaaagccttcggagaggaagtgatacctgatctaggttttgaagcatgaaaaaggaattccccaagcaggtaattggacaggaattccaagttaaagaatcaaagatcccagccttttcttctgttaagctgaaagtctttttttttttaagttcattcttggccaggcatagtaggtcacacctgttatactgccactttgggaggcccaggcaggaagatcatttgaggccaagagttggagaccagcctaggcaacatagtgagaccctgtttctaccaaaggttttgttgttgttgttgttgttgttgtcgttgttttaattagctgggcatggtggcgtgtgcctgtagttctgctacttgggaggctgagtgaggtgggaggattgcctgagcctaggagattgaggctgcagtgagctgacatcacaccactgtactccagcctgggcaacagagtgagaccctgtctcaaaaaaaaaaaaaagcacattgttgttccaaaataataagaaccacatatgcctcttctttaaacattgttgattaggaaaaatttcaacatatacaaagtacagagaatagtgttataaatgctcatgtatccaaggcctaccttcaaaagttgtcaacactcttacttggttattttaagtaaatttatgtacactaaaatgtacaaatcttaattgtatgactttacaagatatagaatatttccttatcccacagagttccccctcatgccccttcctagtcaatctttacctctactctctgatttttttccccactattctgatttttgcaccgtagattagttttgccaattacagaactttatatatggaattaggcatcatagtttagtgatttttgcaccatagattagttttacctattttacagcattgtgtatggaattaggccatatatactcttttgtgtctagcttttgctgagcttattgtctragattcatccaagttatttcttttcattcctttttatgtcagttatccatgtagttcatttctttttattgctgagtagtatttcgttatatgaatataccacagtttatcctattgatagacacttggtgtttcagtctttagtaattataaataagactgtataagcaaatctttgtgtggatgtgtggacattttcatttctcatgaatgtgtacctaagaatagaattgctgttaaggagccaagatggccaaataggaacagctccggtctacagctaccagcgtgaacgacgcactaagacgggtgatttctgcctttccaactgagataccgggttcatctcactggggtgtgccagacagtgggtgcagcgcaccgtgcgtgagccaaagcagggcgacgcatcacctcacccaggaagcacaaggggtcagggaattccctttcctagtcaaagaaaggggtgacagacggcacctggaaaatcgggtcactcccaccctaatactgcactttcccaacgggcttaagaaacggcacaccaggagattatatcccgcacmtgactcggagggtcctatgcccacggagtctcgctcattgctagcacagcagtctgagatcaaactgcaaggcggcagcgaggctgggggaggggcgcccaccattgccgagacttgattaggtaaacaaagcggctgggaagctcgaactgggtggagcccaccacagctcaaggaggcctgcctgcctctgtaggctccacctctgggggcagggcacagacaaacaaaaagacagcagtaacctctgcagacttaaatgtccctctctgacagctttgaagagagtagtggttctcccagcatgcagcttgagatctgagaatgggcagactgcctcctcaagtggttccctgacccccgagtagcctaactgggaggcaccccccagtaggggcggactgacacctcacacggccaggtactcctctgagacaaaacttccagaggaacgatcaggcagcagcatttgcggttcaccagtacctgctgttctgcagccaccattgctgacacccaggcaaacagggtctggagtggacctctagcaaactccaacagacctgcagctgagggtactgtctgttagaaggaaaactaacaaacaggaaggacatccacatcaaaaacccatctgtacgtcaccatcatcaaagaccaaaggtagatgaaaccacaaagatggggaaaaaacagagcagaaaaactggaaactctaaaaatcacagcacctctcctcctccaaaggaacgcagctcctcaccagcaacagaacaaagctgaacggagaatgactttgacgagttgagaaaagaaggcttcacacgatcaaactactccaagctgcaggaggaagttcgaaccaatggcaaagaagttaaaaactgaaaaaaaattaaatgaatggctaactagaataaccaatgcagagaagtccttaaaggacctgatggacctgaaaaccaaggcacgagaactaygtgacgaatgcagaagcctcagtagccgatgcaactggaagaaaggctatcagtgatggaagacgaaatgaatgaaataaagcaagaagagaagtttagagaaaaaagaatgaaaagaaacgaacaaagcctccaagaaatatgggactatatgaaaagaccaaatgtaggtctgattggtgtacctgaaagtgacagggagaatggaaccaagttggaaaacactctgcaggatattatccaggagaacttccccaatctagcaaggcaggccaacattcaaattcaggaaatacagagaatgccacaaagatactccttgagaagagcaactccaagacgcataattgtcagattcaccaaagttgaaatgaaagaaaaaatgttaagggcagccagggagaaagatcgggttacccacaaagggaagcccatcagactaacagcggatctctcagcagaaactctacaagccagaagagagtgggggccaatattcaacattctcaaagaaaagaattttcaacccagaatttcatatccagccaaactaagcttcataagtgaaggagaaataaaatactttacagacaagcaaatgctgagagaytttgtcaccaccaggcctgccctaaaagagctcctgaaggaagcactaaacttggaaaggaacaaccggtaactggtaccagccactacaaaaacatgccaaattgtaaagactgtcaaggctaggaagaaactgcatcaactaacaagcaaaatagccagctgacatcataatgacagatcaaattcacacataacgatattaactttgaatgtaaatgggctaaatgctccaattaaaagacacagactggcaaattggataaagagtcaagacccatcagtgtgctgtattcaggaaacccatctaaggtgcagagacacacataggctcaaaataaagggatggaggaagatctgccaagcaaatggaaaacagaaaaaggcaggggttgcaatcctagtctctgataaaacagactttaaaccaacaaagatcaaaagagacaaagaaggccattacataatggtaaagggatcaattcaacaagaagagctaactatcctaaatatatatgcacccaatataggagcacccagattcataaagcaagtccttagtgacctagaaagagacttagactcccacacaataataatgggagactttaacaccccactgtcaacattagacagatcaacgagactgaaagttaaccaggaattgaactcgactctgcaccaagtggacctaatagacatctacagaactctccaccccaaatcaacagaatatacattcttttcagcaccacaccacacctattccaaaattgaccacatagttggaagtaaagcactcttcagcaaatgtaaaagaacagaaattataacaaactgtctctcagaccacagtggaatcaaactagaactcaggattaagaaactcactcaaaaccgctcaactacatggaaactgaacaacctgctcctgaatgactactgggtacataatgaaatgaaggcagaaataaagatggtctttgaaaccaatgagaacaaagacacaacataccagaatctctgggacacattcaaagcagtgtgtagagggaaatttatagcactaaatgcccactagagaaagcaggaaagatctaaaattgacaccctaacatcacaattaaaagaactagaaaagcaagagcaaacacattcaaaatctagcagaaggcaagatataactaatatcagagcagaactgaaggaaatagagacacaaaaaacccttcaaaaactcaatgaatccagcagctggttttttgaaaagattaacaaaattgatagactgctagcaagactaataaagaataaaagagaagaatcaaatagacgcaataaaaagtgataaaggggatatcaccagcgatcccacagaaatacaaactaccatcagagaatactataaacatgtctatgcaaataaactagaaaatctagaagaaatggataaactcctcgatacatacatcctcccaagactaaaccaggaaaaagttgaatctctgaatagaccaataacaggctctgaaattgaggcaataatcaatagcttaccaactaaaaaaagtccaggaccagatggattctaccagaggtacaaggaggagctggtaccattccttctgaaactgttccaatcaatagaaaaagagggaatcctccctaactcattttatgaggccagcatcatcctgataccaaagcctggcagagccaaaacaaaaaaagagaattttagaccaatatccttgatgaacattgatgcaaaaatcctcattaaaatactggcaaaccgaatccagcagcacatcaaaaagcttatccaccatgatcaagtggrcttcatccstgggatgcaaggctggttcaacatacacaaatcaataaatgtaatccagcatataaacagaaccaacgacaaaaaccacatgattatctcaatagatgcggaaaaggcctttgacaaaattcaacaaccttcatgctaaaaactctcaataaattaggtattgatgggacatatctcaaaataataagagctatctatgacaaacccacagccaatatcatactgaatgggcaaaaactggaagcattccctttgaaaactggcacaggacagggatgccctctctcaccactcctattcaacatagtgttggaagttctggccagggcaatcaggcagttgaaggaaataaagagtattcaattaggaaaagaggaagtcaaattgtccctgtttgcagatgacatgattgtatatctagaaaaccccatcgtctcagcccaaaatctccttaagctgataagcaacttcagcaaagtctcaggatacaaaatcaatgtgcaaaaatcacaagcattcttatacaccaataacagacaaacagagccaaatcatgagtgaactcccattcacaattgcttcaaagagaataaaatacctaggaatccaacttacaagggatgtgaaggacctcttcaaggagaactacaaaccactgctcaatgaaataaaagaggatacaaacaaatggaagaacatttcatgctcatgggtaggaagaatcaatatcgtgaaaatggccatactgcccaaggtaatttatagattcaatgccatccccatcaagctaccagtgactttcttcacagaattggaaaaaactactttaaagttyatatggaaccaaaaaagagcccgcatcgccaagtcaattctaagcccaaagaacaaagctggaggcatcacgctacctgacttcaaactaccacaagtctacagtaaccaaaacagcatggtactggtaccaaaacagaaatatcgaccaatggaacagaacagagccctcagaaataatgccacatatctacaactatctgatctttgacaaacctgacaaaaacaagaaatggggaaaggattccctatttaataaacggtgctgggaaaactggctagccatacgtagaaagctgaaactggatcccttccttacaccttatacaaaaattaattccagatggattaaagacttacatgttagacctaaaaccataaaaaccctagaagaaaacctaggcaataccattcaggacataggcatgggcagggacttcatgtctaaaacaccaaaagcaatggcaacaacagccaaaattgacaaatgggatctaattaaactaaagagcttctgcacagcaaaagaaaactaccatcagagtgaacaggcaacctacagaatgggagaaaatttttgcaacctactcatctgacaaagggctaatatccagaatctacaatgaactcaaacaaatttacaagaaaaaaacaaacaaccccatcaaaaagtgggcaaaggatatgaaccgacacttctcaaaagaagacatttatgcagccaaaagacacatgaaaaaatgctcatcatcactggccatcagagaaatgcaaatcaaaaccacaatgagataccatctcacaccagttagaatggtgatcattaaaaagtcaggaaacaacaggtgctggagaggatgtggagaaataggaacacttttacactgttggtgggactgtaaactagttcaaccattgtggaagtcagtgtggcgattcctcagggatctagaactagaaataccatttgacccagccatcccattactgggtatatacccaaaggattataaatcatgctgctataaagacacatgcacatgtatgtttactgcggcactattcacaatagcaaagacttagaatcaacccaaatgtccaacaacaatagactggattaagaaaatgtggcacatatacaccatggaatactatgcagccataaaaaatgatgaattcatgtcctttgtagggacatggatgaagctggagaccatcattctcagcaaactatcgcaaggacaaaaaaccaaacaccacatgttctcactcataggtgggaattgaacaatgagaacacatggacacggggtggggaacatcacacaccggggactgttgtggggtggggggaggggggagggatagcattgggaggtaatacctaatgctaaatgacgagttaatgggtgcagcacaccaacatggcacatgtatacatatgtaacaaacctgcacattgtgcacatgtaccctaaaacttaaagtgtaataataataaaattttaaaaaaaagaattgttgaatcagagagcagatatgtatataatttttatatataccttgttccaaaatgattgtaccattttgcatttacaccagctgtgtatgagagttgttttttgtttttttttttttttgagacagagcctcactctgtcacccaggctggagtacagtggcatgatctccgctcactgcaatctccctttcctgggttcaagcaattctcctgcctcagcctcccaagtagctgggactacaggtgtgcaccacgatgcccggctaatctttttgtatttttagtagagacggagtttcgccatgttggccaggctagtcttgaactccttacttcaggtgatctgcccgcctcggcctcccaaagtggcaggattacaggcatgagccaccacacccagcctgatagaaagttcaggttgcttcatgtcctcataatatctggtgttgttagtctttttaattttagccactctaatgggtgtatagtggtatctcatggttttagtttttatttttatggtaacaaatgatgttgagcccttatgtgtttattggctatttgtattttcttctctgtgaagtgtgagccaaatgttcatttttcttagtgaattgtctttttattattgactttaagagtccttttaaaaacaaatcctggatgtaacttccttgtcagcattatgtattttctcccagtccattaactccctatttgttttcttaattcttttaattttgaaaaaacttaggaggatttttttatttgtttagcttttatatttattgctctctgtgttctgtttaaagaaatcttgcctaccccaaggtcagaaatatattcttcaaagttttcttcttgaaactttatagtttttatggttaggtctaaaatccatcttaaactaatttttatatttgttttgaggtaggggtcaagattaattttttagtttatggatagttgtttcaacaccatttgttgaraagatttttccttcctcattgaattgctatgatactttcatcaaaagtcaactgaccatttagtatgtgtttatttctggactttttattctctttcattgatttatttgtctatccttgtgccagtatcacactgttttgattacttaggtttagagttaaaaatcaggtaatataatactccaacttttttctttcaatcctgttttcgctactccaggtcctttgcatttccatgtaaattttagaatctagaattttagaattagtcagtttttgctttttaagcctgctaagcgtataatgaacagttatgaatgtattggtcagtttggagagaattttaacattaaaccacttttaataccattgmatcatccagtccacgaacatgtcatgacccttaatttatttaggttttgttttctgtcagcactgttttgtagctttcaatgtaggggtcttacatggtatgattcatttttgagaggaaaaaagtactactataaaatttacctgtggttttctctgggtgaaggactgatggctgctatatgtctacacacacacacacacacacacacacacacacacacacacaaatatattttacttgtgtctgtattttctaaatttcctacaatgacaatgtatcattttttttagtaagagaaaaaagggaaccagtgtgttaggcagtatgctatgctttttgtcattgatttatgataaacgttgattttcaactagacccagtacagctttctctataaccagggtctttatctctttcgctcatactgtacatgtggttaggtgcttgctaaactacctccagtgatgtcattcaaacattattgtaatctgttttttataggcattaaaatatatagggaacaaagtaagaaggcaaaggatgtggggaggtggaccaaagaaaaccaaaatagaagaagcaagagagctcctggcttccaccattctgacccatgtcccagtgagtaacacttcgttattgtgaataaggactgtggggtctgtgaattcctgttagagaactgtgataagagtttaccttatttaaagtccaattcctcaagagaaaattctaaagaggactgtactgccccatcagaaataaccttccattatcagcagtttgtttatactcggagaatgttagctgtatcgccatcatcatgtttattctcttgtggttattctttcagtcttaaattattgttattttatattcatacatacattagtactgctactagatttcatggttttgaaggacagagatggtgtcttacatgttttataaataaattaaaataagcttacagtgccttgcccgtacatattttttattgtatggtaaaattgcttatgtaaaatatgcttatgcttattgtatagtaaaatatgcttaatggtaaaatatgcgtaacataaagtttactgttttaagtgtacaattttctggacttaagtacattcacattattgtacaaccatcaccacagcagatagttttaaaaatgtttactggatgagttcatcttctagaccttgaatttaaagttcacattatccagcctccttcacttattgtgaagattctctgatccaaacatgctagatgatttgcgttgtcacccagctggttagtggtaagagtaagggttagaacctatcttctggccttgaactagtatgtaatatttattttttattaatttattattaaacagagatcaaccatattggcatgtggggtgttggcaagaggcagccctcaattttcttcccatttaatgtatatgctactcttactaagttatggaattattatttgttagactatcttgttaactaaatagtctggtttgtagtgagttatcatgtgttccatccgtgaataatctttttcaagggttgcaaacactaccttcaggggctgactgtaaaataatggaaggtcacgggatctgtggaagtcgagagtaaccacctgaatgcatccagatccgattttcctgtattaaaacacccttcaatccaaataatacaggtctctcattctgccccttggctaccatttgtgcatgtccttgatttaatccaaataattagaaaattctgaatgttaaagctgggtctcaactgaattttaagctcttttggatgattggaagagtctgaaacttaaaatagcaaaaatggatagtagaaacaacaaaggcttttgagcctgagacgtaattgttcaaatcctggtttcttacatcctaactgatgaactttgggcaaatctgaacttttctaagcttcagttttctcatctttttaataaaagtaattccactttcttgcagggttcttgtgatgattcggagatataatatacgtaaagctctgtattttccacagctccccatgtagttctcaggagctacacttaccttcacactataactgagaagaatgttgggttaattaaagagctttagttgatagagtcctgccgatattaacatttgtttagttagactgataaagataggccaggcacagtggctcacacctgtaattccagcactttgggaggctgaggcgggcagatcacctgaggtcaggagtttgagaccagcctgaccaatatggagaaaccccatctctactaaaaacacaaaattagccaggtgtggtggtgcatgcctgtaatcccagctacttgggaggctgaggcaggagaatcgcttgaaactgggaggyggaggtagcagtgagccaagatcacaccattgcactccagcctgggcaacaagagcaaaactccgactcaaaaaaaaaaaatcatttgtgcttttctgtggttgcatggaacctaaattaccattttaaaagtttggttatacataatccagtgaggaataaagtcagaatagatggttcagggaaaagaactttgttttccagaattgttttggacagtatttacctaaatgtgatataaaggatgattttcagtgatacagggtcattttttatgtaagtaattacatacttattagaaggaatacaactagcacatcaaatccatttttgtgatatatgtgattttatggtattattgcataggatgaagcttagcttaaaattggttgtttaaagatgattagacgtattacataaataagtactacagagatatgctgatrttcgtgatggtggaacttgaatgactagcatttggaaagtattgtttaggtgtgtctgtgtagagggaaaaacacgggcagatattcagtagttctcagtgcttgtccttgagggtgggcctgcagaggcctttgtcttggtatactggcctttcagttccttggagactgtggttctcaaagaacattccctggactagtagcatctgcatcactaggggacttgtaagaaatacttgaactcttcctactgaatcagaaaccctaggggtgggtcccggtaatctgtgtcttaacaagccctccagatgattctagtgcatgctaaagtttagaaaccactgccataagagtggttaggctccaagatgcctaagtcccagaccactctttcctctaatgtagtattaaaagatctccggagttctgaaataggcaacaattctgtgtcagcattctgggttcgtttgttagtccttttttctccccctctttcacataatccacaggttagtatcccacaaaggagtatctgaactactcttagctttctcctaaaaagtcttacctgctgctagattgagaagatccccactcaccatatgactctgggaacagtcctggaaaaatatgctaagtattaactcatttcaatttagacctagggtttgctttccagcatatagtcattaaaaaggggagtgaaatgagttagagttcaatcccaagggggtgatggactgtacctctaatcgagtggcattatacagttcagtaggggcattttccgtaaatatccatatttatttctacttataaatgtcttgggagaatctactaccagtgtttatgcaaaaggaaaatgtgaaatgggctttgttgaaaattgaaaattttgttagtgaaagtttgctttatttttctcattaacaagaaagataactacaactagaagagttagatgttccatgtaacttgccacattaagattagaacaataaaatgtaaattatatatacttaaatggaggaccatacagctttcgaaataccaattgaaaatgtaaattacttatagctgcccagacactgagtttttctgcttggttttgtggtaactggtgttacgattgtaagagggtttttttkttttttttttttttttcttgaggatggacaagagccttttctttttaaagaccttcttattgatgtaattgttttgkgggtacaagataacaaagtagcttttagggctactttttcttttaccacattcaaacacatttcttttaacacattccagagttctcagtaatagagagtaaattgacctagagaagaaataaaacttcctttgaaggaaaatggagtatttgaaacacatacagaattctaacatcctacattatttagtgaaattacttagcagcaacaacaaaatgtatgaaggagaatgcttgcttgttttttttttttttgaatgcartctattgatttattgycatagkgataaattttataaaagagatttcattgggattttactaaatgattaaggtaagtaaagaagaaattttaaaatagtatgtatcatctgtggaaaagcctataaatactccttggaattggcagaagctcaggctacattctcaaaatttgtctttttagatgtaggatctacttcagtttttttgtctctccaaacaaaccagtgcaattattttatcagttctgagtcaacttactatgattgagccagattcattcatatgggtttcagtgtttctgctagagaagattgactagaacatttgctacaaattcattcatctgttcattcattcggcagttatttgttgcatgccagacagcatgttagtacaattcttgttatcactgcatgacaaacaattctaaaacttagtggcttaatgtaactgttcattgtgtatctcatgattctgtggtttgaccgggtttaacttaaggtggaggagggagttctcatttcaggtctcttacaaagttgcagacagatagcagctgaggtttgagtcatctggaagctcacctgggctggacattcaagatggcatcttcactcatatctctggcccctccttgattttccatttcattgggattttactaaatgaaatgtagcctctctctctgtgcaacagagcgttctggactttagtgtctcaggactctaagagaaaggaagaggaaactgccagttgacttaaagattaattctggaattggctgstatcatttcagctgtattctcttggttaaattaatcataggccaatcccaagggagtgatagattccacctttaatgaaggaatggcatgaagtttatatgaagggaagaagttgatgtagtcatctttgacacagaggtactcacaggttactgaggacaatgatsaaaagtcatcatctcagctcaggaaatttccagactagttgaatttatttgaatggagagaatcataacaattcagtattttcttagttgaatgttatagtattgatacttttcttgaggtacgttaaattttaatgtccattttctcaaaatttttctccaatttctgacttacaggttaaggarttcaatttccgagccaaatgtatctatactgcagtgatggtgcgaagagttattctggcccaaggagataataaagttgacgacagagattattatggtaacaagcgactggaattggcaggacaggtgatttaatattttatgtcagaaatcttgttttccttaatgaaaattaatttggttttcatttcacataagaagaaacatttgaatgaaatatagtttgcaggtttgaagtataaacatttcatacctgacttattatctcctagaattcctttaactataaaaacattaattcttttttttttgttttcttttgagacggagttttgctctggttgcccaggctggagtgcaatggcacgatctcagctcactgcaaccttggcatcctgggttcaagcgattctcctgcctcagcctcccgagtagctgtgattacaggcatgtgccaccgtgcccggctaattttgtatttttggtagagatggggtttctccatgttggtcaggctggtctccaactcccgacctcaggtgatctgcccatctcagcctcccaaagtgctgggattacaggcgtgagccaccatgcccagcctaattmtttaaatgttaatagtacgtgacctatatcttttgttgggatgtttaccctcattctgtataatatacaaagtgaagtatgactttaagtaatatcatttattcagttaacaaacatttactaaacacctattatgttctaggcatactcctaagtactagttatataagagggagtaagacagacaaaagccccttttctcttactccttgtagtctcagtggaagggagagagacaataatcaaggaaacaatccgctgattgttttggtgacatggtagaggtaggttagtgaggatatctctaatctcattttaagtcttagctgataaatgacattttatttcaagactgtgtatctctttcaactggctagcaagcatccaaaaatctttggctagcaagtaactaaaaagctccagttaattttttagtttagatattgtatttttctgttttagaaatttcatttaggtattttttcatagcttctatttctctacagagattttgtatttgttcatccatcacaagcctatttttatttacatccttgtattttaatagctactttaaaacctttgctgctaatttcaacgtctcagtcacttgtgggtcattctcttcattagcttttctcttgaatgtggctcatgtttttctgtttcttcttatgtctgataattttggattgcaacctgatagacattgtggataagttgtggaggctctgaattctgctgtattcctctaaagagtgtcccagttttttgttttttttttaagaccctctgaacttggctgaaaacctctgaatcctgccttcctgcagcaaacatcagctgaaatattcatttagttctttcagttgtagcttgggtcaattggggatttagatagagtttaaatgtggaatttggaatttcctcacttacattctagctgttgaggtagctcagatctttttcttttggttcttcaatccagtaagactgcaacttactttctcatgttttagccttctgatttgacagggatcactgcctgcccttaggtgaaaagccataaaacaggaaactcactcagaaccatttgcttttgataagcattccttttcctcagtttctttctgcttcctgatactctttcaatgaatttcaagtagttgttttatctaatatttcatccagtttatacagttgagccacattatgcatatttgcaaatttgtctacttgctaaaatgtattttcaacctccaaatctgtactcagcggcattttattggccatttgcaggcatatgcagaactgcaaaaaatttgagtcactacacattcctacttgcagtctaacaaggcaatgttctgccttcttgtttcagctctcatactgtaaacaagtatcctttttactactttgatttgcatttccctaaaaactgattatgttgaacatctttttatgtgcctattggtcatttatacaccttctttgaagaaatgtctattcaagtcctttgcccatttaaaaattttttttcttgttgttgttgagttgtaggagttcttggtatattctggatacatacatatatcagatatatgatttgcaattattttctcccattctataggttgttttttcacttttttgacagtgtcttttgatgtacaacagttcttaattttgaaagagtcctatttgtctattattttctcctgttgccagtgcttttggtgtcatattcatgaattataaccaaattcagtgtcttgatttccccaatgttttcttctaaaagttttatagttttagctcttaagtttaggcctttagagtgagaattttgttagatgtacaattctagattgatatttattatgtgtcaccatttggtggtggagatatttattatctcccatcatttactagtttatttgtttgtttttatttttttactttaggcaaatatttcacctccttctgcctcaggttccctgtctgtaaaaatggggttcatgccatgtaccttataggattgttatgggattagatgaatgatgtataccgtaccttgaatggcacagaaccattgtagttccttcacaggtgttctgtcttatctytctaggtacttttaagatattcttttggcttttgttattctgcagttttctttatgatatgccttggtgtgaatttcttttattttttttttgcttggtatgtgcgtgttcctgctacccaaggattaatgtctttaatcagttcagaaaaattctcagctattatctcttcaagtgttgcctattctcccttttttctrttctcttttttctattatctttgttcctttactgcattctgtgcgattgtttttctaatttagctcttagttcattttctattcagccatgttcagtaattgagttttttgttgtttacttttatagaagtctttttcacatatttttggtaatttattggttttgcattttatgatgaaaattctgaaacattcagaagagttagaagaatgattttgtggtcactttgatcatcttattttgtgtgttttttttatttcttcatagatttacatagctttttttaattccatatttgataactgtattttagcatctagaatctaatatgccattaattatcaggtggaccactatttttatttccactaagaaataaaacacatcaccagttaaattatgacacagtgctaagatgtatcccatgttcaggatgggatacaaaagtaaaaaaaaaaaaaaaaaaaaaattccaatcagtgaaatatagtaattccagtatctratgttctaaagctgctgagttagttgtttttgattactcttactcaagatagattggttccttgtgagtttagtgatctttgtttatgaactcatatttaattgagctctgatcctgggtgttattctagggatactttcttttggggatatgtattttctttttcagggaatagtgctgacctggaacttctaagtcttcttacatgattctgaggattatgagtttcaagttcacatccttcatcttgtcactgaactctgatwtagtctccaggtccctaagctgatatcagtatttattctcagggcaactctgccatttgggtttgcttattgctccctactccctaccatggcttcacctcatttttaatatgttttatccagaatctagtcatattgtagtaaccagactcctcagagaatccamcccagtatgctgcaagcagcagaggtcccttcattttcacagtagacttgaagcttcatgaggacagagactgtatctttcttgttcatcttactaaacttagcaactaataagatgccccagatataatgttcatcacatatttgttgtagtaatgaatcaattaattacatgttctaaaatagtttactttaaagccccctttgaattctgatattctttcttcatttgctgtcttaatcagttaacagtgccatctacccatgctgctgagctacgaacctctatgtcactccagactctttctgttccttcactctacacatcaggttcatcaaatcatcaaatcctgcctgtgccacttcctaaatatatctctaatttacttccagtgtaactgttagagcacaggccttcaacttcagtgtaacctcctaacaagtgtctctgttcttagcttcaccccaactccattcatcttccacagtgctaataaaattatttcaacacacaaatatgatcttctcactcttgtacttaggctatttgaatggctccctctgaaagcagtgaggtcactacagtgagatgtgatgtggttaatggaagataccaagttagggaatgatgtgtcagccaaatcmtcttttaggaatttagagtctatgttgttggtgacaattctacttakgagatcagtctttgtggttgtcacagagggatgatggtatggttgatggaaagaggatgccaagtttccttaataactaaagatatggtaacttagggatatgggtgtataaagcactagcatgctcctaattagggacactactttctgagtcccctggaattttcccaggagatatgtatctgtgaatgataccactggcctagaatgaaattttgcaaagcccaagacacttcttttgttattctgatggttattcatttattttaccaatttaaacaaatatctttaatttttttaaaagtgttatgatttttaaaaagtaatgttagcagtaaaaataataaatattgtaaaatagcagaagtcattcttagtaaacatttaaaaaaatagcatagcaaaaagaattttaaacaaaaagatttgcagtgaaaagtgacccacctctgaccctcttttccctctgactcagttccccagttctcctttccagaaagtcacttttcctatactgtcctctatccttccagagacactctatgcatatacaaatatctttattaactggcagtttaaagttaaaccattggaagctcttgccctgaaaactattcaggactctgtgaatttatgcttagtggggcttccttggggatcattgtcacaggcaagtttggagtcaggttttgcaagttcagaagaagttatataaaggtgtggtttgctgtcattagtttgaaacagattttcaaagcagttatgtccgagaatgttatttgaccattactgccaagccctttgacttaagggggaatttaatcagttaaatgtgtctgttgctgcagaaattgacatatacctgtttgtgtatgtgctttttagttatgagaaattgcatacacaccactatatataatgtgtgtgcattaagtctcataaagcaaatacttgtatattcccattcagtttaagaatgaacacagcgtcagtacatttgaatcctccatgtgccttctcttgttcttggctgcccctcccatctgtctggaggctctggccatgtgcctgcctattcacttggtacaaagcaatcccaacacattcctgagcattctctgtgtgattaagtgaagcacaggtccttttcccaggagcatccgcagcagacctgagcttcagatgtaggtttcaaagtttttaaagcatgaactctcagttggaatcccaatattaaaacagataaaagttgagcctttctggttgaggtgggacagaggggttctctgcctccttccccttcccctgaaactcctccatggaattcataagcacagtttcctctgtagaaggatgtttagattctttcacagagcctgcagggtccttgatgatcgtgcccctctgtgcctttccggcctcatctcatgccaaagtgaggcacttacatcttctcaaacataccataatgctcttctatcactattcctttgagttatgccttctaccgaagctgcccctccctcatatccctttcaccctctctctaaagaggagctcctccttattcatcttttgagccctctctgaaactgtgacctcctaggtgcagttagttgctctgtcttccttaggccagtaacagtttattcaagtctttatttgcatgctaaattaacwtgtaattctttacttccatgcttcttcccccttttagattgtaagctcattgaggaaaggaaccatttatattcatctcgttatttccacatatgtgcaggccgatatttgaataaggagaagttgctctcatgcagccttgcaaactgcattccagcaagagacacaaccaagttcacatctcctaaggcacgaatgaatttagggactggaggaactgatagagggtcagtgtggctggagtgagtgaggtgtcaggatggtaagaaatgacactggagacccaggtggaggctggatcatctggagccctgtgtgccatgggaagagacttggcattctacatgcagcagaagaccattgaagagttttagtcaggggagtgacatgatctgatttttagtttagaaagatctgatgtggagatgaacaggcgaagagtggaccggctagaagctgtagcagttttctagatgagagatagtgcggctgggatgatcacagcagatagtaccacaactaaaatttaaaaactagaattatgaaattatagtaactttaggttctagaaaaaaaaattagcatcaggactactgaggaagctctgtttggttaatggccactacttagcagtttggtttttggccaccttcagattgaccattgtgcaaggaattatgggtatcctcaccatcaatcccatttttactattttttacttcggaaaaaccatggtgttaaatgagtccattaaaaaaaagttgattgtttagaggaataaggaatggagtaaggagggggaaaggagagctgatcctgttgcttaaaaaattagaattaaaaagagggttcccatgtgcaagaaaacatagctttataaacaatgtaaagacataaaaggtattgtgttagcaaaaatgtgtaaaaacaatagctgctaatttcacaccccatgggatgagggagcataaatgtgcttcagctttagataacagagttgtctccactggccaagcgggttcacagagctttccttcagtcttgatgccacaagagggttggcaggccagccgccagtagaggtgttagcaaaacctaccgatttcaggcttaatctttcacctaccttttctttttcggtaatgtgttcattatttgctgagcattactctattctttgtctgcaaattttttgtttctaatgcagcttgctttgtatgggtgagatatggaatggcaccaaaatccggcaccctggaaagccagggatttctaccctatgacaaaagaatgccgtcttgacttcagagattgcctaatcccagctgttctgataatgtaattaaggctgcctaatgtctttaattttgcaaccagtttgtgtgaaaaggagaatttggcactctgtaggcttaaacactaaatagcaatctcaagacgcctaattagaattctctgacattaagctaattggtgaaactgtatttcagcagcttaacttctttattaatttttttagcattttcattgaaaatcaattgatgagctgtcagcatttttccctgaaatatgatttgctctttactctcctgtcttaaacaggctgaaaggccttgtgctaccaaggtattgaatattatcaccagcattccttcccttttagtcattttacttttgacctaaataatgtggtgtattgtgtggatggccttgtggtttctcactgctctgtgaacttggacagcattttttcttttaaactgaaattttaggagtaggaaaatttaataatgaggcagtatttctgttgactgtgttcttactttttacttctttagtaccaaggacatttccttgtgtttgaatcaaggggctacaataaattcagctgggatccaaaaaaactttgtcataatttgagacaaaagtgtctaagtgtaagggactaattaaaatagagctgagcttttgttgtttaggttaagggcattcgattctgttcaggatgcttattcaagttccttttgccagtttccacaggaagytgctggaataggcttcttcatcccctctcacccctctgcacctgcttccattcccatattctttctttccaagagtgaaactgctgggtctcactgtaagaaaggattaagctctcagaggaggaagttttctttttagaacacttctgacatagtaaattcaaatccaagatccaggcttttctatctgaaaaggtggttttagtagaaaagtggaaggacatgtcttaactttaaagaaggaaaagcatgaaatccagttccacttaggaaattccttctttggcactagctagaggagaagattcatttgctttgaataccttcttcattctgagtcaaaaaactacctatcagaarcattcaggaatatagtcagtatggaatctggaaaatctttagcttaaacatacttcactgaacctcagaattctttaagaaattaattagtataaatatgccccccatattactttaatgttttgttatttaacttagatcacaaatatattgagcttttttcttccactgcaaagaaaaaagatgtgtacaaagggaaaaaactaatagaattaattgtataggagtatttagtatgcataatatctattatattactgaagaagtctactttttttttatttatagtgagccagatatttagttttgcttttttttttttttttttttttaatgaacttgatataactggcattctggttatgtgttactctgttacatgctatctcaaaatggtggcttaaaacaacaaccattttattatacatacctcacagttttgtgggtcaagaattcaggcaggacttggctatttgattcttttgtttcacatggtgttgatggaggttggttggttgatgttctgctagaggttggtgggaagggctggaaagctaggctcaggcgtttccagagttgtcacattcggtggctcaggaatctaagagtaagtgtttcccatagacaagaaactgtgtgaccttagtgacctagactgaaagtcacagcatcacttatgtttattctattggtcaaatagtccccacccagatgtggggcagtggggcacgggggtagggatggacatgggccacacctctcaatgtttgcttcagggatcagccagagatttgggcaaagtttatatatatagtttggagttttcttccttgggttctctcctttatggaattccccttcaccttccagctactcaaatccagtagttcagatctttttcttctgtttcttcagtccagtaagactgcaggtctttctctgagtttcagcttcccagtgtggcttggaccctttttattaacgtggcctacccttaggtgaaaagccttaaaaatgagatgtgtacccagtgccattcactctcagtgtcctgcttttggacactccctagtgccttcaaaaagtttttaaatgttttgtccagaatttatgattattatctgcagatgaatccgtctgataggacctactctaccaattcgggaaacagagccacctagtctgttttcatgacttactgttctatcccgttgatttggcttccataatcactgttttaaaatatcactgtggtttaatagcatttataggtaatttttaacataaaaatttaaatgttacatttatatgttatgaagggtacaaataaaatgaacaacctcaaggccactactcaacaactagactattaccaatagcatttcatttacctatgtaccccctactccattcttcattttcccctaccatcctgaacttttgcattttttaatttcttgatttattatatcatttacatctttaattttaaagttttaaaattatttattacagtataagctttgcttacttttgaactttatagaaatagatccatataccgtataatttctctgcaatttttttcttctttcaacattaagatgtgtctatattgttgcatgttactgtagttcattttcatttctgttttccattgtgtcaagatgtgatacagtatgatgaataccactttattcattctactgatcaaggactttgtattgtttctccccatttgacattaaaaaaaaaaacacaacaacactggcattcttatttatatctcctggtttccatatgcaagagtttctctaaggaggattgcctagtcatggagtcagagtcaagttaaatttttacctgaactgcagaatgtcacactagtttgccaagtatttctacattacgttgtatatgaatttctgatgagctccgtcccatgacttactatcaaacttttaagtttttgtctaatagatgcaaaatggcatctccttgtggtcttaatttgcattttctatattactaatgaggttgagccccttttcatgtacttattgactattcctgttttctttgcaatgtcttttgggttgttcccatttttgttactgatttcaaggagatttttgtatattttgcttcctaattttttgttatatgtgttgcagatatccttttccagtctaaattcttgttttaataactttatatatatatatatattttttgagacagagtctggctctatcgcccaggctggagtgcagtggcatgatctctactcactgcaacctccacttcctgggttcaggtgatcctcctgcctcagcctcccaagtagctgggattacaggcatgcaccaccacacccagctaatttttgtatttttagtagagatggagtttcaccatgttggccaggctggtctcgaactcctgacctcaagtgatccacccgtctcagcctcccaaagtgctaggattacaggcatgagccacggtgcccggccaactttatagtattttaaagtgctactaatttgtgcttttagttgcagccatttgtcaacttatctaacttttaatagtgcttgatatggtttggatctgtgtccccacccaaatctcatgttgacatgtaatccccgatgctggacgtggggcctggtgggaggtgattgggtcatgggggtggtttttaatggcttagcaccatcctcctagtgccattttcttggtagaattctcatgagatctggttgcttaaaaatatgtagcatcgtccccttctccctcttcttcctgctctggccatataagacatgcttgcttcccctttgccttctgccataattgtaagtttcctgaggcctccccagaaactgagcagatggccagcatcatgcttcctatacagcctgaagaaccatgaaccaattaaacctcttttctttataaagtatatagtctcagttgtttctttatagcaatgcaagagcagactaatacagtgctctttattttttaaacttgtgtgtttagtatttgttcttttgttcatctggaatgaagtaaggaatccaatttcatttgttttctaaatggataactggttgtcccagctccatttattgtatagtctttcatttcctcgctgatccaaaatgcatctctatcatataacaagttttattgtatgtgcagatcttttctggactctttggtctatccattggtcagcttgtctatgtattcattagtacctttaccttttttaggagtgtcttggctatttcagggtcttagcttttccatataaattttggaattattttgtcaattttcatcaaagtaagtcttctagggattctaattggcattgcattggaactgtagatcaatttggagaagattcgtaatcttaaaatatgtaggctttttatccatgaatattttcttttcatttattttggytttctttgatgtttttcaataaagatttataattttattcatgagggtcttgcacctctttcagatttatttctaagtttttaagggtttttggtagacattttaaataaaaatatgaacattttcaaaaatatacaaaaatagaatagtaaaattaactgccatatatccatcacagaccttcaactattatcagtagaaggcaatcttgtttcctctgtacccttctcaactctttcccctccccttattccccaaattatgttgtttaaacaaattgtcgccatcaaatcatttcattatctcagatgtcaaatcacattctgtaaatacttaaaaatgtgtccctaaaagacatgactaaaatttttcacaccttttcacacattaaaattttttagatagatagataagataggaaggaatttattatgggaataggcacatgtgattatggagacagagaagtcccacaatgtgctgtctgcaagctggagaaccagagaagctagcggtatagtttagtccaagtccaaaggtctgagagccagggaggtgatggtgttaactctcagactgaggctgaatgcctgagaacctagagttctgatgtccaaggccaggagaaaatgggtgtctcagctccagaagagagaataaatttgcctttcttctgattttttgttctatctgagtcctcaaaagattggatgatgcctgctgacgttggttgagggcggatcttccttactcagcccactgattgaaatgtcaatctcttccagaaacaccctcagagacacacccagaagtaatgcttttccaaccttctgggcattccttaacccagtcaagctgacacctaaaattaactcacatatccttatggtgtctttttttttttttcctcgggacaagagtcttgctctgttgcccaggctagagtgcagtggcacaatctcggctcattgcagcctccgcctcccgggttcaagtgattctcctacctcagcctcctgagtagctgggattataggcacccgccaccatgcctggctaatttttgtatttttagtagagatggggtttcaccatgttgcgaggctggtctcaaactcctgacctcatgatccacccgcctcagcctcccaaagtgttgggattacaggcgtgagccaccgagcccagccctcatggtgtcttttaacatatatatatattcctctccctcctaaatttcttataaaccaggagttaaatctagaggatagatggtattccggttttggtttggtttagtttttgggactagaacacttcatgggtggtgggagtatatcctatcctgtatgtctgattttatccactttttgtgccattgaaattgatcattgggtttaggtgtttgggtccctgattcatccattattaagttccccatcaacttttctcctgatagttttatttagcatctgatgatgatcatttcctttattcattatctcattagggcatgcaaaacagtgatattctaacattttcatcctggtccatttattagctggaattttttaataaagagtactttcattgtcatcccttttgttaccctgaaacataatttccatgggaaaggtggggtaaatgcttgctagatttttttttaagcctgtttgcagaataatgatttagttctctaatttcctccagaagtgaatagtgaaggtgttttttctctgagtattattataaacttaggaattttaacatttttacttaagttttagaattagcttctccattttcacaaataaataaataaaagcctscaagctttttcattgagattgcatttgaatttgtaggtcaatttggggagaactgatatctaaataatatttagctttccaatccatgaacatatcatctcacctattgaaattttctttaatttctttcagtaattttcagttgctttgtgtttattggccttgtatcttgcaaacttgctaaacacatgtgctatttctattaaggtttttttcttagattcttttggattttctatgtggatgaacatattatctgcaagtaaagacagttttattgcttcttttccaatatttatatcttttatttatttatcttgtcctatggaactgaatggcacctccaatacaatgttgaataggagtgttgagcatgggcaatcttttctttttcccacattttctaaaggaaagctttcagtttcctgcccctccctgtggtatctggcccctgctgtgtatcagtgcaggatctttgcccaaccaggtttcctgctcctcccctagggaaagatgcttctccctcctcttctctctggcattgcaccttttcctggaatcagaggatttgctggacctcttccgggggtagactgttgttgctagttactgtaggtgcagagtttgttgggagagcctgggggattagggacagacagcttttgcttctgtccctctctgagaagaggttatttttgcctcctgggactttgccaggcaggagggtgtcctgcccccttcccagggacttaggtgttgcttcctatgcaagaaagcccagggaagtaggtaggtagggttttattgcctgttttccaacaaaggggtctttctcaggttttctcctcactgcagcctttcatgagcactccacagaaaggaacttgtgagtgggagtggacacttsttgtgcctgggcttcagaagaattctgaacttgtgtggcagtccacatttggcctttaagaagtccttaaaattttagctgattccttcaattacactatttgcatcctaacttttctttaaagtttaaccacctagttgtacctttctaaacaatataatgtagttgtgctgggttttgaaccttatataaatggaatcatgccatatatatgttgttttatgtctggtttcttttgctgagtatttgtttttaatactcagccatgattttgtggttagttattttttgttcattttcattgttttacagtgtttcattatacgagtctaccacagtttgtctatatattatttgtatggtttccagattttagctgctatgaatagctagtataagtatcttgagtgccctcctcctgccagcagcactgtcatctcctgggagctgattaggcattcatactcgtgggcactaccttagacctactaagctggaaattgtaagggcagggcctgcaatttgtgtgtgtgtgtgtgtgtgtgtgtgtgtgtgtgtgtgtgtgtgtgtttaagacagagtctcactctgtcgctcaggctggagtgtagtggcgcaatctcggctcactgcaacctctacctcctgggttcaagcagttctctgcttcagcttcccaaatagctgggattacaggcacccgccaccagacccggctaatttttgtatttttagtagagacagggtttcaccatcttggccaggctggtcttgaactccagctaatttttgtatttttagtagagacagggtttcaccatcttggccaggctggtcttgaactcctgacctcgtgatcaacccaccttggcctcccaaagtgctgggattacaggcatgagccaccacgcccgggtgcaatttgtgttttaacaatccctcagagtgattactacacatgctaaagtttgagaaacactcctgcagcaggtataactaggagaggaactgttggggcacagggatgggtagataatggcaaactgtttcctaagtgattgtaccaatttatacctttaccaatgatacaggaaacatcttggatatcttcagagtttataatggtaattcttctccaccgtcccccccccccccccccgtcctttttggttttaatatataactttatctgtaaaattaaaaattaggtcattggtcaatgaaatctgaaagtctagaagtgactggtctaaagaaaatgtctttgaatgcagtgagtatgtcatcatctttgctctcgtttaaatgcctagcacggtgttaagcacatagaaaattatgtacatatctgtcaaactgaatttgaaaatagcaattttttttctgttttaagcagtttctccatcttattttttaaaaatcttaagacctaaaatttattaaaataatctagcaatgctttttgaaaaatcaccatatacctttttttttttttttagcttttatctcttctttttgaagacttgttcaaaaaatttaattctgaaatgaaaaagattgccgaccaggtgattcctaagcaaagagcagcccagtttgatgttgtcaaacacatgcgccaagaccagatcaccaatggcatggtgaatgctatttctaccgtaagtcttcagtcactcttttaggattttgtaatttatttgtaaacctattcaatagaacagaaacttaaagcactttgagaatccaggtgaaatatatatatcaaaacgaatgtttacaaagcacaaatttctactttgaaagaaagtctgaagtgtttattactataactttcctgccaaattatagttgctgttatatgaggcaataagaaaatagatactcttatatagaggaaaaatcttcattgaactgttaataaccattcttttaaagaatactttcccctattttattctgtagtaaaattgacgcatttcaggcaggtttattaattatcaaccttttgtccaaaataatacaaagtgtttcatttcacaggaggtttatattcttcaaagacctatcagctgttcctcacataagcaatgaattcagttctggatgaattcagttctcggcagctgctgtgtagtcagggtctcaggctattcataaaaggttatcagatgggtttttgcttcctttcttaaagcataacaactataggtctatctgatgaagtctggttcatgttttgcatgccagacataaaattagttttatggatgagattttgccccaacaaagcatagtataatctaccatgttgattcccttaatgatgaaagaattagtgcaaacttgcttcaatacttgactttagaactttatagtgtgtctgtgtgagtggcccatacagtgacagctacatctaaatttgaggagaaccaggcctttgtccctatttaggcacataaactctagtggcccaaagtcgtctgaggtggatccctgaatatttgaagagaatcttccaaagaatgcttgaacaaacttctgttagaattacttttccttgcttcctcacccatgattttcaggtcaaaagagctattttgagtagttcttttgctcctaaagaaaactgctttacctccctgatagaactgcttattacaaaaatcagtagcaggcctagttacaggtgtgccccactctaggcaacagaaaaagatcaacctttaaaattcttaatgttgctattagaagaatgcttttaccaaatacatttttctcaaaggagcatttttagccctcttgtctgtttctcgtctctcccttttgtaatactcctacagaatacaagaacaaattctcttgctgaacatcttggcttcactcccatctacttgctgcttgccaacagctgctgccttattttagctgtgtgctgaatacttatttaccttatttactcttactctgtgggcataagtcagtttactagattcattctgcctccaaggataaaaggagttaatgaaataagtaataatatgagaggttcatttgtgggatatatatggtcgctgtgtttctttgccttataatagggtttcttagagtttagctctttcccacgtttcagaaactcaaggttccaaagtgatcgatcttcactataacagtgagccaactgtaatttgtgagggagctcccccaaagttacatattttaatgcaaacagatcatctaatcttttcctgaagccttagcagtttttctgctacaagggtttttaacctgggatccacaagagtccaaaaatgaatataaaatttttgttcttgtttctatgtgcatttttctcaagagaacattcctggcttttattgggtcctctgaggaggaatgaagaaccatggcaggtgcagtttttctctttagaattgtgagcaaatcttattgtctgctttgctctttttgcttttttttggacagcatcttacttcgaggctggagtacagtggtgcaatctcagctccctgcagcccctgccttttgggctcaagtgatcctcccacatagctagaaatacagacgtgcaccaccacgcccagctagtttttgtattcttagtagagatgaggttttgccacgttggcaggctggtcttgaactcctgacctgaggtgatccacccacctcggcctcccaaagtgctggaattataggcgtgagccaacacacccggcctgctttgcttttttgatgaatactgttttctactgttaattcatgttaccatgaatttaaatttcaaaaatttctaatcttaatctttatccttgagaatatttttaatgtatacaattaatacaattataaaatatatttaaaataatacaacatatttaatgcataagaagataaagtaaatttaatgttcaaggtttagttcatatgaatctattttaataatgacacagtggccacagagaatatatgtttcttaatatgaatatatgtactatttttagattccttaaaccttaattaagaagccttcagtttgttcattatcctaagtaaatgatatctgagttatttttctgttgctacattttcctgttcttaagactaactttggaaaacatccaaataatagcacattcctacatgaaatgatctctttgagcttcatactagttttcctttaaatgtgtatagaaattgctggtgttttatcagttagcttatgacttcccatggaaatctctggttgaactggctcttcattatagaattagttcctcagaaggtgagtgctctgatgtggtaaggttatgcgtcgaataattctgagatggttgctagacatagtaatgttcattatcttcctagaaaaccccagcaagtgacttgactaaactttcattttaattgtgacactttgatttctgaatatatgtcatggttctaatttcgtaagcatgaagctcctgtaatgaacttcttggagtgaccgcacggtatcagacaacataggattgggttaggaatagtcttatgtctttcatctccctacagggaaattggtctttaaagagatttaaaatggaccgccagggtgtaacccaagtgctgtctcgcttgtcatatatatccgcactgggcatgatgacaagaatctcttcccagtttgaaaaaacgagaaaagtgagtggtcctcgctccctccagccatctcagtggggaatgctgtgtccttcggacactcctgaaggagaggtaaggaatctgaggagtcttgatgctgtgtaagaggcgatacctatgtctgtgcatggggtggggtggggaggtctgcttctgttcccatctccaggccatatcctttctttggtctgtcatttatctggcaaataaatattgacatgcttggaagactacattagtatcattctaaaactaggacctgcagaagcatttgattcagtatgttagctaaaagtaatatagtccatgtttctctttattattttagtttatcccaaaatcaaaacatgcacagaggggataagactgtgaaggcagattgaaagacctaccacctctcatgctcatgaggggctctttttgagcagctccttattgtccttaggtaggctcagtcacagccaattaggagtatacagtccatgacctaatgtggattttgactcacttatattggaaacacaagcaattgcctaaacatcaagccagggagtttacatgggtttacttctatagcacccgctactccctgtgtcacggtcctttctcctttgtgttaacattgttagtttcacttgattctattccttctaaattgtaaaattctggaggaaggaaggttcaccattgtatctcaagctcctaacatagagccttggttagagtacaggccccatgaatatatgctgaattaataattacaacaagtaaaagatgtagggtccaaagtgtaggaatttattatttggaagagatgaaaataggagtctgtatagagctgcgatttttagaaactatttaatttatcttaaaccatatggaaattgacactaaaattatccagtttgtcaaattttgcataatttatatatcttgaactttgaaacatttcatttcccagagattgcttcagctaacttcaaaaaagtagctattttgtacattactgcagcagatggttctaagacctgaagatacaatcttacaagtcacctgtcttaagtatttttttcctatttgctatattctgtccttgttggtatttttgttttagaactgtaccgggttgcatagatgtttaaaaagatttcttttcttttcattttgaaatarttttagatatacaaaaaagtgatgaaactggtacaaagattttccacaatctttcatctagattcccaactgtgaacatcttatgtarccatagcactgttatcagcctcatgacattgaacaatactataatctatggatcttattcaaattttgccagttgtcccactgttgtcttttttctgatccagaatcacacattgtttttagttgtcatgtctccttgtctcttttcatctgaaagagtttttcagtctgtctttatttacctttcgtgaccaagaaacttaagggcactggccagttattttatacagtctctcatttcaggccagaagttttatatttttatgtagctgcatttattaatgttttcctttacttattttatacartgtcatcataatgactgtaatgttccaatgtctgggagtaattgttaatgtaatcagttttgttgggcatttatgatgtcgtcagcatttacaattacaaatagtactgtgctgagcatttctgtatctaaatctattttatatccttgcttgttatgaagagaaattcccctgagttaagggatatatatattttttaaaggcatttgtgcgaatcaccacagtatcccctacaaagttgtactgctttgcattgctgccagcaaagtagtgagctattttcagatgtaaactgtactttgtattactaatgttcattcttagaaatgaccatcttttgttttttaggcatgtggtttggttaaaaacttggcccttatgacacacatcacaactgatatggaagatggacccattgttaaattagccagtaacttgggagtagaagatgtgaatttattatgtggggaagagctctcttacccaaatgtgtttcttgtctttcttaatggtgggtatattatagagacatgttggtcctagatagtctgtgaagagggggagggaatccattattatcctggtatttaaagcacagatagactttaattctgggcccaggttgaccttcacttaaaggtagaaaatacaatgataacagaaacagttactttgttggctgggttatccaaggttctgagaggatatagctatcagagctaaagggtaactttgcagaaagtggctgctttctccccttttgcagttgctggcatatccttagtggaatacggttcaacatggtatctttaagtacaagtcaaatattggagtcattctgcaaaaattatcagatcaactcttataatgaattgactttgtctagccatctgataatcaatatgtcagcagcctgtgataagaggatccctctcctttggctcacactccagttatttctttcatatacctcttcccgtctccttcgaagtcttccagagacttagcagcaagtgtgctctcttcctttctgcttttgatttggtgctgtgtgcctgttctctccctagtatgctccatgagcttatcccttatcacttgtctgttctctcttcctctcccccttcctctcattctaggaggcattaactcttttttatatctgctggtgaggaaggggtcagagcctcagcagggctgttaactgactgcctagttcattgtatcccagaggctaacattgagtgagcttttactctgcactttcacccagtgcctctttgaatcctcccgctaaccttgggaagcaaagttcattttcctcatttcacaaatgttgattacaacaagaagcagtttaataatagcagttagtaggtgctaggcagaattctcagtactttaaatgatcagctcgtttaacctttactgccagcctgtggaagtgatggagccagtgttcaaacccaggttgtttggaccccaagttcatgccccagcactgtgctgaaagatgaggaaaatgaagctgacttttccagtattcctcagcctgcatgtggaaggactggcccttaagcattcttcctttgttgcttccctgcaaccttgtggactggctgcaggtgttaataatggtattttcaaataactgcttagtgctgattactatttttattggttggatatattaaatcaggttgcatttattttttatttctgtcttacctgttctttctttttgcctaggtaacatcttaggtgtcattcgagaccacaaaaagctagtgaatacatttcgactcatgagaagagcaggatatrtcaatgaatttgtttccatctcaacaaatcttacagatcgatgtgtctatatttcttctgatgggggaaggctatgcaggtatatatgcaggttactaaaaagagtttttaagaatctctttatatttgctcttgaaagaaatagacttgtttttatttttgaaactgttttaacctctttcattgtgaagataaatttaattccktgagcaaacacttcatgaatatgcatattaggtaccgaggattcagattaatgggagacagagtctgccctcagagagctcagtctgccgggaaaggcagaaaaaatgactaataacaatcaactgtggtagtggttaatgctagccaccatttgtcattttaatggagacactatatgtgtaaggctttaacttcttcattcaaccctatgaggttggattattcttgtcatttaagaaatgaggaaactgaggttcagtgaggctaagtaacttactgaaagctaaagagtggtggaatctgttttttatttgaaagtccttaggattcgtttgacgcatgattttgcccactatagtctgttgctacaaactgagctttaaaggaggagtaggattgtgttaacttggaggtaggtggggaggagaaaggctgaaaaaaggcaagaatgaaaacatggaggcatgaagaaataaaataacactagatccaatggaaaagtaggttccttttattcattcagtaagtatttattaagggcctattrtgcacaggtactatctaggagccggaggtacagagacgaatgtgacatggtgtctggtttgaggggctatgcagagacatcagctgaggacattgccttgtgtcacaagccttttctagcattaccgtagttattctgtgtatacctcgggtagtgttgaagcacaaggcagtgagccagcagtagctggaagtctgtcagagctgggagagtgactgcatgctttctttcctccagcatcctttcctccttcatatgacactacctcattttcttttgaggactgcctgtccccattggcaggcttcttgggatggtcagtccagcaccctcttctcttcagccaggggttgggcatatgacccaaatgaggtcagtcagaccccctcatcagagaatttgaatcccaggtaaaataaatcaagggagggaggtggttggacttgattcattctcccagtgctacatgcaagagactgcctgttaaacctcattttctggattcttggaactgctctcgttccttttctttctgaggctgagcatttcacctttttctttgattcttatccttccattaaattatttttttttttttgagacagagtctcactttgtcacccaggctgcagtgcagtggtacgatcttgagtcactgcagcctccgcctcccaggttcaagcgattctcatgtctcagctccccacccccgtccctgacccagtagctgggattacaggcacacaccactgcccctggctaattttttgtattattagtagtgatggggtttcactgtgttggccaggctggtctcgaactcctggcctcaagtgatccacccacctcagcctcccaaagtgctgggattacaggtgtgagccatcgcacccagcacctgtaaattcttaatgcttccagtaaacttcatttttgcttaaattagccagaattggtttctcttctttgcaaccgaagaatggttagctgatgatatacctgtgtttgaatcctaacttcccacttactgagttgtgtgactctgagtatactacttcagtctctcagccttggtttccttggctgtaaaatggaaacaataatgcctgcctaagattgtcctgagaactagttgatagaaggtgtggtaagtgctcagtagggtgccaggcacacattaggtgcttatttataacttaatagcatggtccagttaagggcaggaataacagtgacattttctaggttactcttttttaggatttcattacatccaacataatatatattcaaaaataaaactcttttatagaagcaactttataatggcataacagatctagcaggaaaaaatagtagaatgcgttgagtaacgtaaggataactgaggcagctaaatgtgatcccctccctctcctccgccggtttctgtcttctcatctgaggcttaacctgaatccactgcagcgctcaaatgaggcattagtaggctctgcttccctaccaagaaggagccagaatttcgaggtactgtggatttccatgaaaagctcacccagttcatttttcaacaacttgtgttccccttttgtaattgtgcagctcctcttcttaactgttgaaaagtgctcattagtcctcaaatagttatttggactttagggtagagcgcacaagtgtctggtggttacttgctcctctctgtaagagctgcttatccaaatagcaacagcccttgacgtttcagtgccgcatgccatcctttgtgtccgggtttcctcatggtggcaaagccctccgaggcaagtccccactgacagttacaggttaatctgccagaatgccttctccaccttccacccattacgtcactgaaaaccacaaagtaagaaagcttcattctctgccaacttttagccactctctttggtaatgtgtagctttaagtatcttgctaacctagctcagtgatgtttagactaaatcaaactactctaaacatctggatattcatcagaacctcacaacacaacgccgttattaccctaggtgacagtgcttctttgcctgttaactccatgagtagtatgcaaaattttccaatgtgaaatcgggaagtttttagattgatacattacaccgttttttaaaatatggcattaaaggttttgtttccttttcagactttgagtatcatttttgtgttgccttttcattcaaaaccaaatgtttcctaagatacttgcaggaagcactgtgtgtgtgcatgaatatgtccacacatactcacatgtacacatgggcttgggtatgtatgtgtgtgtatgtgagagagagcatagtcccctacaccatgctcatccatacaaaaattacctggtgtcctcagcaatccaggaataggtttgtttgtatttacatcttccctcatctcactttggtaaactaacttgcctgtgtaatttttccctggaactattattaatttggtttgctgtttccattctagaccctacataattgtcaagaaacagaagccagcagtcacaaataaacatatggaagagctggcccaagggtacaggtaagtagccaaaagtaaaacttaccaatctccttaatacccacatacatgatttaagaaaagtgtattttcattttagtgttttaatttctttccaccaaattaccagcctgttaaaaacctattttgctccatgtgaacttgcttggacattgtaaaatattcatcaatttagatcatgagggttacctagtcttgatgtcagttagtacacaagtaagtgtttctggtaagaaaaggacttacatcatgtgtcagtgtagacactgtgggtctcattatgaggtttctaaggtcagaattttttttttaagaagtggggactaggttcacaagagttacagacagacactttgctgtttttatttcagcartttgtggttactgtgtgagctaagaataacatgtttcaggtatcccaatgtaatgatattctctgggagagaaaggtgctttgggcctaaacgaaagccagtatctcctgttattatataaaatactgcagaaaaatgctttttaatgatgtctctttcaccaatattttcccaggaattttgaagatttcttacatgagagtctggttgaatatttagatgtgaatgaagaaaatgattgtaacattgcactgtacgaacacacaattaataagtaagtaggatccatagcaaccataattaaaacgtgttctgactatagaaactaccttctcttttactgtcatcttcagtccttctatcttttactcttttgacaggaactgttagaaatatacaatcttcttttttttgtttgaacatgcaggtttgttacataggtaaacgtgggccatggtggtttgctgtacctatcaacccatcacctaggtattaagcccagcatgcattagctatttatcttgatgctcttcctcccccaaccccctaacagtccccctggtgtgtgttgttcccctccctgtgtccatgtgttctcattgttcagcttccacctgtgagtgagaacatgcggtgtttggttttctgttcctgtgttagtttgctgaggatggcttccagcttcatccatgtctctgcaaaggacatgatcttgttcctttttatgactgcatagtatttcatggtatatatgtatattgtatatttctgtatgyaccataaagaaatatacaattttatagcagagcataacgcatcatttatcctagtgaagagtattacaaagcagctaacaagtcatctttagatttaattatccttcctattcgtgtgacagtttatatatatacacacacacactcatagaaagatatatccatatatccatatagatagataaccatatatatatatgtatataaaaccatatatatgtttttttttttttgagacaaggtcttgctctgtcaccctgaaggagtacagtggcacaacatagctcagtgaaacttaaaactcctgatctcaagtgatcctcccacttcagtctcctgagtagttgggattacaggcatgagccaccatgcccagccttaatgtgtattttttaaaaggagttgcttctctgattttaatacttgattactgccaaagttgaactaatgaatcaagctgtataaaaatatacttacctctgttagagatgatttttgtccatggacatctgaattcttgtcagtgcaggaattctctacatagtctgttcaaaaactctaagtttatgtgcagtatgcacttgaattggtagtatgttcacaatatttcttcttgaacaatgatatttttagaagcatctgtgttccattttagagtacattaaagaacatctatgtaacttgctgtctgatgcatgtgactgatgtaccacttacctgaaattggaattcttgcagatatattgctagagagtttaatactaccacctaataactatttatgtcttcaatcaagaataagtacttttctgacccagtgtaatggctcacccctataatcccagtgctttgggagactgaggcaggagaatcgcctgaggccaagagtttgagaccagcctggacaacatagcaagaccctatgtctaaaaataaaaataaaaaattagctggacacagtggcacacacctgtagtcctagctacttgggaggctgaggtggaaggatcatttgagcccaggagttatgggttacactgagctatgattgtgccactgcactccagcctgggtaagaacctatctcttaaaacaggaaaaagaaaaacttttctgttttctgctaccaaatgaaatatattactttttagaagattataatttaccagcctgggtaacatggcaagaccccgtctctacaaaaaacttaaaaattagccaggtgtggtgatgtacgcctgtagtcccagtaactcagggggctgaggctagaggattgcatgagtccaggaggtggaggctctgtgagccatgttcatgccactgcactccagcctgggtgacaaagcaaaccctgttgccaatatatatattgcaaatatatatattttttgcactttgtaaatagtggtttttggtcagaatttttcttccttaaagatgtgaatctctcaaagtgctattttatacccctcatttcaaaattgactgagggccaggtgtggtgggtcacacctataatcccagcaatttgggaggctaaggcatgagggttgctggagctcaggagtttgagatcaacctgggcaacacagtgagacctcatctctactaaaaataaaaaaaagttagccaagtgttgtggtgtgcacctatgatcccagctacttgggaggctgaggtggaaggatcacttgagcacagtttgaggctgcagtgagctatacttggaacaccactgcattccagcttgggcaagagagtgagacccttactcaaaaaaaatatagatatagatatgtatcctgagtataaaagaaaactattttatagtagccccataaatgacagttccatcgttgtattactcaagccaacaaaactgtctatttccgtcctgaccctttttctctatattgacatcaatccctagctcatcacatgagccttccaaatacatctggaatctgaactctttttcactacctcaatccatcacctagtccaggccatttgtatgtcttacctggatttttgcaaaggcctcctgactattttgacacctgttcccatatagtcttttcctaatagagcagagggggcatgtccgttctcttctcaaatccctcaggggctgtcggtctccctcagaagtccttacagaagccttccagttcctgcacaatctgcccacttccatttctacctctccccactccctgtttcaaccacactggcctcttctccaaacactccaggcgtgcctctgccttagcacctttgcactggctgcttcctctgcctggagcactctctcacatacctgcatggctcactgcttcaccccctccaggtcttcacttaggtgtcaccttctcgtgagatttttctgaccactctagtgaaagtagaaactcttatctctatccactcctctttactactttttttttttttttacttcttgtgcctattaccatagagtaaaattggtattttactgatgtatctatgtattgtctatcttccctcacttagaagcttcacgaaggcagggattttcatctggtttttcattgatgtaaatgaatataactctcagcgttacccaattaccaagctattccatacgtcaaattaatttcatttaaaaaatctagaagtttttgtattatttaattcatacttatgttttttaaaatatagaaatgcatgaagtacaaagaatgaatccccttcctttcccatcccaccagactccaccctccagaagttgccgatgctaataatttcttatgtactattctagattttttttctgagtacaaacatacacacatgattccacacaatgtgtgtgtataaaacagtgataacatttccagtgccttgattttgaaacttaaccagtatactctggacattttccatattagtatatatatttatatacatgtatatttgtatacacagtcttatgtcacttaatgatggggatgcgttctgagaagtttgttgtcaggtgatttcattatgtgaatatcgtagtgtacttaaacaaacctagatggtgtctgtcacccactgtcacctactacacacatagactgtatgctaaagcctattgcttctagactacaaacctgtacagcatattactctactgaacattgtaggcagttgtagcacaatggtaagtatttgtgtatcaaaacatatctaaacaaagaaaaggtatagtaaaaatgcagtattataatcgtttggaaccaccaccatttatgcagtctgttgttgaccaaaatgttatgtggtgtgtgactgtatacatatatatatttttttaattgccatttgttattacattatctacctacacacatttagtttattaactagtttcctactgttgaatatttaggtagtttccaatttttctactgttataaacaacaggttatttagttttcattcgaactaaatttaagtgctttatacacagtgaataagaaatctcggctgagtgcagtggctcacgcctgtaatcccaatactttgggaggccaaggcaggcagatcacctgaggttgggagtttgagaccaacctgaccaacatggagaaaccctatctctactaaaaatacaaaattagctgggtgtggtggcgcatgtctgtaatcccagctactccggaggctaaggtgggagaatcacttgaacccgggaggcggaggttgcagtgagccaagatcgcaccattgcactccagcctgggcagcaagagcgaaaatccgcctcaaaaaaaaaaaagaaagaaagaaagaaagaaatctcccaattcctgttcagtttctaaactgatgattttaaagagaataattttttttttttgtaaagtcagaatctagagtgtttggacttccagtaattattagatactatgtgagtttatgtatgttgtcaccataagagaaaaaaacttcagatatttcttttcatttttcaactcaatccaatgttaacatctgaaaaagtagtttttacttagatggaaaatgtcaacttggccaatatttaaacaaagcagtatatttaaaagaaaatctgttttcttctagactataaaatgtagctataagctgatgttctttaaagaaaaaagcaaaacaaaacctagagtattttcccttcctgcttaacaaaggaagtcttttcccttcctgcttgtctgagaggattggggttctgctaggtcataaggtgaaaacagtactcttcaaaccaagaaccacatggaaggcactttctctcaccaaactagggacataatttaatacatgtgttttggaaaaaaaaataggttaataactggataagtgggagatcttttaccaggtacattccattgatgggctgggacgtggtttcttggacatcacttcagtccacaggtgctgtaaaccactgaaattcttaaggttacacttcacaaacacttgagggaaaaatagcgggtccacagagatcacagatcctggatgacacatctggtactttccacaaatacctataattaatctgggtactctttcctattaacacatctgagtagcttcatcatttggccaaaaaactgaattttctgcagaaatatattatgaaagtaaccaagattctgacatctactaggtaaaatcttactttgtgtccagtactacccatagcagagctgtccagtaaaataaaatgcaagccacctatataacctcaaactttctaatagccacattaaaaaggtaaaaagaaactggtaaaattattttgaataatagttttatttgtcaacatatccaaaatattatatcaacaggtaattaatataaaactaatgagctattttacactttttttcytactataagtcctcaaaatctggtgtgtgcttacagcacatttcaacttggatgccaattttttatcagaaatactagatctcatttcataacatttacacttttaaaagattcataaatgtgagttgttccaagataaaagattttatataactgaactgagttacttaaatttcaatttgagttttaaaatttaaagtaattaagtaaaatttaaaaattcagtttctcagtcacactagcccggcatttcaagtgctcagtagccacagttatctagtgtctagtggctatggtattggtctctgttggtctatagtaactattcttttttttttttaagacagagtcttgctctgttgcccgggctggagtgcagtggcaagatctcagctcactgcaacctccgtctcctgggttcaagcaattctcctgcctcagcctccagagtagctgggattataggtgcccgccaccatgcctggctaattttttgtattttttaagtagagacagtgtttcactgtgttggctaggctggtctcgacctactgacctcaagtgatccacctgcctcggcctcccaaactgctgggattataggcgtgagccactgcatccggcctatagtacctattctttttttttgagacggagtctcgctctctcgccaggctggagtgcagtggcatgatctcagctcactgcaacctccgcctcccgggttcaagcaattctcctgcctcagcctcccaagtagctgcgactacaggtgggtgccaccacacccatctaatttgtatttttaatagagacagggtttcaccatgttggccaggatggtctcgatctcttgacctcatgatccacctgcctcggcctctcaaactgctggggttacaggcatgagccactgtacttggctagtaactgtatttaaaggacgtatattccactcttaaatggtgatacaacctactcattgatatatgttagaagaatgaggaaaagcaggctagtcatccatgtgaatattgttgatgtatttctatgtgttgaatatagtaatttatgtgttaattacaatttcttatgttttactgtattttatttaagtatgtttttattttaccagttttactagcatcaaattttattgacatataaatccctggaggacctagataacaatatttttgtaccctttaaaagacatttatttttgtacttgatgcttaagatatgtgatttttacttaacttrttagagacaccacccacttggagattgaacccttcactcttctcggcgtgtgtgctggacttatcccataccctcaccataaccagtcaccgagaaacacttaycagtgtgccatggggaaacaagccatgggtaagatttccttcttgaaagttggttctaaatacttggaaatacttttggaaaaagccttacatctttattcctgcttcaccagtaytatatgttcccaaccaggcactgggaacacctgagggttaccaagcccagggagttgcctatggaactctgcaaggcttggtgccctgctatgtctaaatcttaaacaaaaaatggagaaaacctctctaaacttgtttccttcaccaaacaaagcaatgtgtaataagtgtcacagaattaagagggataaatataaagagaaaagccctataagatgtaacttgttaaccttgagagaagggagaaagggcagaaaaactcaaggttaaggaggaagagggagaaaaaaataaagatgtacgatgtctatttgagtgtacctagtaattgcctgattgacaatccccaaacccattatacccttgcaattgctagtgtatctcctaaaacttatccaattcatgtcacactgatttctgagtttattttccttcctctttctctttgtcttctctttcatctattaatttatttattcattcatttgtaacatttattgagcataactgtagactagacatgaggctggagcctgaaaatagagagatgaggcagagccctgtgctcagggagttcaaagtctagtaggagagaccaacaaataaaacagtaacscaatctggtgtaataaatgctgtaattgacaaccaaaatctaagaaaattagaggaggaagatcacttaaagtgagagtgggttttttctgaagggtagagctgagctgagtcttggaagactgagtatttttgaaggtatgaaagtgtgaacaagtatggcataagaggtctcagtactttagtgtggctgcctagtgtagcatggtacagaggcgtgaaggggaggtgccatatgttgaggagtttgagttttatcttgaaggtaatacagagagaataccagtgccccctgaccccgccaaaaaaaaagttttacttataaagctttttgaaatgttttaaaaaatcatttaaatcctaatatatttagtaaattttattttcatatatgcccatgacaccaatatgattgccatctctgatttaaagtatgatacaaggagcttcataaagaaactgtaaaaatacagagagggaggcattgcattgcatttgggtaacaaccagaatgcatttagctcctccattaccaacaaccagctgcaactgaccatagcttggcaattaagaaaccctatttcttcattatggatagagagtagatatatttcttttcaagtttttatattgccctctggttagctacagagaaataaaaagcattttatcctgctggtatttacctgaatgatgtaagcctggacagttgagaataattcccagtgggaaaatctaaacagcagctcatcaatttagcctttcccattcatcctcagtagcggtgtaggctgatttcccgcttgtgcttctgacttgctaacaagttgaaatatacagtactgaaccctgtgtgtcatgaaagggctatcacttctattgggtttaccaaaccattttgtttcatgatgtgaatcccagctgaaacaatacaccttttgtgtagaaccttcagcagaattaacggaagactaatcacttcatcgctaatgccactcttcagtgtgtttgaagatcgaaacagagctgcaactatctctatgtagtgaagcttttttaaaaaataaagaatagacttgaaagaaagaaataatatttttatttttataactcctctccccacaaaaaaaaaaaaaaaaagaaaagagaaaccctttatatgtggcaatgagtatctgaaacgtttggttagttaccacacacagttaagcaggatcagtgtgtacagaaagccagttcagtgtctgtagagttcttttgtagttttctgtgtgaaggttttttttctcgttttgttttgagtgtcatttgcaattcattgtctgtgttttctgaggttggtgtattcagctgctctgaccctgggtcctgcacatttagctccttggatacaatcctctgacgttactgctgacgctaggaagacaaaagccactgaatatcttaagtaataaaaaaaagcctttgttactgtttgttattataaaacacctgactggaaagaaaagcagcgagataaaagtacatttagagttggcatataatgyrgcagcatttctctgtggacactgaaatagctgcagaagtattgagcaaagtctgcttgaaaaatgacaaaaggaaaaaggtcagcagagggagaaaacccacagcagatacccaggtctgtaatgcagacttcgcactttgagtaggacttctctggatcgttttaattccttgcagtcttgacagctgacaactaaaactcatactctatcccatttttactatgagccattgctaaacattatttaaattcagagcttctatgtggattttctaaaataatattttagttggtattcatctgtctgctggtccatgtataacgtgcaagatagtagctcagaattaattcactaaatattctagccaatctggaaaatttgctctctaccattccctactatccctcccactccccctacaagagagtgaagaaatgagagaaagtcattttctatcactacgaaggagaccaaggccagcacaaaccacagagatggaaagccttaccttctrtgtaagagagctaatccacgataaaacaccagcagagggtgttttttaaatcttaggcgctttattaataaagttcgagtttccacacagcatcttactgtgccactgagaagcacttctccatgggtatggctgtgtgtgtattgtgacatggctcagagcaagaagtcaggtggacatctggaaatggctggatctccaggtcactcgctcagcactaccaggaagggctgtgtgttggagccgcattttgtgtcctctcatcggcacccgatgccaagttcacatgagccacactttcatatcctgcccatttattagttggcagtcctctagtggaacactttctcctgtgtaaaggatcattcagttactatcagctcaattaatgaatatgcagcacagaccttcccagacctcaacagtggcttcttctcactaccccttcctgcttcaacttcaaactactgggactttttttaaagctcaggagtgaatgcagcttctgtttttgtgtttgtttttaatagattttattcctaagtagatagtttcttcctttatgttccgcactttacagtaggctgagatgcactagaaataggctggagaattttgagacactaaaaacacaatatacaaagatcctcataaaattttgtttcattctacacctcctccccctttctgtttgatttgatttttagcatatttattctttgtccgtttaagggtacaaaatgcaaaaaatgttctggccaaattacccctggaaattattttttgaattctgctattggttaaaagtttttttaattattatagctattttaggtttaagcttatgtggtatttcctaagactagaatgttagcgatgaatatatacatatatatggaggtaaaattgagtacactaagtttagtatgtaggtttgagtgggaggtagaatggataatattacagggtaataaggtatgtatttttattattactaatattgttaatattggtcataaataatgttgccacttactgagtatccaaattctttacatacgttatttctttttttttttttttttttttttttttttgagatggagtcttgctgtcacccaggctggagtgcagtggcacgatcacaactcactgtgacctccacttcctgggttcaaggaattctcctgccttagcctcctgagtagctgggactacagatgcacaccactatgcccagctaatttttttttgttttttagtagagacagggtttcaccatgttggctaggctggtctcgaactcctgacctcaggtgatccacctgccttggcctcccaaagtgctgggattacaggtgtgagccactgcacccagcccatttttttttaattacaataataatcctttgaaatataayacatacttttttttgttctgacaaggaagctgaatcccagttttgttgagtaacatataaaaggttttctatgtcttctatgtaatgttacctataaaacttactaacattcttctcaaccaaaactaacttcttttctcatttttttcctgtccattgtggatcacgatcaggctgccttttctggtagaatgtaaattatmagcccctcgaagtcaggagctccgttayttattacaggttgaatatcccttatctgaaatgcttaggaccaggagtgtttcagattttggatttttttgattttgaaatatttgcatatacataataagatatcttggggatgggacccaagtctaaacacgaaatccgtttaagtttcatatacactttatacgcatagcctaaaggtaatttatacratatttttaataattttgtacatgaagcaaagtttgactaagttttgactacaacccatcacctgaggtcaggtgtggagttttccacttgtggcggcatgttggcgctcaaaaagtttctggtttaggagcattttggactttggatttttgactaaggatgctcaacctgtgctgcagttgactcttgaacaacacagaggttaggagcaccaactcctctcacagttgaaaatctgtgtataacttttgactcccctaaagctaactactaatagcctactgttgactggaagccttaccaataacagtcaattaacacttattttgtatgtgatatgtgttatatactatattcttacaattcaaataagctagataaaagaaaatgttattaaggaaatgataaggaagagaaaatatatttattgttctttaagtggaaatggattatcataaaggtctttatcctcgtcatcttcacactgagtaggctgaggtgtagaggaagggagagattggtcttgctgtctcaggggtagtaaaggcaaaagaaaatccatatatgagtgagccctcgcagttcaaatccatgttcaagggtcaactgtatatcctttgtgtctagcatagtgccggcttagtagggaatatagtaagtcatgtttcaaaaatgaatgaatgaatgaatctctgagaatattaaaatcattaaggaatcaggggtagatttttgaaaagaattttgaaacaaagaataagttggaggatttatacaacctgattttgatttactataaagctacagtaatacagtatgatgttgacagaagggtagacatataggtcaatggaattggcatcaagagtccagaaatagactcaaacatttatgggcaattgattttcaatgaatgtgtcaaagcaatccagtggagagtaaagtcttttcaacaaaataaatatctgtatacttatatggaaaaaaggaacattagctcctacctcatagcatatgaaaattaacaaaaaatatattayagccctaaatgtaagagctaaaaccgttactcttgaagaaggaaacctaggtgaaaaccttcatagcttgagttgagctaagatttccttacataaagagtacaaagtataaaaattgatcttctcaaaattaaacttttgctcttggaaagatactgttaagaatatgaaaatgcaaaccatagaatgggagaaagtatttgcaatacatatatctgataaaggatttgtattcaagtatatataaagaacacttcaatagtaagacaacccaattaaaagatggacaaaataaaaacaaaaaccaagcacttcacaaagttttggcatgaccaaataagcacatgaaactgtgttcagcattattagttatcaggtaaatgcaaattaagacccctataagatactactacacactcagaatgattaaaattaaaaagactgacctactaagtgttggtgaggatgtggagcaaccagaatgctcatatactgctggtggaaatgtaaagtggtataatcactctggaaaattctttggaatgttcttaaagttaactatacccttgccaaacaacccagaaattgcattcctaggtattaaatatttacccaagtaatgaaaaaacatacaaagacttgtacatgaatgtttatagcagttttattcacagtagccaaaaactgcgaaacgatgcaaatattcatcagcaggtgaatggataaacgaagtgtatatttatacaatactaagccataaaaagaatgaagcataatattcaaccatatgcataaatctcaggatcattatgctaaataagcagatactgtataactccatttatataaaattctagaaaatgcaaactaatctgtaacaatacagaacagatcagtggtccctgaggtgaggaacaaagggagggatcttttgggggttaggaatgttctgaatcttgactatagtggtggtttcacaggcaatttatagtgcaaccttgataaaaagttctgatatatgtatatcagaactcattaatttgtacactttaaatggatgaagtttattgtattcaataatgttgatttaaaagaaaattgaggccaggtactgtggttcatgcctgtaatttcagcactttgggaggctgaggcaggcggatcacttgaggttgaggagttcacctggccaacatggtgaaaccccatctctattaaaaatacaaaaattagctgagtgtggtggtgcaagtctgtaattccagctactcgggtggctgaggcacaagaatcagttgaacccaggaggcagaggttgcagtgagtcgagattgtaacactgcactccagcctgggtgatggagtgagactctgttatttaaaaaaaggcggggggggaggagaggggagggaaggagaggggaggaaatttggcaaaggaagataggaaaaaatagctaaatgcataaaacttcattttaattttttcagcatacattttctaagctgtttacatccttccttaccaagctttttcatgctgccttataaaagagcactttttcaatattttaacttacatttgtttaccttgtagtgccagcttgtgacttaagaaagttgttatcaagaaaatagggctttttagaaagattatgccttagtaagtaaagggaatcattggagaccatagtacagcaaaatgggataatagaagtagaatgcaacttatagatattctccttgtgttattttatatgtgtgtatatatatgtaacgccctttttaaggaagctgaaaatactaataggggaatcaaagtttgagcgtgtgctgcacacaggcaagccctatcatttgcttgcctgttgcttattggcaaaatggttagtcagccattcattatttttataaacatttgggaatctgatagcattttgaagttttatgatatagaatagtttataaattctattttaacattttaacttacacacccatagtcagtgctgctaaaaatgcacgtacatgtatactctcacaagttctttaaaaggcctttagagaaaactttttgatgtcataagcactaaacatttgctaaactattttgctgttcatccattcagtggtcagttgtaatgcctgagaattatgttctgggcctggtagcacaatttatagcaggatccagtctctttcaccattgtttagaggtgcagccatttatgcttccctgctgcataataatgcgtgtctcaggtttcagaagacatgtttggcagcctggtgggacattgcctgaacccttgtctccagctgagtaaggtatacaattggaactgaaatctcaacataaattttaagtgatttcataaaaaaggacaaacttattgtcagtgaactttaccataatcccagcagtagtaatcttatttctaaaacagtaagtgatctattgccaggtatcctgcccagtttattagttggcactaaaataacataaatcaattggcaatttatagtgcaaccttgataaagttcatgagtttcagtttgacttgtttttcagctgaatctttttaagtttttagagatttaagcacatactgtcataaaaagtataatagaattcttcaatttaatttgcttgacatttattgagcatctataataagcatggcactgcactaggtattccctacatatgtactatttctttcagtagtaattgtcaagtaatttttgctgcttgaatggtttattttctttttcttttcttcttttttttttttttttgagacagggtcttgctctattgcccaggctggagtgtagtggtatgatcttagctcactgcaacctctacttcctgggctcaagcgattctcatgcctcagccacccaagtagctgggactaccatgccccgttaatttttgcatttttagtagagacatggttttgtcatgttgcccagtctggtcttgaactcctaagctcaagcagtccacccacatcgacctcgcaaagtgctgggattacaggcatgagctaccacgcccagcctgaatagcttattttcatccccaaaatgaaatcatcattgatttaatgacatgagtatggagaaaaagttaaaggaaataaatactgagttttggtgtctgcataccctagggtgtaactctgtgaaatggcacttaggtacttcggagtgtgtgtgtgtggtgtgtatgtgtcactatggaagcgtgtgcaagagagagagacttaaagctgccttagctattcacagggggagaaaagagatacctaggagaarttaaagaggctcagtagcccacactcaagctcagcagtagagcaagcctgagttttccaactttaacatctctttgtagcatcagttctgtgtccacaagccgaggagactgaaagactcatcttcaggcaggtgcatgaaccccagtgtgtttataaggggaaatgagagaaagggttaacattctgatttcatgttcagttgacagtgacccaataacacccatccgaggaacaatcaggtggaaagactgattgctaaggaggraagagcccacccctgattgggctgtaccctagatttcttaaggaaggggccaagccttttctcattttatctccagtttttggcacagagtagatgtttattaactgcttaatacatgaatcatcaaataaatgcataatccactcttccttgctctcacttgaattcctctttgttcattctttttcttcccttctctcctgtattctttttcatttagaacttttgcaattatttctttttatggaatatacctgtttatccattttataagctcctcggatgtgaacactgggcgttgttcttacattacctctccccagcaggcctggaacacggtagaaccaaataaagaattgttgattgtgaaattaaccagtggaaactaaatccctcaaatgggataatgtaaatccaaaaagtctaaattatttagattaaaatatactttatatttttccttctttgtagaactttaaatattagtgagaaaagttgcttttgcaagttgttaagccaccatgagagtattgcttttgaaatgttgaacctgaagattttgttcattttaattagtgatgttaatgtatttatctctatattcattactaccttattatttcacataatagmatgttgtattttgttttctcccatatcaatgcaggtactataggatacaaccagcgaaacagaattgatactctcatgtatctactagcatatccacaaaaacccatggttaagacaaaaaccattgaattgatagaatttgagaaactgccagctggacagaatgcaacagttgctgtgatgagctatagtggctatgatattgaagatgctcttgttttaaacaaggcctctttagacagaggtaagtgaattttcaaaactaacaccaaagttgctttttgcagaattagatatagggatgattaatgtaaaaatcacttggttaatgtcagttttaagttatttgaattttatgatatagaaacaggaggtggttgggttttgatgttggctttcttgtcatttttaatgactagtatattgaaataatttgttaaacatactactacagaatatttttctcctttattattttattggttacgtgagacaatccttcaaaaagaaaaaaaatgtaagaatgtgtttgttttccagcaggaattacagtatatgaaatatgtgttttcactgtgtctagtgatacatattattaacaacaaacctgtttgagagggcagtagcaatatttggatgtaaaaggctgtttcttatttgtgtaacctcataatttggtaacttctttggccaagtgacgaaagttaaaaatacacggccacaaactctggcgtggagtttttctgcttttctttctgtttttgacaatactttcacaagtcaccacctcrtggtttgttagacatcacctgatctgaagtctgacttctctattcataatctcgatttctctttttccttcctggcgtacccactatgccttccccttccctctttgtagttgctaggcagccataatagtactcctagacatgtgtctttggcattaatgttggccacacttaatttatgcctctttttttcctccaaatgacaacagccatgctttaaaactagatgttttcctttctgattaactggtaacgtttatgtggaaatctgaagactttgtgatgtctgtcagaaactctgcaacccaattcagtgatctgagtttactatcccctagcttttaagctatcacctgtaaataaaatgtctgtttacactttgaagaaaacacttcttgatttcatgcagttaagattcacattgcactccagcatgttgcagttaatggctactgtatgaaatttcaagatcatgtaatgtttccaaaccagctggcattctgagccgagtttattatggccatacacaatttcctaggagccatgatgactacggccttgcttaaagacacaaatgtcttcatctgacgtccaattttagaaattcgttacttcatctcacagtcaccttcatatttaaaaaattacattacagccctgagattttatttataaatccacttttacctgattgatttctaaagtcacattcttagatttctgtttttggtggaaaattgttaagtgaaggattttactgccatgcatttatttcatcagtaataagcggcatttaatcctgagacatttcttatttaagtgaactctggcatggctcagtatatcctgaggagattagtaagagaatccagtttaaaataactgcttggccaaagggaaaaaagaaagaaatgcagccacagaatcaggaaattatagtgttgaaggaatgacagctgttttgggtaactctacaactcatggattttttcttttagggattcagtggttgagtttttttgccccacccaaaggtttttcttctgtcctttttgcttatttttcttccttttcttttctgatccattgctagacagcttatttttcttgatgtttagattgttagttgatttcacagcctttccctcatccactagataaatgcaatctaaaaatgtaattaaactccaatctttagggcagaggagaactatttttcccattgaaataatttgattatttcttttttcattctgtctcttctctggagaaaaattattgtttttacttgttggcttagaacttgctctaaatgccaaattttaaaaaggaaaactttccagggaagtttagcagaagttatgcaccaaaaggatgtgtatcctggctcaggagtcagtggacttgtgctgttcaacacaattctcaactctgctgccaactttttggatgaccttggccacttaatttctctagacctcactcctagtgcctgtaaaacagataggttaagcaggtgatttctaagggcctttccaattctaatattctatggctctgtcctctgaaagaatcacagcgccagtcttagatttctctcaccgttctccagtatgacaaggtgtattccatgcagaaaatggttgtagagattccagtgtttacacagacagtaggtaggggacaagtcctgtgctgcttcttcagattatcagatttttatttggtttgtactggtcccagattattatcaaatacagagaagttttgggatttgggggagggtgaggtggagtggattgttgagtagcacaaatccatatttccttatagctttgggttactggtggttctaatgcccatcttggtttcattttaggctttgggcgttgccttgtatataaaaatgctaaatgtacgttgaaacgatacaccaatcagacttttgataaagtgatggggcccatgttggatgctgctacaaggaaacctatctggcgacatgaaatcttagatgcagatggtatttgttctccaggtaaaagccttttaaaagaaaaaattttaatactttttgacatcatatgttattcaataatatttctgaatatttggcaaaaagggcagaaaaaagtaacaacctataaaaccaccatccaaactcaaccaatgaggtcatttttgatgaatttccttccagtctgtttttctatacactatgtttttacctatcagtaatctatgctaactataattttctagttataattttgaataatagaaaagccactttaaggaaatatttagagtagtttatgtccctgcatctgcactggtatttcttcatttacacatttagcttacagactactttagaattttatccccctgcaaaggtatgactccattataattacaaacttgtaatgcattttgttgatgaaacaaatagcccttgcccttatgggtctcacaggctagtgcaggagactgacattgatcagaggatcatgcataaatccaggttaaggaatcatataggtaactatgaggccattttatagcaagagaatttgaccttgttgggaagatcagcatggctttcccgaggaagtgagctggaatctgaaggatagggaagagttaactaaagaagaggatcagggagcatgttctaagtaatgagaaaagcttgtgcaagggtcccagagcttggtagttgaaaggtctgaaagaagaccagcgtggctaacaagaagagagtgcagggaagcatggtgcacatgagttggtgggtgacgcaaggggtaggggccagagtaagcaagtccttgcaaccatgttagtattgtctttattttattttattaattttatttttgagacagggtctcagtctgtcactgaggctggagtgcagtggcacaatctcagctcactgcaacctctgcctcccagactcaagtgattctcccacttcarcctcctgtatagctgggacccataggcacgtgccaccrtgcctggatagttttttgtattttttgtagagatgaggtcttaccatcttgtccaggcttgtcttgaactcctgggctcaagttctccacccacctcggcttcccaaagtgcttgagccaccatgccgagcccatgatactattttcattatgatcctaaaagcaatgatatattcagatatgtgttttgaatgatcattctgactacagtgtagaaaaaggattagaagggcactaaaatagaaggtagacctggtaccaggagctgtggtgaaggtggagagaacccagtttgtgaggagggaaatccacatgactttgtcatggttggcctgtgggcggtgaatgctttatcaagctgtggttccaaagagacacagagtacgcgacttctcctccctccctctgcctttgtttcttggagaatttttctcaccctaacactggtcagtatggcttggaaaatacgcgctgtgacagtactacaggtagttggtctttgaacttaccaggaagagatacaaagcaaaaatgggaataacagcataaccaaagaaatattttgatttccttgttgcccaagttaaattggtggtggcttattactggttgaaataactataaataaaaataagtgaccaaaacttaacaccctaagagatayataaaattgctatttactgagatgatgtttctcatgttcatgtagtactctgaattattttcttaattttatatagactatgatgtgtgtgtgtgtgtgtgggtgtgtgagtctcactctgttgcacaggctggagtgcagtggcatgaccatagctcactgcagcctcaacctaggttcaagcagtcctcctaccgcagcctcctgagttgttgggactgcaggcctgtgcatctttscctagttcgtaatctttgtattccacacagatgataacgatgtgcctaacacttttctttttttctcaggtgagaaagtrgaaaacaaacaagtgcttgtaaataagtccatgcccacagtgactcagattcctttggaaggaagtaatgtaccacagcaaccacagtacaaagatgtacccataacgtatgtattggttgtgccctggtaatatgtagaaaggttagaaaaagagaagaaatgggagaaattcgaagttaggtcttggcgtgttggagaactagaaatagcaatttggggtagcattacttgtcatggaaaaagcatggcatagaagataaagctagtctatggaatcatataggccctaaactgggtttgaggtgtggaccacataggcaggggttcctggtggaattaacaacaggatgaagggcacatggcataaaagtgcctgggttttggaggatcagtgtagcttgctggggctaggttgtgaaagagttgggaattgatactgcagagagtgacatgataagagtcatatttttaaacagtaaaacacactggccacagcatggcatcacagtatactagaacatagcccagctctagtagacgttgttttgtgtatcttacatgagtaaagcatttaaattctgttagcttcagttttttcatttgtataatacaatgaaagagttagacttgttaatctctaaatttcttctaagctctaaaatttaataaaatatgaacctagtgagaagggccaatgatagtcaccacattgtgatataaaaaccaaactagaagagatatctaacctagccaaggtgaactaggctgagtttaggaggtggcagtgagggtgacataggagaactggattcttgagttgtgatggcagttttacaaatgtattcaatacacagtagctgaggcctgccatgtgccaaccatcctgcctcttgtgccagcgatatagagctgaaataagccacaagcgttgcctgcaatgagtcatatttagttggcaaagacccccacacaaaaaaagtgcaataatgaccatgatcataatagcatattgggaatttacactgtaccagttactgttctggacattttacatgtgttagctcagttaatcctaccagcatcccaggagctatgttctcttagtggctcattagaaagataagatggaagcaaggagaagttaagtaacttaccaaggtcacacagcaataaagggcagcaccaggatttgaagtcatgcaatctggcttcagagcgcttctcttgaccactgtgctaaacccagcaaagcattgtgggtgccacggatttgtctctggaggaggagcaccaaagagaagatgggcagctctgcttaggggatgggtccagactctacactgacttctacagtatgaamagctattttgcagttacagaggtgcctctgctggttggctctcttcccgtcttgaaggaggatatctctttttctgtgcraagttcatctctccttttggtttcttaatttcattcactcttttcagagacctttttctgtcatcttctcttttatcctcccatattttcaacctgtttcctattgattccttctccacaggctagaaaatgtgctcagatactttttacctttaaaggaaaatgaaagtttttcctggtctttgtgtccctttctagctgccactgtattcctcttcctttcactacgaagctcctcagagcaatcatcttgtcgtctccatttctactttgttaccttccgcttgctccctaaccctcggaactggcctcttacctacctcctcattctcctgaaacagctccagaagaggtcaccaaagacatcctatgtgtttgtttcattcaagaaatactttttttttttattgagatggagtctcgcactgtcatccaggctagagtgcaatagcacgatctcggctcactgcagcctccacctcccagttcaagtgattctcctgcctcagcctcccgagtagctgggactacaggcacacaccaccacactcagctaattttttgtatttttacaaaaacaaaaaatacaatatgttgtccagactagtctcgaactcttcacctcatgatctgcccaccttggcctcccaaagtgctgggagtcataagccaccgtgcccagcccttaaaaaatactttttgagcactaacagtatgccaggaactattccaggcacatgggatagtgcagggaggaaaaccagcagtccctgtctttgtgggaatcacaccccagtgcaggaagacaagaagtaaaaaagcaaaacccatgtatagtcgaacttgccaaatcagacagactctttgatcggaatcttcttgcagactgggactttgtttctttttcaccttgtaccccctagtctctggcatagtacctggcacatagtgggtattcagtaaatagttatgtgaatgaatgaatttcatatgacccttctatagcatttgacaccactgacctctctcttcccttgatgttgtgacactgctctcgcctggccctccctatcagtctaatcactcactcttagcctcccatcctgcctggccttgtgatgacttcaccctggccaagatgactcttgaacctcatctggacaagctccccagttctcagcactccagtcaccctgtttttgctgatgactcccatatagacatctgcccagtgtcagcttcatatcagcayttggacagctttacagtggtcccaaacaggctcctcctcctggatccctgtcttggtaaatggcatcagctgccagcagccagccagtcaccagcacaacctgactcctttcctttacctgccacacacaccaatcctgtcgttcctgtcatcttagcagctctcttctctccctcctcctgcttcatgctacagtgtctgcactgtggccctctgctctgcctggagttcttgttaactgtccatctgcctccaggctggtaccactcagggtctctctgcatcactgctagggtgattttttytttttgagacggagtctcgctctattgcccaggctggagtgcagtggcacgatcttggctcactgcaacctccacctcctggattcaagcgattctcttgccttagcctcctgaatagctgtgattacaggggcatgccactatgcccggctaatttttgtatctttagtagagatgggtttcacatgttaggctggtctcgaactcctgacctcatgatccgcctgccttgacctcccaaagtgctgggattacaggcatgagccaccgtgcccggctgggtgattttctaaactactctggccatgttactctcttggataaatagagtgaaacttgagtaagttaagtaaaagtgtgaacgacagtggtgcctgtgggaaaggtgtccttagcacacctccctggcctcataggcccctcttgcacactaagccctatgtttctaggaaatcacctcttattctccaaaatgtgccatcctaattcaattaggccttcgctcaggttgccactctgtcagtgacccactctggtcaggtctcaagttgaggtttacctcttctgtggcagggcttgacagcttgccacttcctgccaccactgtcatcccccacccccagcagaattgactatctcctttgagcctctcctgttcttcataccagataccattactgcacttacctgtctcctccttgattggattgtgagctcctttggtgcagtaactgtctacttaattgttatgtgtccgaaggctaccaggatctgatacctggtagatttctaataatgtttgttatgtgaaaaaaattaataattgaaaagctgagtaagtaaaagtgctattactattaagaactaggagttgagtctgaaatcccagttccactttgtgtgagtcatgtgcccttggacaagttacttaacccctctaagcatcagttttcctcatctataataagggaataacagtatggactgttgtgaggattaaattgcactgtgccttcctcataataaacgtgtagcattgtaaaagggaaattgtgaaatttgaatttaatgttaaaaaaattgaagtcatttttcagagcccaagatgaaaatgtcagaatactctatggtaggcatgaaatgaaatataacatgggtgagaagttcacaaagggcagtttgaaaactctgttttagtgactttctcttaacaccagctacaaaggagcaacagactcatatattgaaaaagtgatgatatcttcaaatgctgaagatgcttttctgatcaaaatgctgctgagacagacaaggcgtccagaaattggagacaaattcagcagtcgtcatgggcaaaaaggtaaactgtatcatttctcaacttgattataaaacaatatatgaatgtatttgttaaccacttaaataaaattcccccatttaaaaaatttactttggaaaagtattacattgttatraaaattaatcttgttttatttcttagattaacctgtttatatttaatggcatttaaaaatayatggtagacttgctcctctatgctgtctgtttcattctcctgcagttgctatgcccagaattataattatagatacagtctaggtgatgtgcctattgagatacatgtagctgttcaaaaaataaatagtagtacctttttttttttctgaaagatacatctttaaactactatatgttctgttgrgtcatagtgtcagatgttagcactagaagacacctcagagttatccgtccccttgtttacagatgaggaagttcagaccccgcattttcagtggccagtcaaggatacacagctacttggttgctgagctggtgttagaacctgggtctcctgaccccagggcggtgctttgtgtgtgtcttacatctaatcccattggcaagcctcactcattcctttgatggttactgcacagttttcatctatttgtagttttgtttattttcaagaaacacgcactgtatcactgttaattttagctctgcctgccgcttagctttaagaagaacaacagctaacacttttgtagcactaactgtgtgcctggctgcgttctcatcactttacaggtgctgactcatttgattctcacacaattctggagggaggtggcatcattatccatattttatagataaggaaacagaggcatagaaagattaatagcttgcccaaggtcacacaattaatgggagaactgacatttgaaccttggcagcttggctccagagacctagctcttaattactaggccacactgactgttaagcagttagcagtgtgcctggcacacatagtaagtgctcaagaagtagcagcaatgatcattaacattgaccatctttttttttgatatatacttaagatgtatcacttctacttttctaccttgactctcacatttgcttataaattactagtgtgatatcttcttatttttaattggtttgaagataactgcacattgtgtttctgctgattttaagtttctttgccaagcgagtatatccatgttacggttttcttggtcaggtatacccagccttagttgtcattctgccagtgaaactatgtcagactaagatactctttcatcaaaatcatttttagttctgttgacagaggcaagattattttagcctgccaatatttttaagaaatgattggttccatctgttaatgtgaatttgacacctgtaatttatatagttccctgagatactaacccttaatgccctttgagtgtttttaaaagtatcttgagtttctaaygttttatatggcttgccagtaaaaaatcaaattctgtatattgaaactgtttccccttttatcttggtcttgacagttgctgagtcaattatggggtaaccttaaccttattcgctaggtcattgtggggtaaccttaacctcatttgtagtctctatcttacttggcctcctacttggacaagagcaaagttgatattcttcttgtaaaatattgacactggaagcttcacaagaatgtacaccataagagaatatcccccttctgaatcagtttacaagactaaggtaccccaaatccttatgtctttatcccatcagggtattatgcaaagagttgcagacttgcagatatttcagtggctatgcaatgtgctctaattccactaaactttttttttgttaactttaagttctggattacatgtgcagaacgtgcagttttgttacataggtatacacgtgccgtggtggtttgtacacccatcaacccatcacctacattaggtatttctcctaatgttatccctcccctagcctcccaccccaggcaggcctcggtgtgtgatgttcccctccctgtgtccaagtgttctcattgttcaactccgacttatgagtgagaacatgcagtgtttggttttctgatcttgtgatagtttgctgagaatgatggtttccagcttcatccacgtccctgcaaaggacatgaactcatccttttttatggctgcatagtattccatactgtatatgtgccacattttcttaacccagtctatcattgatggacatttgggttggttccaagtctttactattgtgaatagtgccacaataaacatacgtgtgcatgtgtctttatagtagaatgatttgtaatcctttgggtatatgggattgctgggtcaaatggtatttctggttctagatccttgaggaatcgccacactgtcttccacaatgactgaactaatttacactcccaccaacagtgtaaaagtgttcctatttttctataacctctccagcgtctgttgtttcctgactttttaatgatcgccattctaactggcatgagatggtatctcattgtggtttgatttgcatttcactaatgactagtgatgatgagcattttttcatatgtctgttggctgcataaatgtcttcttttgagaagtgtctgttcatatcccttgcccattttttgatgggggttgtttgcttttttcttgtaaatttgtttaagtccgttgtagattctggatattagccctttgtcagatggatagattgcaaaaattttctcccattctgtagtttgcctgttcactctgatgatagtttcttttgctgtacagaagctctttagtttaattagatcccatttgtcaattttggcttttgttgccattgcttttggtgttttagacatgaagtctgcccatgtctatgtcctgaatggtattgcctaggttttcttctaggatttttatgatcctaggtcttatgtttaggtctttcatccatcttgagttgatttttgtataaggtgtaaggaaggggtccagtttcagttttstgcatatggctagccagttttcccaacaccatttattaaatagggaattttttccccattgcttgtgtgtgtcaggtttatcaaagatcagatggtggtagatgtgtggtgttatttctgaggcctctgttctgttccattggtctatatatctgttttggtaccagtaccatgctgttttggttactgtggccttgtagtatagtttgaagtcaggtagcctgatgcctccagctttgttcttcttgcccaggattgtcttgggtatgtgggctcttttttggttccatatgaactttaaagtagttttctctggttctgtgaagtaagtcagtggtagcttgatggggatagcattgaatctataaattacttttggcagtaagaccattttcctgatattgattcttcttatccatgagcatggaatgtttttccatttgtttgtgtcccctcttatttccttgagcagtagtttgtagttctccttgaggaggtccttcacatcccttgtaagttggattcctaggtattttattctctttgaagcaattgtgaatgggagttcactcatgattttgctctctgtttgtctgttattggtgtataggaatgcttgtgatttttgcatattgattttgtatcccaagactttgctgaagttgcttatcagcttaaggagattttgggctgagacgatggggttttctaaatacacaatcatgtcatctgcaatgaaagacaatttgacttcctctcttcctatctgagtatactttattgggttctcttgcctgattgccctggccagaacttccaacactatgttgaataggagtggtgagagagggcatccttgtcttgtgccagttttcaaagggaatgcttccagtttttgcccattcagtatgatattggctgtgggtttgtcataaatagctcttattattttgaggtatgttccatcgatacctggtttattgagagttttcagcatgaaaggctgttgaattttgtcaaaggccttttctgcatctattgagataatcatgtggtttttgtcattggatctgtttatgtgatgggttatgtttattgatttgcatatgttgaaccagccttgcatctcagggatgaagccgacttgatcgtggtggaaaagctttttgacgtgctgctggatttggtttgccagtattttattgaggattttcgcatcaatgttcatcagggatattggcctaaaattctctttttttattgtatctctgccagatttggtatcaggatgatgctggcctcataaaatgagttagggaggattccctgtttttctattgattggaatagtttcagaaggaatggtatcagctcctctttgtacctctggtagaatttggctgtgaatccgtctggtcctggactttttttggttggtaggctattaattattgccttaatttcaaaacctgttattggtctattcagagattcaacttcttcctggtttagtcttgggagggtgtatgtgtccaggaatttatccatctcttctagattttctagtttattacatagaggtgtttataatattctctgatggtagtttgtatttctgtgggatcggtggtgatgtcccctttatcattttttattgcatctatttgattcttctctcttttcttcgtattagtcttcctagtggtctatgtattttgttgatctcttcagaataccagctcctggatttattgatttttttgacaggtttttgtgtctctatctccttcagttctgctctgatcttagttatttcttctagcttttgaatgtgtttgctcttgcttctctagttcttttaattgtgatgttagggtgtcgattttagatctctcctgctttctcttgtgggcatttagtgctataaatttccctctacacactgctttaaatgtgtcccagagattctggtatgttgtgtctatgttctcattggtttcaaagaacatctttatttctgccttcatttcattatttaccccatagtcattcaggagcaggtggttcagtttccatgagttgtgtggttttgagtgagtttcttaatcctgagttctaatttgattgtgctgtggtctgagagacagtttgttgtgatttctgttcttttacatttgctgaggagtcttttacttccaattatgggtcaattttagaataagtgcgatgtggtgctgagaaaaatgtatattctgttgatttggggtggagagttctgtagatgtctattaggtccatttggtccagagctgagttcaagtcctggatatccttgttaagtttctgtcttgttgatctgtctaatattgacagtggggtgttaaagtctcccattattattttttgggagcttaagtctctttgtaggtctctaagaacttgctttatgaatctgggtgctcctgtattgggtgcatacatatttaggatagttagctcttcttgttgaattaacccctttaccattatgtaatggtcttcttagtctcttttgatttttgttggtttaaagtctgctttatcagagaccaggattgcaacccctgcttttttttttttttttgctttccatttgcttggtagatcttcctccatccctttattttgagcctatgtgtgtctctgcatgtgagatgggtttcctgaatacagcacactgatgggtcttgactctttatccaatttgccagtctgtgtcttttaattggggcatttagcccatttacatttaaggttaatattgttatgtgtgaatttgatcctgtcattatgatgcttgctggttatttcacctgttaattgatgcagtttcttcatagcatcgatggtctttacaatttggcatgtttttgcagcggctggtaccggttgttcctttccatgtttagtgcttccttcaggagctcttgtaaggcaggcctggtggtgacaaaatgtctcagcatttgtttgtctgtaaaggattttatttctccttcacttatgaagcttagtttggctggatatgaaattctgggttgaaaattcttttctttaagaatgttgaatattggcgcctactctcttctggcttgtagggtttctgcagagagatctgctgttagtctaatggggttccctttgtgggtaacccgagctttctctctggctgcccttaacactttttccgtcatttcaaccttggtgaatctgacaattacatgtctcgaggttgctcttctcgaggagtatctttgtggtgttctctgtatttcctgaatttgaatgttggcctgccttgctaggttggggaagttctcctggataatatcctgaagagtgtttcctaacttggttccattctcctcatcactttcaggtacatcaatcaaacgtagatttggtcttttcacgtagtcgcatatttcttggaggctttgttcatttcttttcactcttttttctctaatcttgtcttcttgatttatttcattactttgatcttcaatcactgatatcctttcttccgcttgatcgaattggctattgaagcttgtgtatgcttcacgaagttctcgtactgtggttttcagttacatcaggtcatttaagctcttctctacactgattgttctagttagccattcatctaaccttttttcaaggttttcagcttcctcgcaatgggttagaacacactcctttagcttggagaggtttgttattactgactttctgaagcctacttctgtcaactcgtcaaactcattctccatccagttttgttcccttgctggcaaggagttgtgttcctttggaggagaagaggcattctggtttttggaattttcagcctttctgctctggtttctccccatctttttgtggttttatctacctttggtctttgatgttggtgacctatggatgaggttttggtctggatgtcctttttgttgacgttgatgctattcctttctgtttgttagttgtcattctaacagacaggcctgtcagctgcaggtctgttggagtatgctggaagtccactccagaccctttttgcctgkgtatcaccaatggaggctgcagaatagcaaatattgctgcccgatccttcctctggaagcttcgtcccagaggggcacctgcctgtatgaggtgtttgtcggccactactgggaggtgtctcccagtcaggctacacgggggtcagggacctacttgaggaggcagtctgtccattatcagagcttgaacaccgtgctgggagaaccactgctctcttcagagttgtcaggcagtgacgtttaagtctggagaagctctctgctgccttgcccccagaggtagaatctagaaaggcagtaagctttgctgagctgcggtgggctctgccgagttcgagcttccctgccgctttgtttacactgtgaacatggaactgcctcctcaagcctcagcaattgtggatgcccctgcctctgccacactccaccatcccaggytgatctcagactgctgcgctaacagtgagcaaggctccgtgggcatgagaccaaccaagcccaggcacaggaggggatctcctgctctgccggttgtgaagaccatggggaaagcacagtatttgggcaggagtgtacctcttctccaggtacagtcactcatggcttcccttggctaggaaagggaaatcccccaaccccttgcacttcccaggtgaggtgacamcctgccctgcttcagcttgccttccgtgaggtgcacccactgtccagccagtcccagtgagatgaaccaggtacctcagttggaaatgcagaaatcccctgtcttctgcatcaatctccctgggagctatagaccagagccattcctatttggccatcttggatgcagtcagtctccactaaacttcttgaaggcagagaccatgtccttgtattctccataaagcccagtaagtcctttctcttagcagacacttaatagatagtagttaataggtgaattcacaatgtatatgaatgaatgagtgaatgaaattggaggtaggggaagtgacggaggtagattctctactgttgatggattgattttattcaggttttaatctgtctgttatgtgtgagtacatgtatgtgtataaacaaagcagtgcttttttttttttatactttaagttttagggtacatgtgcacattgtgcaggttagttacatatgtatacatgtgccatgctggtgcgctgcacccactaactcgtcatctagcattaggtatatctcccaatgctatccctcccccctccccctaccccacaacagtccccagagtgtgatattccccttcctgtgtccatgtgatctcattgttcaattcccacctatgagtgagaatatgcggtgtttggttttttgttcttgcgatagtttactgagaatgatggtttccaatttcatccatgtccctacaaaggacatgaactcatcattttttatggctgcatagtattccatggtgtatatgtgccacattttcttaatccagtctatcattgttggacatttgggttggttccaagtctttgctattgtaaatagtgccacaataaacatacgtgtgcatgtgtctttatagcagcatgatttatagtcatttggttatatacccagtaatgggatggctgggtcaaatggtatttctagttctagatccctgaggaatcgccacactgacttccacaatggttgaactagtttacagtcccaccaacagtgtaaaagtgttcctatttcttcacatcctctccagcacctgttgtttcctgactttttaatgattgccattctaactggtgtgagatgatatctcatagtgcttttgatttgcatttctctgatggccagtgatgatgagcattttttcatgtgttttttggctgcataaatgtcttcttttgagaagtgtctgttcatgtccttcgcccactttttgatggggttgtttgtttttttcttgtaaatttgtttgagttcattgtagattctggatattagccctttgtcagatgagtaggttgcgaaaattttctcccatgttgtaggttgcctgttcactctgacggtagtttcttttgctgtgcagaagctctttagtttaatgagatcccatttgtcaattttggcttttgttgccattgcttttggtgttttggacatgaagtccctgcccacgcctatgtcctgaatggtaatgcctaggttttcttctagggtttttatggttttaggtctaacgtttaaatctttaatccatcttgaattgatttttgtataaggtgtaaggaagggatccagtttcagctttctacatatggctagccagttttcccagcaccatttatttaatagggaatcctttccccattgcttgtttttctcaggtttgtcaaagatcagatagttgtaggtatgcggcgttatttctgagggctctgttctgttccattgatctatatctctgttttggtaccagtaccatgctgttttggttactgtagccttgtagtatagtttgaagtcaggtagtgtgatgcctccagctttgttcttttggcttaggattgacttggcgatgcgggctcttttttggttccatatgaactttaaagtagttttttccaattctgtgaagaaagtcattggtagcttgatggggatggcattgaatctgtaaattaccttgggcagtatggccattttcacgatattgattcttcctacccatgagcatggaatgttcttccatttgtttgtatcctcttttatttccttgagcagtggtttgtagttctccttgaagaggtccttcacatcccttgtaagttggattcctaggtattttattctctttgaagcaattgtgaatgggagttcactcatgatttggctctctgtttgtctgttgttggtgtataagaatgcttgtgatttttgtacattgattttgtatcctgagactttgctgaagttgcttatcagcttaaggagattttgggctgagatgatggggttttctagataaacaatcatgtcatctgcaaacagggacaatttgacttcctcttttcctaattgaataccctttatttccttctcctgcgtgattgccctggccagaacttccaacactatgttgaataggagtggtgagagagggcatccctgtcctgtgacagttttcaaagggaatgcttccagtttttgcccattcagtatgatattggctgtgggtttgtcatagatagctcttattattttgaaatacgtcccatcaatacctaatttattgagagtttttagcatgaagggttgttgaattttgtcaaaggctttttctgcatctattgagataatcatgtggtttttgtctttggctctgtttatatgctggattacatttattgatttgcgtatattgaaccagccttgcatcccagggatgaagtccacttgatcatggtggataagctttttgatgtgctgctggattcggtttgccagtattttattgaggatttttgcatcaacgttcatcaaggatattggtctaaaattctcttttttggttgtgtctctgcccggctttggtatcagaatgatgctggcctcataaaatgagttagggaggattccctctttttctgttgattggaatagtttcagaaggaatggtaccagttcctccttgtacctctggtagaattcggctgtgaatccatctggtcctggactctttttggttggtaaactattgattattgccacaatttcagctcctgttattggtctattcagagattcaacttcttcctggtttagtcttgggagagtgtaggtgtcgaggaatgtatccatttcttctagattttctagtttatttgcgtagaggtgtttgtagtattctctgatggtagtttgtatttctgtgggatcggtggtgatatcccctttatcattttttattgtgtctatttgattcttctctctttttttctttattagtcttgctagcggtctatcaattttgttgatcctttcaaaaaaccagctcctggatccattgattttttgaagggtgttttgtgtctctatttctttcagttctgctctgattttagttatttcttgccttctgctagcttttgaatgtgttcgctcttgcttttctagttcttttaattgtgatgttagggtgtcaattttggatctttcctgctttctcttgtgggcatttagtgctataaatttccctctacacactgctttgaatgcatcccagagattctggtatgttgtgtctttgttctcattggtttcaaagaacatctttatttctgccttcatttcgttatgtacccagtagtcattcaggagcaggttgttcagtttccatgtagttgagcggctttgagtgagattcttaatcctgagttctagtttgattgcactgtggtctgagagatagtttgttataatttctgttcttttacattggctgaggagagctttacttccaactatgtggtcagttttggaataggtgtggtgtggtgctgaaaaaaatgtatattctgttgatttggggtggagagttttgtagatgtctattaggtccgcttggtgcagagctgagttcaattcctgggtatccttgttgactttctgtctcattgatctgtctaatgttgacagtggggtgttaaattctcccattattaatgtgtgggagtctaagtctctttgtaggtcactcaggacttgctttatgaatctgggtgctcctgtattgggtgcatatatatttaggatagttagctcctcttgttgaattgatccctttaccattatgtaatggccttctttgtctcttttgatctttgttggtttaaagtctgttttatcagagactatgattgcaacccctgcctttttttgttttccatttgcttggtagatcttcctccatccttttattttgagcctatgtgtgtctctgcacatgagatgggtttcctgaatacagcacactgatgggtcttgactctttatccaacttgccagtctgtgtcttttaattggagaatttagtccatttacatttaaagttaatagtgttatgtgtgaatttgatcctgtcattatgatgttagctggttattttgctcattagttgatgcagtttcttcctagtctcgatggtctttacattttggcatgattttgcagcggctggtaccggttgttcctttccatgtttagcacttccttgaggagctcttttagggcaggcctggtggtgacaaaatctctcagcatttgcttgtctgtaaagtattttatttctccttcacttatgaagcttagtttggctggatatgaaattctgggttgaaaattcttttctttaagaatgttgaatattggcccccactctcttctggcttgtagggtttctgccgagagatccgctgttagtctgatgggcttccctttgagggtaacccgacctttctytctggctgcccttaacattttttccttcatttcaactttggtgaatctgacaattatgtgtcttggagttgctcttctcgaggagtatctttgtggcattctctgtatttcctgaatctgaacgttggcctgccttgctagattggggaagttctcctggataatatcctgcagagtgttttccaacttggttccattctcctcatcactttcaggtacaccaatcagacgtagatttggtcttttcacatagtcccatatttcttggaggctttgctcatttctttttattcttttttctctaaacttcccttcttgcttcatttcattcatttcatcttccattgctgataccctttcttccagttgatcgcatcagctcctgaggcttctgcattcttcacgtagttctcgagccttggttttcagctccatcagctcctttaagcacttctctgtattggttattgtagttatacattcttctaaatttttttcaaagttttcaactttctttgcctttggtttgaatgtcctcccgtagctcagagtaatttgatcgtctgaagacttcttctctcagctcgtcaaaatcattctccatccagctttgttccgttgctggtgaggaactgcattcctttggaggaggagaggcactctgcgttgtagagtttccagtttttctgttctgttttttccccatctttgtggttttatctacttttggtctttgatgatggtgatgtacagatgggtttttggtgtggatgtcctttctgtttgttagttttccttctaacagacaggaccctcagctgcaggtctgttggaataccctgccttgtgaggtgtcagtgtgcccctgctggggggtgcctcccagttaggctgctcgggggtcaggggtcagggacccacttgaggaggcagtctgcccattctcagatctccagctgcgtgctgggagaaccactgctctcttcaaagctgtcagacagggacatttaagtctgcagaggttactgctgtctttttgtttgtgccctgcccccagaggtggagcctacagaggcaggcaggcctccttgagctgtggtgggctccacccagttcgagcttcccggctgctttgtttacctaagcaagcctgggcaatggcgggcgcccctcccccagcctcgctgccgccttgcagtttgatctcagactgctgtgctagcaatcagcgagactccgtgggcgtaggaccctccgagccaggtgtgggatatagtctcgtggtgcaccgttttttaagccggtctgaaaagcgcaatattcaggtgggagtgacccgattgtccaggtgcgtccgtcacccctttctttgactcggaaagggaactccctgaccccttgtgcttcccaggtgaggcaatgcctcaccctgcttcggctcgcgcagggtacgcgcacccactggcctgcgcccactgtctggcactccctactgagatgaacccggtacctcagatggaaatgcagaaatcacccgtcttctgcgtcgctcacgggctgggagctgtagacgggagctgttcctattcggccatcttggctcctcccctttttttttttttttttttttttttttttttggagacagagcctcactctgtcacccaggctggagtgcagtggctcgatctcagctcagtgcaacctccacctcccgggttcaagcaattcttctgcctcagcatcccccattagctgggactacaggtgtgtaccaccatgtctggctaatttttagtattcttagtagagatggagtttcaccatattgcccaggctggtcccaaattcctcagctcaggcaatccatccacctcagcctcccaaagtgctgggattacagacgtgagccaccatgcccggccaaagcagtgcttttaaaaatgaaaacaacacacctaattagtaagctcctgaaaatacaggcgtctaggtaaaacgtcaggaaggtctttgtgctatagcattttttcagactgttaatatgattggtataatgttcattaacaggcatggtttctaatttgcagtgatctgaaacagcagattttagagaactgttcattcttaggggagctttgacttgtacgtctctttgcraaactgaaggagtcctcctgggtctagctgacctttcccttgtagtgaggagttttgtcttgctacttttttttttccagatggcttttaatccaagggtaaaaaccttctgattagcctagattcccttgatagtcccttctcttacagcttcatcaaatttatgttaaagattggggaaaaaacaagcaaacaaacaaaaagtaggtagtgtaaactttaacagagtaatagaaggattgacatgggactcgtaactggacataatttttatttctcttaagtataattttattattaaataataaatgcacatggttttaaaaggtcaaacagaacaagaaagggttctttgtacaaaaaaaaaccatcagtccttgtctctcctcctcacccaactttggttaggtataaaagtctaggttgaaaattgttttccctaaggattttggtggccttgccacatggtcatctaaattccatgtaaattgtaatgtcactcttcttcctcgtgtttttgtgccctgtttctctttttccctccttacctccctcctactttattcctttctctctggaagcttttactatcttcttcccttcttgacattctgaaatttcataggctcttctttcattccttgtgctgggcaattggacaccgtcgcatcctggaggtttaagttccttcagttctaggacattttcttatatttatttagttaataatttcctcttcctcattttccccataccctttctggttttcttagtgatcaaatattggracttccagattgatgctctagttttcttatctttttgccttcttgtttttctttttaggagatttgatcaacgttatttttcagatttttttaaacctatcatattttaaatttcyaattaaatgtttaaagttaatttatattctttctctctctcttttttttttttgagacagagtcttgctgtgtcgcccgggctggagtgcagtggcgcaatcttggctcactgcaagctctgcctcctgggttcatgccattctcctgcctcagcctcccgagtagctgggactacaggtgcccgccaccatgcctrgctaattttttgtattttttttagtagagatggggtttcactgtgttagccaggatggtctcgatctcctgacctcgtgatccacctgcctcggcctcccaaagtgctgggattacaggcgtgagccagcgcacccagcctattctttctcttatagcaagaagtatgtatttttagttttctttgagttttagttttttggtttttctttttttctttttagttttcttctgtttctaattttctttccttccttcttttcttttcttttcttttcttttcttttcacagtatcttgctctgctctgtcacccaggctggagtacagtggcacaatcacagctcactgcatcctcaacctcctgggctcaagcgatccttccatctcagcctcctgagtagctgcactacaggcatgcaccaccatgcctggctaatttttgttttttgtttttgggttttttttttggctttttttattattattatttgtagagactaggtattgccatattacccaggctggtctcgaacttctaggatcaagtgatccacctgcctcagcttcccaaaatggcatttgaaccttgggattacaggtgtgagattacaggtgtgagccactgtgcctggctgtttctatctctcgataggattttcctctcctatttgttttagtgtctgatttgttgttgttggaggctttcctctaatacctggtatacccctgaaccctagaaagcatttcaaagctctgtgtcccatggatagaacttgttgactagtgaatatcattgctgggtggtcaggtagtgaactactttattgttgtgccattcagtttcaacatactaggatctttctaactcctgcctgaaggttggagctgggaatgagggtggggcagtgcttaaggctgtcagctgacctccaggagtcakgcaggggcagggactggagcttactcttcagtgcatagactttaattcctctgtatcaggcttttgaccagcccaccctctgctgcgcttgctacccttgggtctcagatcaagtactcaagtgatggttactcaggtaagggttaggggagaagtgtagtttcctggctgtatggactagggaatacagagaactgacaatttcttatatagacatttatttatacaaatatttgttaagtatcttctgcgtgtctggtactattctaggctctggtcacaagcagtaaacaaaatagattaaagttccaacccttgcggggcttgtgttcttgtgggcaagaaggaaaatagtaagtgctgagggaatgatatgtcgtgagatgagaaaagattgaaagctgggaggggggatgggaagcatgtgaggggagggcgtgtggttagtgattcaaagtttaggcagagtggttggggaacaacaccatgttgaaaagatggcattgagtaaagatctgagagaagtaagagggtgagccctctctggctgaagagcatttgaggtgaaggttttgcagctgtagctcacctaatagaagaccagcaaggaggccccatagctggagcagagtgagaagtgaggaggcagccatgaggctcataggtcactgcaggaactttggcttttattctgagggagagggaagccactggagaggggtttgagctggtgagagagatgatctgactgacactggctgctgtgttgaaagaaactgcagtggtgccagttcagaagctatgtgagagttggaggtgggctggaaaagcataacgatgaggaattggtgagaagggatcagagtctggacacattttgaaagtagagcctcctggaattgctgatggattgggcggctttgactcagtcttcttgctttcagcttcgctcctcacgctgccttttgcaatactagtacttcgtgtctctgtcttctgagccttcccaggaatcgggtgggtgagtgggggtggcaccaaaggccatgtcagctcacctcttcacatctcatctgcagggacttagtattactctcctgttacttttctttcctctctttatcagctttcaaagttgtagaattatctcatgcccactgataccactgtgcccattctttctccttacacgtaggtttacaccttaatttttttaaactcagtgaagtttagagaagcagtgttgataaacacatgtgtttcatctgtcatgtttaactagaaatctgtttattatttgtgaatattcagcacaagaatgtttagtgagtatgcttgatttttttcaatgcaacttatagaactgaaaattattttaataaaaaatgagaaggatttttagagcactaaccttttgtttcctgaccagagccttgcctctaagacttcttgggtttgtttgtttgtttgtttttgtctattttaatcaattctcagattgaaaattaattttaaaatgtttaaagctcacaccctgagaattattacataaatgctaacaatcatcagagaagcattaatcatagtttgtcagctcttatctgaaaataatttatctttcttctggatcattgttgtaactaaggtctacaactttggtcctcttcttgaatgtcacccatctgaagccagaggcatgacagtagtaaaagtctattttttgaagttttataaataaaattctaaagattcaaagataccaatagtttttttwaaaaataattgtatatgttgttaaatatccagaataccttgttggctaacttagtgtgttattccattctcacactgctataaagaaatacctcagactggataatttataaagaaaagaggtttaactggctcacaactctgcaggctgtacaggaagcatggctagggargcctcaggaaagttacaatcatggcagaaggcaaaggggaagcaggcacatcttacacggccagagcaggaggaagagagagaagggggaggtgctacacactttaaaacaaccagttcctgtgagaactcactcactatcatgagaacagcgaggggggaatccacctcatgatccaatctcctcccaccaggttcttcctccaacactggggatttgacacgagatttgggtggggacacaaatctaaaccatatcacttaggtaagtatattttaggttcgttgagattaggaaacatgccctgctgatttacttaaccccaaagcacccagcatagcactttgcatataatatggtatccacttatgatgtttgaggaatcctttattaaataaaggattttacatattcattggtcttgttggaaattgtactgacataacaagccaaactcactactcccagaataagtgtaatttattcttcctagtaaatatcagaaatgagatgcctcatttttatctaaactggcaccaggagtttcaacacctaagactcatagctccccaaccctaactgatcacacaggcccactaaagcttcttcagccataataactaaatatagttatccctcagtatatgctgggaattggttccaggacccctgcatatattcaagtcccacagttgggcctgtaaaacccaaatatatgaaaagttgtccctctgtggagaagggctcacattccgcaaatgctgtattttcgattcatatctcattgaagaaaaatccccatataagtggacctgcacagttaagacctgtgttattcaagggtcaactgtatacatgcccacccacgtccatcccaggcacaaatgagaacctgccttgacagccccagggaaacctattcggtcatttttaagttactgttgtgggctcaaaactgtgtggggcactttaggggatagaaagtaaattaatcccttgactaatgcccatgaggagttgactgacacctgaagcaaaaagatggatacgaaggattacatagttaaatgctaaattatatgggagaaaccactaaaaatatagaggtttagagtttaccatagataggaatagaatcttagagtttgaaaagtccttttagaagtccagtctaaatccatcttctagtataagagttctttttagattatctttggcagatggttttccatgttgattgtggcctgtgaagggaggcccttgctattttctgaggcagcctcttctgtagtagcactgctctgatagttttcttgagtcagaggtgctcaagagttagtaagagtgctcaagagtctataagttactgcagttagtcctgccttgtcttgtgggccatactgaatgaacatattgccttttcatcacagccatcctctgttcagtatttaaagaaagccctcggattgacgaaaagtatagcagagagagaaaggtcttgaactccaactaggtgaactattttgtccctttatgtcttggcctccttgatactaatgtgtaaaagcagggaacacagtgcctgatgcacagacaggaggcagtaaaggtgagctgcgggcaggtctgtcttgggtcttctcttgcaggctgcctggtaaaggaagccctcagagactagatggggttcaggcttagagggctttgataaagatgtgaaagaaaaacagggggcagcagagaagagcaaatgaatggacttgactgactgaaataaagacagcataaagaagaaaaaccacggggactgtggttttaatccggtaaacgatggcaccaatcacaaagcatttgtgtctcactgacttgagatggtgagatgatggaagatcatctcgagtgcctatattgttgattaattcatccatttattgagctttcactgtgtgccaagcactgttctaaatactggaaatacagaggtaaacaagactgatggggtctctgttctcccgggatttgtgttctccttggggaggaaacagacaaaaaagaagtaaacaaaaatataaaccccaactacttagtaggctgaggcaggaggatcacttgagcccaggagtttgagaccagcctgggcagtatagcaagactccatttcaagaaaaaaaagtgtaaacaaaaatataaacaggataattgaaggtaatgataagtgccatatatgaagaatgatataaaagagtggatggtttagaggtgggggtgtgtactttagattacgatcaggaacagcctctcggaggaagcgacattgagctgagacacgaaggatacaaaggagccagccgagcaaaagtctgggaggatttagttataggcagagagaatcattagggtaagagttctgaggcacgaataagcttggtatattcaaggaacagaaaaaaggccagtctggccaggcatatgcctgacaagcagcacagtatgagacttggggagtgacagaaggatgatgggggcatatcctatagggccttttggctaaaagaaaggagattggactttactccagatatgctgggaaccaacagaaccgttggatggtgggtgtcttggtccattttctgctgctatgacaaaataccactgactggataatttataaagaaaagaagtttatttggcttatggttctaaagacttggaagtggaggagcgtggcaccagcatctggagaggatcatcccgtggcagacaggcagaggggcaggagagcttgcttttataaccaaaccagtcctgagataagtaacccaagtctgtaataatggcattaatccattcatgggaatggagtccttatgacctaaccacctcttaaaggccccatatcaattaaatctcaacatgagtttttgtgggtacatacaaaccataaaaatgaatataagcaaaggagtgacgagatctaacttacaacttctagagctcactgtggattctatatgaaaagtggattggaacgggcaaggaagggggcagggagaccattgcagtggtccaggcaagaaagggtggtggcttggactaggacagcagcagtggaaaaatagagagaagtgactggattctggacatactctggagatagagccaacaggacttgcttatggcttggatggatgttgcaagaggaaaagacaggagttgaggatgaagtttgtggcctgagcaactgataatgctgtttaccaagatgggagcaattgggtaaagaatagttttttggcattagacaagggcagaggttgagagtttgggcctcaggttgagatgattagactccaagtgaagatataggctggcaattggttatagagtctagagctccagggagagatttgggctagagaaaaaattgaggaatcatttgcatgctgtttatctccacatttatagtattttactttttgtgtattgatcatttataagcacttttatctatatttcatcctttaactggtacagttccagtttgtgttgttattcctactataaagagtaaggagattggccaggcgcggtggctcacgcctgtaatcccagcactttgggaggccgaggcgggcagatcacgaggtcaagagatcgagaccgtcctggctaacatggtgaaaccccatctctactaaaaatacaaaaaattagttgggcgtgatggcaggtgcctgtagtcccagctactcgggagactgaggcaggagaatgatgtgaacctgggaggcggagcttgcagcgagcctagattgggccactgcactccagcctgggstcagagggagactccgtctcaaaaaaaaaaaaaaaaaaaaaaaaaaaagagtaaggagattgaggttcaggggaggtgagtagcatgcctcctacagcttggtgctggcagagcccacatttgaatccaggattttgattccaagcatatggctcatttggttaaatctggttaaaggtggctcttttctcttcttgtatcttactctgctcctgagattgccatattcccagagatttctcgttggaaagacactaccttttctgaggatgaatcctgctgttttttagtattattttctgtctcctccttaagatgggcatcttctcaaaattcccattcttcctggataagcagctttacagctgccacaaatccagaataaatactaccctcatacagcatgtcgcacaaatgcctgccaaagccccatattaagatgtactcctaaaataaagctgtattttctggtgtccctttccttctaaaatcagcttattgtaaaacactatccccactcccttctttaacgggtcctctggtcaggctttagtggccttgtgtaaaattcagaatctatcaggatttcaaacagatgtaaaaggaagtaaatttctgagccctcaactttgacagttctcccaatttatttggctagatgtgacagtaaaagccacaaaragagggcacttgaagaaaatgttttggccacagtgtttacagttagtgcacttggaaccttcacatgccaggcacagatggcaggtgtctgtaaggagccacacaataayccagcgcttagtgtgggccctaagggggactgcatcaggcctaaaggagttggatattggcaagtaaaatgtgagtgaaacagaaaatgtagtccacaacatcagttatgctatttgtagttgtcaygaaatgagctgataaaaatttcaaagtgttgagttttcagggtatatgtgtcacaccacgattcctgcagaggtttgtttgtttgtttgtttctgttttggtccagatacatgccagaataagagcagtggttagttgaacttagtttttaatcctgagatgtagaattgtttggaaatcctgttttttcttttgtagtatctcctgcaagttgacacatacatattatctatgagaaaatttaaaaattcttttgatttagtatacctttgtgcatattatttttctctctccatttagagcattaaatgtattgttctgggtgttcagaaagtaacatggccctgcagattgtctgatttttgtcttttcttaaaagcttacttcgacaaagctgttgttagggattctttctgtatatgaattgtgtgtagatcacatttcggtgcccaatgcctcttcagatatcctaacaattaaaggagacttgaaaatttagtttcacagaacatgtgcatctgtcccgctcaagcctgatcgcttcaaaggtggtaggataattagtagctaaatgaaacaaacataaagaggaagcggaacagtggtagttatgtgctgcatgtgatcacagagctcatggagaagactgaagggggcagaatgcgtgggtcagctggaataagcgagtcaatactgagtagttgggaatcaacatcagtgctgcatgataagcaaagattgaatgcagttggtcagaggaggcccactggagaagtgaaaatgttttatcagatacagaggtgacagacccaataagcaacatcaccttctgtaacctcaaaagtggaggaggactaagcagagaaccaagtaatgaggaaccatgttttgtaaagaaggtggcatcacaattaacatagactactgtgggctcagaagcaggcaggattcactcacagtgtactttttagatgaggacatttcaatacagtcttctactgagacattcaaagaatcttaatgaagtacarccttcctttgggcattgtgaggtcagttatatatcttatcagtaaatgtgcagtgagtctgcatccccccaaaagagctggacctttgattaagaatctctagagccgttcatcctttagtagtatgcaaaatgctggccaaggtgaaatgatttagtaataaccttctatacatcaaagttgtgaatttgtcttttgtttatttatgaaggcaggaaagtttagttttgttttaaattcatttggggagaaatatgtaaaccctgaagtcttgagctcatttcccaagtggtctagacttctaggtattttcgagtgaagccatgacttatctggttgaggcataatgatgttccaaagggaaaacagagctgaacatgggtgtggaatgttctatgtgttgctgtatattctaatcatttttatagataaagataggaagagacattcacatatgctgattgaaattatgtttggaattagactttctattaaaatcaaaataacacatgtaagcctcttcaactgtgttataaattctaatggagggaactcatcaagggcaaatatttttatcttgagccttgttttctctgatgattagtgcatttattagaagattaactactccttttaaaaaaaatctttaacaaaaattatctgacagcccaaggaattctcaagttccatttcagtgttcaggcaaaccaaattattatatttccagatttcctcttcttttgctgccattcacaatgaaggaggaaaaagcggactcctttgatgtggagagaaaaaaaaagcaatatatcacttccctgaaagaacatttctcagtctctcatgtgaaaaaggattagcacctccaacaaaggtcctgtggatcacagcatcgggcagcaataccaagcagtactcctaaggagaggaaaaactgtatttgagcaagagtgtttgtcctggcaaatagaagctttttaataactgcaaatctgagataatggcatacgctccctaaatccttaaggaccagacagctagtttaaatggagtgaagtcaacttttgttttacaatagaagtctagtcttatcaaaatatagttttttcacttaatggtttagtctgcctatctgtggttgataaggattatgcgtatatggataaaatcgtttggaagattcatcattgaccctctcttatacaagaaaagttccattataaggtcacttgcttccattttgcactaataagttattcaataacctgcagaattaatttattaagattttgattgaatgtttcttagaagaaaagaaaacctgccctgactttccaacacattaaagaatctttttacagtagatataaagaggcttgtgggaagtaagaaaatggtaattcatgtgtgatagaaaagccaaggagaaagtttatctgttaaacaaggtttggttttgctagaccttcatttgttagtccttttttctgtattatgctttctaaaattgagacagtgaaaagaacctgatttaaagtaataataataacaccttgtactcgtgtagtacttgagactgtctaaaatcctctctgcaagtccacagctttaaacagtctggatagctttggctgtctgctttgcttgatcctgcttgaatggaagtttctaagtgggaggggagaaggaggctggtagggctatccgtatgagccccrtcataaggtgtatgatgccaaatgatccatcagagtttcagtccaaaaccaaaactccagcagctcttactttaatgttattaaatcagggtttcttcgtccacacagataccttattggaagaagattttatggaattgacttttttaggaacaaattttggtcttcagtagctcgccagtaaccctctgacctttcagtaaatatccaactaaagctttgaaattagggtatttagtgttttatggcccagaataaaaatctccaattctgtttccaaatagtgtagcctcaacacattttattaagctcttgacacattcagccgtgtgtattttgtaaagttcctatggttattgttttacaatagttgcttgcaaaagcattgtaagggtttcaattaatcagccctttgtgcgcttcagactatgcaaatttatcacatcaaaccattcaactgctcatgggaaagccgtgtaaaaactgtattgtcttctagcgcctcctctcatttagagtgatgttttaataagaaagctaatcaagttttcttatgcattatttatctgttaacatgtaaggaagagccgaattaaaattatgtcaaccggtatatggcaagtgatgtgatagatctggaaatgattcaacaacagaacaaagccaatatgattcaacagtttttgtctactcccctccctctggggattatttaaggtggtggtgtgaaaaataaaaggaggttaattcgatagctggaaaaggggaggggaagaacggaataaccacctgtgttagccttaacattttgatttagagatttcatttctgaatgtataaaggctcattgagatgagtttactcaaagcaaaccatgtcttaataggaacagtcaaacttgaaagcattcctactgcttctttggccccatttaccaccatattcatcagcagtaaactattccccaatagatatctgcaaccccaggcctcgtgaaagttatcaggagacagtgtcttgatgatgttaaatgacctgcacaacccaggaaggaatgagctgcttttctgcctctccagccaaagttagtgcaactgcaactgctccttctattcattaagttggtctcctttgctttgctagtttgcttcctgctgagagtaattaggtttcttatataataataattccttgtatttagatgcagcctttctctaaggaccttaaagtacctctcagacattagctcatctgttcttctaacacaattgcttcatgagataggtgctaattattcccgttacaaagagcaaacaactaaggctcaccagaaagtggtgcttcccccgcacccccaaagtaacatatcagtggaacagcattgagtcaaattaaagtcacccaattcctcgattcacctgctctacataggtctaagagtccaaggggtgatgaattttttacagacggcatttcccccacatttataaacctcactaatactgggcactggttgagtgttcatcccttactaaacacagctctcttcttgcactgtgactgatggagaaaaaccacagcatcatttcaccattcagtgtaaggagtgtaaaactgtgcagaataaatagccttgtccaactgctgagtatctgcagaaagtaaaaggaggtaatttagactttgattaggattatttcagcagaccatcctgccagatgtgctccacatcatttagagcattagaaagtggcaagctgaattgtataaatgtatgcaatatatttacgaagttttcaatattcactcagatgacttgacataagctacctccgcctatctggagttggggccctgaacctctacttccccagcaattgagggaaatgattctttttctctttcctcactcagaaaaggaagagtaataatatatattaacctcagaggggtaaatttaattcaaatgtgattacacttagaaggtagacttgctaaataaaaatgtaaaaattaaagcagactgtaatattaaaatgagaactggccatcagcaaaattgaaacaatcttctagtcaggtctcaacacactgaagtcacatcaaaaacatctcttgaattagagatggcattacagttgtcttctgcagttgccatttgctttcctgtcttcatatgctactagaatgtgttaatttttcttaccatttttttcttcttttcttacctttttttttcctgcttaagatagtccattacacagagacagtacactaaaaccagtattttttaaaggccaaaaatgacttgaatatgtcagttgctgtttagaattaggaatactttttaagccaggcatggtggctcacacctttaatcccagccctttgacttgagtccaggaacttgagaccagcctgggcaacatagtgagacctcatctctacaaaaaaaaaaattaaaaattagctggacgtggtggcacgcagctggatgtggtagtcccagctactagggaggctgaagtggaaagatcacttgagtgagccatgattgtgccactgcactccagcctggacaagagagtgagaccctgtctaakaaaagaaaaaatgagtatgtttaaagacaaccagatgattcctgagattaacttgacttttcctgagcaagcctattcttaaatgatttctatgttgttctgtgaagccttggaaatagaaataacaaattggtgtaggagccagcagtgtctgaagcatgatacagagagctgtgatagtggatgtcagaagtgcctctcctgagtggatcggcagtcagatttagactccctcaattcttcccctttacaactagaaattaagatggatggtgatggaataatattttgtcgattggggtattggcagtccctttctgctctaactttctgtgattctatttttttttcttactatttgcatttgttaaaagttctatactgtagtctgtggtccaattcccatttggccctcctgagtgcattaaatgttcctgagcatgttaaactggtgtatttgcattttattgctgggaggctgtgctgtaaacaatggggttgagacaccagcttgagccaggggatgaaattttattttaaaatctgaaatgctgtgtaagcatttaaggtatgaattggtaattgtttcacaacagcttccattagatatggtttatttgtagtccatcctcttttcaaggatccaggggagtgttaacacattgaagcgcaccgcatatcatttacattttaaaccagtgttaagggaaaatgaccataacttttaagacttctaaatattggaatggactttatgcctctgtccctggagaaaacagttttaatctttcatttgaaaataagaaaagaaaccttcccgctgtgattaaggatttgaataattctgaaacagagaaatactgttagaaaaagataagtctggttctaagattgagaactctctttctacccctaatgaattcagtaaaatacaaacttttaaaaatcatctgtctaatttgagattcgagatcatcaaattctgtctaaatattttgttttaacttctaagctcattatggtctctttgtgttaacttgtattaaaatctgtcagctatgactggtctcataagcacagtcagcggaccagaataagttaattatttacttgtgtcactagtgctcttcatctaatgaaatgcacagctgtgttagatctgcagttggatgtgtagcttccattgttccgcaagtcagcagagggtagaagccgcaatgatggagagccctcagttctttctgctgttctggctttctgtgtcgatttcatggatcttttatcattcactttcacacaaaacaaacaacacagggctgtctgctatgggaaccatcttggcatataaaagggttttcagggcctgaagtaattttaagtcagctaagatttaatttttgacttacaggtgcccttggttcagatattgccaaagcagttcctataatggaaggaaaaaaatccgaaagctgcttatgtgtattttttttaactaaatgtcagaagagggctgataagaaaacaacttccccagaaggaagctctgcactaaatattcttaatcagatttcaagcaaaggtattagagattcacatttcagtggaacgagcacttttttcattttaataacataataaagttgaatttgcttaattaaatgtgtcgattaaaactgaaaacacaaaatgtaagtcatctctctccttacccacccccaatataagtatgtcatgcttccttggtcagtttctgcacctcctgcccctctctcccaccttctcttgatggagggtggacaggcagcttcctcctgagcagacgccagcctcctcctgcgaactgctgcttaaggggtgccgagatttctctttggttttgttttttcaggggtatagctgaaccctccatctcctcaccagccaaaattacattctcccccgagctcgtcccagaaccggcccctttagggattgccatttttaacattttgttcactgctgaacaatgttgttgtcggtgcacctagatttacaatttgatctctttcaaagtagatttcccagtagccctagggttttgtcagataatttcagtgtggataagatggatttttggagggaagaaagaaggctcacacactctgcttgattgaaattctaacacattgtagctgaatttgaaataaagtgaactgaatgattgtttctgttcttcatgtaggaaagcatatatttataataaacaataccattttaacccaaaagccaatttaaactaactacatgctctagaattcaactccacaatatccatattgttgtcagctacaataaatcagaatattaataaccagtattacctaggaaaatggcattctttttcttttgactttagctcctggtgattacaacaaatcgcaaactattgaaatagtttgaataattacatagaatcaaattgaatgaaatatttgagagcagtttctttgcaataggggcagatagttaataactttatacacagagaaaaggaattttatcttttactaccaatgtaaaagtgtttgttttcttagtccaatgacactgtacaattctaaattatggagattatagttaacaatctaaattctattcccattcctcttcccaaaaaaatcagaggaatgaaaaactatttagcaacaaaatcccctataggttagaataatattaagggaattaatttaagagaatattagtagtgtatagagttggtagatttttgttttgttgttttcattcttagaattccatttctaattctagcctttttttttccaagaacgatttggtattcaattttcttgttcaactttacaagttcaatcaaagatcactttcctaatgggctgtaagctataggaattaaaattcctttgggcagtttagactcagccaggggaagccctagcaaaaatcagccaaccagccagagcactgcagcctataggtagacctgttagcacatcagccacacacaggtacttcttgtcactggtttttcaaaccacattgtaagcacactcctcatccaatcatttctgtgtttgggggtcagagaacttggattcctataacttgggtgtagaacccaggagatcacgaactagctaatgaggagcaaaactgctgctgacttaaagcttcaggtatggccacaggcctggggtccagtgaagctgctgctcttcagtctctgtggcacaggagggtgggcaggcagcccaacagcaccattgtgtgctatgccggcagcacagtccacaggctgcagtgcctttcgcaaggagagtcgtttttgaactgtttgtcaagcaggattgttgaaaatcacttttgttgctcttgatagaggccatggggaagattttagagcagtggaaatagagatagcagcggggagatcccaattaagtactgtattcttcctttctgccaacttgctttatgtggcatgaaatcttctctcccccaggtgtttgtggcttgatcgtcccccaggaagacatgccattttgtgattctggcatctgtccggacatcatcatgaacccacacggcttcccatcacgaatgacggtcagtgacctgtaggtttttcagaggcattgcctttaaggaagaagcaggcagttagtttagttagagtgagtggaggtgacgaggactctgaagctgttttttcaggtagagctcttctgycccttgccagataaacaggcttccagcccctaacgattctgggccactcccctctacataaagaatgaggagcacrtctatacctccctttragagtggagtcttctgagtgatgaatttacccctcagcaaaagagaatcccttgtcttgaacctaaatggatctccctttcagtgattatttttagtgatcctggctccacctcttaccagctgtgtggccttggacaagttgcttatccttcccatacttcagtttcttcatctgtaaaatgaagaaatataggacctatctcataggggtattgagaggcgtaaaattagatcacacatgtcaagcttaaatactgcttctattartttattactgttattaatagtggtcgtggggaaatgagctggagataaataagcagagagagtgcttgtgccacagggaggtgctcacttaatttgttcacatcctgcaggtggggaagctcattgagctgctggctggcaaggccggtgtgctggacggcagattccactacggcactgcgtttggaggcagtaaagtgaaggatgtgtgtgaggacctcgttcgccatggttataactacttggggaaagactatgttacatccggcatcacagggtaagcatgcgattgagctattttaaagaaaaagaatggttttactaggataggggagacaaagccttaaggtatactctattaagtataccttcaggcaagcttgtacagcccgtgggcggcatgtggcccaggacggcttcgaatgcggtctgacacaaattcgtaaactttttttaaaaacattatgagagtttttcatgatttaaaaaaaaaaatttttttttttttagctcatcagctatcatttgtgttagcgtattttatgtgtggcccaagacaattcttcttcttcccgtatgacccagggaagccaaaagatcggacacccctgccttaagatgtaagcattaaggctatatgccttaagctttatttttttaagaaactggatacaagaaaatctaactttagaaaactaacaattgaggagtgctgtttgtactggtaagattataatttggaaagtagatttttggtaggccaaagctggtggatcgcccaggagtttgaggctagcctgggcaatatagtgagacctcgtctcaaaaaatataaagtagaaaagatttaatttaccaaaatatgatttctaccctatgcctacttttaaggaacacatcaattacatataatgcaaagttttcctttaactgttgaactttccctgcaattatgtgatgagtatcagaataataaatgctttgacagatagaccaaggcctaacatttgtgcatgtgttcactaaagatgtgctaagcacctacctaatatgtgctaggcactgagtatataccaataaatacagtagacatggtcccagttctatggagctgaccgtttaggtgtgttgctagacattaaaaaataatagacacaaggtaacttctcagtagggcctactgttaccatctaatttaaaactataaccccatactgcccatttgctgctttattttccctgtagcactgaccattttcaaatatactacatagtaatactattgcctgtctccccaactagaatgtaacctccatgaaagcagggctggtctgttttgtttactgttctatttccagggcatagcacagggcctgacacacagcaggcactccataaacatttattgaaaaaaggaatgcagacaaataaatacaagtacatatagctctcaccaaaatgaagacagagtgggtgagaaggccctgtgaggaactggctatgatatttcaactgagagataaagggtgagaaggatagggcattcgaagagtgtttaagggagaggaaaagttatgtttgacactttgccagggaaagagcttggtaagttcagggaacaggaagaggccagcctggctgcggtgcagtgaagaggcagtaccggcagcccgaggtgagggtggaggggaagaagagccaggcgaccaggcttgggagcttgtgttaacctgtgagaaacagatctctgcaatgatcgtgaatgacaaggttctgaagctggaatcatcgtggtttttaaaagttcaaattagttgcctaaattaagacacacttaggtatttaatgccagataaaactccaggacctagtgtttctagtgttcttctgggtgttgttttttgtttggttttgggagttttttttgttttttggggtttgttttttttgtttttttgagacagagcttcgctcttattgcccaggctggaatgcaatggcgctgtctcagctcactgcaacctctgcttcccgggggggttcaagcaattctcctgcctcagcctcccgagtagttgggactacaggcacagaccaccatgcccagctagtttttgtattttgagtagagacgaggtttcgccaagttggccaggctggtctcgaactcctgacctcaaatgatccacctgcctcggcctcccaaagtgctgggattacaggcgtgagccaccacgccctaaggttttaaaccacttgaacactagtgaaactcagcatggaagcaaatgtaagaacagagcttgattttagtgctgcaaatagattctccagatgtgattgaaattgttaaagcctctatctattaaaaatgtggagtgcttttaaaaattgcctattaaaactataataatatggatttcttaggtgtatcatacctgagatgttatagaaaagcacattacaggaaaagactaatggaccatttcagaaatggttcaataaaataattgtgaccatttcagaaaacatagttgtcattgctaaattcattaaccttctcttcacttctccacccagaaataaggcacatttttggccaggtgttgaccagaaagtgcaaaaccataggatcaatttggtggaccttcgtgaacataatttgtactgaaagaattggatgggttatatcctgcttgccgtagacaatggttagtctatatcccagtccacactgccttcccctatgcccccagccagagttttcctttctttgccatttatttcagtgacaaaatctgagaagcactgtttagttgaaaattcccgagggcatttaaatatatcaccaccagctttcactttttgttcattcttgaacatagataggtaggaggaaaaattgcatatagctttactctgtggatgatggaatagcattgggtaaccgagtgtcataaattctaccatgagcaaccctaccattgaggaatagaatcattcactgttagagcaggaaagaatcttgttctgaccgccttcttgtacaactaagaacactcagctagagaggtcatgtaattactttactatgtgacaaaaccaagacaaggacagggtctcttaataccctctccattgtgccttccactccactctgtgtcttccaagaaccaggttgtgctgaagtcagcagaatggcctgatgaccacaaaagccttggctcaggatgctgagagtgtgatcagggacaccgagcaaacagtggccaagcttttcctttgcctctctgctgtgtctgttgtttcctttactttttctacttttacatcatgctgtaccccagagtttacttgttccaaatcagaccagtgttgcagggagagccctggatttgaaccctcactgcaccactcaccagttcttatctgacctgtcgggcgctctgtgtccatttcttcatcttcaaaatagaggtgacagttcttcctccctggatcgttgtgtggwttaagtagcacatggtagttgcttccttccctttgaagaagaaagtttgaggcagttaaaaaaaaattttttaagacatcagttctctggttgttcttgctccagattaatgagaaaaggtttcttctgtcaaagtacttatatattcaccctcttcttaaactcttactacagactttctaaagattcattgaagcagttatgtaatagacatttattgagtaccagttgtgtgccaggcagggtcacaggtgctggagccaccgtgacaaaggagacaaagtgcttatccttgcagagttacttctagtggggaagacaggcaataatccgagagataataaatgtacaccacggtatcaaaaggggcaagtgcgccaaagggtcaggttgagacagggccggagtgacgatgccaggtgggaggaggacttctttagatgtggtatkcagtgaaagtctctctgagcaggtgaaatgtttgacagagccatatgaatacctggcgggagagtgtttcaggcaaaggaaacggtaagtcagaggccccaagagaggaacaggcttgctccatttgaggagtaatgaagaggccagtgttgttggagtagagtgactggcgggacactggaataggaaacagtgaggtgtgcaggaactggagtatgtctcaccatgtggccataatatagaatgttggcaatacagattccaagtatgatgggaaaccattggtgagttcaggacagaagaatgacctattgtgatttacattttagaaggcatccccctgactttttatgcaaagaatagattgttgagggatgagagtggaagcagggagattaattagaagattatctgtggtagcccaagcaagaaaggatggtggcctgaccagggaggtcatcctgaaggagagatcatcccatacacactgtttcccaacctgtttaaatgtctatttctttgtaaagccatttatctttaaatatagctatggtacttttcatatttttacaactagtcttttcattcactacagactgaaaatcattcttatccagtcagtcataaatgagtaaggacctgccagtgatgggtccaaaggctgtctcttgttagcccaaacttagtttcttaacccacaacwattgatctttctttcagtgagcccttagaagcatacatctattttggccccgtgtactatcagaagctgaaacacatggtgctagataaaatgcatgcccgggcccggggcccacgagccgtccttaccaggtaagagaaaagtacttacaaaaagaattgataatgcmgtcaagtccaccttgtattttccagatatggcaaaaagcagactcaacaaagtttctgttttcctgagatgtcaaaatttggcaagtttggcattaagaaaatcatatrtgtatgattaaaatgaaaaagtagcagccaattaaaaaatatttcacaagcgcaagagcaaacccaccataggtcttgccagtggactcctaacacaactatttactgtgtaaatgtctgcaaatatggtcctatttataaaggtccatacaagaagatgtgtatgtatatagccacacacacattgatatacttgcatgtacccatgtgcacacagaagacacatgcagacattatttggtagcataaaccacaattggagttttttaaaactaatgttattgaagcataaagtacctccacttgcagacttatttgagtaagctagaggaggttaggggccacatgtgccccattcacaggtgtaccctcaatcccaagcacaatgtctgtgkgttaatgaatggataaatttcttgggaaagagaattatagctactaagtttcacatgttcttagtgctactttttccagttggagatgcatagtcgagggcagtggttctcagccagggatgattttgcctcccaggggacatttaacaacatctggaaacattttcagatgtcccaacttggtgctggggaagtagctactggcatctagtagggagaggccagggatgctgcaaggacagccccctacaacagagttacccagctcagtatgtcagcggtgccgaggttgaggaaccctgggctaggggagggaacccaggccttggagtcagacagacaaggctgtgatctcatctccaccttttcattccgtcacaagccttagacagatcactgatgaccacagtctgatgaaactcacagcttaagcatttctcatatttaaagtggagacaatagtacctacttaacaggtgccagtgaatgtcaagagtgtgaatacagaatgtgtacagcgcccatccacaggtggcatcagcaagcatccagttccctccccactttcactgagcactgcctggatgtaacaatgtagagaaggggcaaggatgaggcagctcatgcttggggtttcattttttttttaagccaagggagaggtgtagttgactcaattctttgaccatttaaaactgagcacatgcacgtgtctgttgaaatgatagacatatgtgtgcttaaaactgcaaagagggaagagaagttgattctcaagacaataatcacctcagcaatggtaccgtaattgggttagatgtgtttctcccctaaatgctgtcccctcctaaacttccatttcagttacaacatccaaaaactatttcagagtaacataaatgtcaaagcagttatttcctatattttgctttgttgtgtagaaaaagttattactttggtaacttttgtctcttccatatgaagactgcctcgagtgcgtttgtctgtagttggttatcttagttggttaaaatccaagtattggattctgtccacatgtggtctgtctacctttacctcgttcactgacctcaagtgaagggagcaactacccatttgtgtttctaccggcagataaaaatgtatagatgtgctcagttatgaagtttccactataatgtgtttatttagacgtatttgtaagttattcatgtgtatatttcctttcaacragtaatctacaacttctttgatttcacattgaaactcaaccacaacaatttaaaaaaatcttaaaatttcagtatgtgttggcataccctgtgttcaccttcttaattctttgggagactggcagcaacaacaaagattaaaagatgctatggaatacagcaaacaaggggtgtatggtcacccctgctcaaagattacctttaagaagcctgccagggagcttgcttttttttccccccaaataatttgtgtgatccatgcctacatggggttgcctaaattgttcagatccccctaattttagctacacctctgggtcctgtattcttaacctcttaaagtattctcaagcccagcatataaaccacagggaatccattcaagaggctaacagctctggcagcagctactggaggatccaggtttcccccacagtctattctgcttagtttttctgcttttaaataatagaatactgagactctttgaaaatacttaaagacattgtttcctgatttgaaaactctgctgtcctaataataatgatagtgatggtaatagtaatggtgttttctgtgattatatattaatatgttattacatcatatgatattatgcaattatrtattcatttaaccataacaaccatcaatattacatcttttctcaattgaggctctttgggataggtgtgcttatgcacttttacaaatgaggctaagcagcgtgtccaaggtccctgtccagttattgatttggatccagatgagccctgctccaaagcctcgtgctctctgccagcatgtgatgctacctctttgtttgtttaacagaataataacacatttgtctaataacttgtttcaaaggcaacccactgaaggacggtctcgtgatggtggcttgcgtctcggggaaatggaacgtgactgtttaatcggttatggagccagtatgcttttgctagagagactaatgatttcaagtgatgcctttgaggttgatgtctgtgggcagtgtggacttctggggtattctggctggtaagtggataccatatgtctcccataccacaccccttgcctcttaaatcacagctcaagaattgaccctggatcctatccgcatattctccagcctctgtctgtgatcactaacataccctccctcatgcatgtattcctgtcattggggatactctgtgtacatgtctcatttgtctacatcatgatctacttcctacacaactagaggctaagctcccaaggagtacaaactttacctccttttaaatattctctcaggtactttttataacactatttgcctgtgaaaatcctacagatgcattgtcgggtgwtagaatcrcagtgtgttaaagaaactctttagggaagattacatcgaatgctttcatttgtaacttcagacccaaagagccagggatgctgccccaggtcttatagcaaattggtgacagagccaagagccaagaccaagacgacctggtaccctgcccccttgtctgtactctctctgccatggctagctgcttcacacttgtactgtagattctgtgagggcagaaaccgggtctgtctcagtaatttattcagcaaacatgtagtaagtatctgctaagtgtcagacactgttctaggccctagaaatgcagcagtgaacaagacagtggatggctgctcccaaggagcttatcttctagttcattctgattgcatcctgtcatgtttaccctcatttctccagcctgggacctggtagatgcttcataaaaaaatactggttgaatgataccctgcatttgtaggattgccaataagtaaatcatgtcatttgtaaagtttataatttctgtgtagcatttggtacacaaaggtcaccttaaaagatgatgctggatgttttttgtttttgtgcagttgcaccacctttcctatttgtaatgattccactctcaccagagaagaaaaagctcacttagggttattcctaaaacactcctgtaggcaagagaatccatagttccccaaaagcaaggggttttttattttgtttttggtttttgtttgtttcaagacagagtctcactctgtcacccaggctgcagtgcggtggtgtgatctcggctcactgcagcctcaacctcccaggctcaagcgatcctctcacctcagtcccctgagtagctgggacttcaggctcacaccaccacgcctgactaacttttgtatgttttgtagagacagggtttcaccatattgcccaggcttgtctcaaactcctgggctcaagtgatccctcccaaagtgctgggatttataggcatgagctaccatgcccagccaaaagtgagttctttacttacttttcaagcagaggcaaggtccaacaagatctaagacacaagctacagagcttccagcctcaccccctcattgcccctcacctgccctccccagagtgccttttctctagataggggccatccccaagatagagttaggcccaaatagcattcattgctggggtttgaggaatttgtgggccaccttttccccattgagtccccatcgtagtttccttccagacagagcctcaacttcttgccatcctgagctactaatttctaagttgaaaaaagccaatcacaagttgaacaagtgggctccttaaaacgcagtgtatcccttgccagataaatgtcaaaactttctggccagttatttcatgattttggtgaagactctcgtctgtaaggagatcatttcactttaaaaactaacagaagaggtggccatttgcggttcatctttcataaggttgcagaggtgacatgattccaaggataagcctagctctttcttatatgaatgagatgggggtttgcttcagtcctgagatgtctatttgtcttttgaaatgcatattgagcttgctttttatagtctgggctgtgcaaccaaaaagaaaaaaaagaaaagaaatcatgtaataggaagatgcctggatcctagttccactatgcttaaatcttcaaatttgacacaaggatttttaaataatttacttcgaaaggatggtacagaagaatcacgtcattaaaaatagaggtcatggaacttcaaaaagagtttccttttctcttcctcccccttgcattcttcctccctctccccacccccggagaaaaaagaaaacagtcaacccgattcacttatgtgctttgaaaaccttcccctctccgccactggttacccagggaaggtaatgtaagcaagaagacctgtaagcagcrattgatccttcagcattattctgctaaatgtatatcttctttcctgcttcatttctgtctcatttagagagcatctgatggcagtgtctgattttgaagcgtatgtattccgtgtgtattgtatttgaaatcctttgaaagaggactaaatcaggttatacagtttgagggtctttactgtaattaaacagacctcaatatatactgtatgtctgattttgagtggcctacttatacccttgttgccaacagaaaaaaatcctaatccattctagtagtctagccgctgcctcgggtgctgctttctggccgaggagcgtaatgatgctgtcatttttcccatcattacctgatcatgtgtgctgggttgagtgggagggagcatgggcgtcgttggaggaagtcgctctttaatgagccacacaatgaaggctaggtaattagagcagttcrgaaccttgaaactggccttttgtcagggatttgcacattagtgaggcattgctatggggatgtttacagcacgactgttgttctacagaagacactaagggcataagtcacaaaagagaggtccaaaaggaagacttcaggaagaagaaaatccctattaaggtaattagctcatagaggatgtttcactggrcagtcatttctcgtgtgaagccacagcctcccctttttgctacctttgccctaaaaaagccgttcattttattgttgttcacgtcaagtttctacctttgcaaattgttcagatacaaggtaaggtaaggttttatacacacacatgcacgttggaacattttaaatgatggagaagtatttaataatagagaagattaaagggctttctggaatatgaatcagtacatatggaaatttaaaatagattagcttggatcrgagtcattgggtaatgtactagtcaggagaagaagcgaaaggtacccccgttaaatgcatttccccaatttaatgaaagcatgaacatgattcctagataaattacatcaacccaagcacattaaaaacgtaatttttgaactcgaatgcattaaataggtctttagataatcttttaagaaaaagtaactcaccaagtttgtatttgtactgttaacggatcaaatacaggttaagcaccctgcgtcccctcatcataacatcaactgtgcatttgtgagggttagtcttctcccattctcctcctcaggaaactctgtctgcatagttaccaccaccacgtgcacattctcagcctcagttcttgcttttcttttctaaaataatacaagctttattttactgattgcaaaaatgatccctgctcattgtaaaacattcaaaagttaccacaaatataaagtgagtcacattaattcccaccacccagagatgaccactattaacattttggtgactctttcaagattctgataagggcagaaaaatacaaatatacacacaaaaaacttaaaattttacgtatgattttgggggctccatacacttacaaaacttgtttgagggcccccttgggaccatgctgatcaacaaactgcttttttcacctcacagtttgtcctatacaccttccatttcaataaatgtgtgtccacaacagcaggtctaatggcttcacagtcttcttctatctaaatgtcccagtggacatttgcatattctcaccttatgctgttataaatagtgtggctgtcagcattcttgtgcacatacctttgccacttttgggattacaaaatcaaagaatatgcacatttacagtttttacacacactgtcttactgccctccakaatggccaatcctttgttcactaaggaatcccccttcaattcctggtcagcacccgatcttccaagcctcagttgctattcttcttggactcattttcctcctcgttaactgtgaggacctakttttctacctgttaagagtcaggatttgtactggatacctactgtcctagctgctgcagacccttgaggtgtagggtaaggttgtattttggtctgaaacctgaaagaataattcactttctccccagggacccttctacagttgtagccattgattaagaactaagttcagtttaccagctcttccrgaaagaagagaaattaaagtcctaattggaatatgaggcaaagtggttaggaacatggactgttgttgctagggttaagtgggaacatatgtgcacatgcacacatacacacatttcttagttttgcacaagggacaacatgttgtaagtatagtacctccaacactcatagaaatcaccaagcctgaagagcactagacaagttaccatttgattgaataccactgtcctattcaaaagtcttgtcttttccatcagactttacgtatctcagtgacagaaatcaagttataattgttgagcgccttgcctagaataatatactgctagtatagttgatgcttatcaaatacatggagattgattgaattggtttaaaactctttaaacaatgaaaaaaatttaaatctgagtaaatttcccaatggttcagatttctggagctctttcaaaacagtatattggcaaatgttttacattttaaggagaaagggctggatgtgtggtaacaactgactcaacttgcrtgctttaaacactggagggaatggtgtttgtttcctcttttcttttgcttccttggatgtttctttttttctgggcacatacgtacttatatgatagtgcaactgaacacttaggaatagaaagataatttgatagaatgataatagaactttatagagaccattctcacttcctacgtggaggcctttgtttccgagttgctgtctgtctaacgcttgctgacttgcgtttcaggtgccattactgcaagtcatcctgccacgtgtcttccctccgtattccgtatgcctgcaagctgctcttccaggaactacagtctatgaacatcatccccaggttaaaactgtccaagtacaaygaatgaggatggaaaaaatgattattaaagagaacaagtgatacatccaatgcaacggaaagcagaagggatttaggactacgtctcctcctgtgaagaattcccttgcgtattctctctctaaaacaaccaaaaaaaaatggagaggctttttatatactctaagactggctaaacaaccttgatcattgagcctcgagccatgggagagatgctgaccatgtggactgcaaggctgcttgattcacagatggatgtgacctaaaggataaataagctattacttatgtgctgatctcttgacattcactcattagaagaccttactccttcaagcaaatgtttggggtcaratttaccatatcttctggctaaccatattcaagattcttctgaaacttggaggatgtaaagaatccatttgatttggtcagcctggcttttgtcgtggtggctggctcggataaattttcccaacaattaaatcttgcctttacacacccaaactttgtaattttagtcttggtgaaatataatgaatttgttcctaccttgtcaagcaagaatgtcgtcttctcctatggactcaattgctattattttaaacctgcatgattgtaccatgcaatactattcgttaaatatctgaatctaaccccgtggctgctttgtcatgctctgtcccttccatgcctgccaggatgctagctgtccatttcatttttaatctgacagacttccttactcatttctaatttgttctcaactgctgccccaaagccagataaacatttgtgttaaggattgtttgtaaaatcagagtcagaaacactttgagtaatggcctaagccttcattcccagcatgtcacactgaagatgttcaacagaatattaataggtattatataccaacaagaatcaagctcctatgtcaaactaaggttgagaaacggggtaaccaagttaaacattccacaggactttttcaaagcccttaaagatcccaagctaatgtgtactgggtttcaaaagagggatgttccagggaccgaggctagtcattgacttgagaactcaacctcacttcttctttttcttcacaataaaaaatttctaacacacgtgggtataacagtcatagcggtatcagtgaaagcagaatgaaagacactgcaggtgagcaggccttcctcagccctcatggcagggactcaataggtattcttttttcttttttttttcttttgagacagggtctctcactctgtcaccaaggctggagtgcagtggcaagatcacggctcaccgcagcctcaatctcccgggctcaggctatcctcccacctcagcctcctgagttgttgggactacaggcgcatgccaccacacccagctaatttttgtatttttggtagagatggagtttcgatgttgcccaggctggtcttgaactcctgagctcaagtgatccgcccgcctcggcctcccaaagtgcggggatctcaagtgtaagccactgcgcctggcctcaatatgtatttcaacaggtatttcaaaaaggagtttgaatgttcagatctttgctatgccaattcctttttttaacctagcttatagttctcaaaactgatggtacataaggattgccgtactggattaaatgtacaatcatactgtactttgtgggctttttaaggagttttctagggtgatcctgattatctcacatcgtgtagcaaatccacttcccaaatccatttgccctgcagtgtgggacacaccatttcagtgaacactcagagggtcaggctggaagagttaaaggcagtgtgctgggtgctggcaggaggacttcatcgttcatcattcagtacctgccacgtacaaggcactggactaaggataaaagaacaggacagggcctctgcctgaccgaggacatagtccagtggaggaggccaagatatatgtgctggtcatggagcactgccctgcagtcagtgctgaggattaacctcggcagtgctgagggagtgcccagggcaaagcagccaacagtgctctgaagatttggaaacacttcacaagtgtgagtatgccctttatacatgaagaaactgacgccctgagtagctaagtgactccccagagcctcactgctaacaagggggacagcaagggccttgggaccaggcattctcacatgcagggctttgttctggttttatctgtgattatatatttttcagtcaccaaaagtgatagtttttaaaaaaattcagatgcccttgaatggttgtatcttttataaatgaacatccttctcaggaaaccattccaagccagtctaatctttctgagggagtcacctttctaagtgtctaggaaattctaagtttacaagatctagaaagtatgggttttcaagtcgagacatccttaaaggaaaaaattctatcagattgatatctcaaaaattagcaactgccacatttgaatagctatttgactctgagaaatactttaatgaaaagcagccagacaccaggcatggtagcaggcacttgtagttccagctactcaggaggctgaggcgagaaggtcatttcagcctacgagtttgagaccatcctgggcaacacagcaagaccccatctctagggaaaaaaaaaaaaaaaaagcagccagatttggtaagctagtcccactacggttttatttatttgtaagttaaaaacaattaacttacaaataactttaatagttattttttatttaaagagtttatttaaactttatttaaagagttgtttataaataattagattttcttttccagtaatgatagagtaaccttttacagaccaccctcaaagcacttttttccctccagtcttttgcgaggctggaagtggcacaggatgaggctgaaaagccacaccaaagccattgaagaggctgtgaccctgacatgagctttgacagaatcaaagggctggggagacaagactgtgggcacaaaattgcccagatgccaggatcagagaggtcaagatcccatatagaaaggaagtacattgaagtgagctcagcttcttcacaactcttctggatttgccagctccagctaataaaatgtgaaatcactgactgggtggatttaaacgacagagatgtattttctcacatttcaagaggctcaaaagtccaagacaaaagatgtgcacagggttaggtctagtgggcctctcttcctggctgcttgtggccaccttctcactgcagcctcacgtggcctttccttggcacacaataagggagcatgtgagtgagctcaggtgtcactttttaggatgccagtcctgttggatcagggtcccactcatatgtcttcattcaaccttaattattctcttaagggccctatctccaaatgggatcatgctgcgggctagggctgcaacatgtgaatttggggacacacagttcagtccatcatacccctgaagacatttgccaattcataacagcacggatggaacttggcagtatctattaaagctaaacatactcagcaattccattcctagctgtgggccagcagaaatatgagtgtgttatcagtatgtgtgtacaaaaatgtttctagcagcattatttatagtagcccaggttgtaaataatccctgcctattaacaacagaataaattgtgggatggtcattgatatggcttggctgttatgccccacccaaatctcatctcgaattggaatccgcacgtgtcaagggagggatgtgtaacccccacgtgttgagggaaggaagtgattggattatgggggcggtttccccaatgctgttctcgtgatagtgagtgaattctcacgagatctgatggttttataaatggtaatttttttctttgctctcccactctctctcttgcctgctccatgttaagactcgtcttcttccccctctaccatgattttaagtttcctgaggactccacaggcatgcagaactgtgagtcaattaaacctctttcctttgtaaattacccagtcttgagtagtatctttatagcagtgtgagaatggatgaatacagtgatacaatggaatactatacagcaatgaaaaatgagctgctgctacctataatatcataggtaatctcacaaatataatatagggcaaaacaatttaagcccagatggggtgtggtggctcatgcctgtaatcccagcactttgggaggccagaggtgggtggatcacctgacgtcaggagttcaagaccagcctgacgaacatggtgaaaccctgtctctactaaaaatacaaacattagccaggaatggtggtgggcacctgtagtcccagctactcgggaggctgaggcaagagaattgcttgaacctgggaggcgaaagttgcagtgagctgagattgcgccactgcactccagcctgggcgacagagtgagactccgtctcaaaaaaaagtaaataaataaagttaatcccaaaagaaacatatcaattcctttaaagctcaaaaataggcaaaattaagatataatatgaacagtcataagatttccctgtgcagagtggggtggctaatggctaagaggtgcaagagtggggcttctaggatgctggtaatatttttttgacctgagtgctgattacatgggtgtgttcattttatgaaaatgcattaagccatattcactgaggactttttacctttctgaatgtacatcattgtttaataagtttttttaatctttaccaggtgacttaagagtttaagaatacaagctctaaacctgtgtttcagtctcttcacataatagatatgtcactccaaatataacatattgtgttcttttagttttcccatcttcaaaatagggaatataatagtaccaacacctggggctatttttaagattaaatgagataacgcatctaaagggcttaccacagtgcctggcacaaaagaggtgttcacaaatgtttgttattgccttcattgatgataaccagtaatcatatcatacaccttattaacagcactgccaggactggcagtgtacaactgtacaacttcatcaggcaagggttaggaaaggcaaaccctgagtttcctttcgaagagagtttggaaactaggaccaagtgcagaacccataggattttgcaaaagcgatttgtgaaagctgccctgtttaacaatgatgggcggaaggaaggtggtggacttagtgagcacacttccctggaacaaccattttagcactgacatcaaagtgaggcctgtcgtcggcgcgggagtcccagaatggtttcatgaaacccacagaacgttctcaaaatgcttccatgtggtgagagtcaagtaaaggattgaaaaaaacacagaagtccttgattgggtgctacataatgggatagttttcagctgcttcagagcattttggctaacacctttatttgcagtaatgaaccacatgagggtgagcacattagggctggtggctgggcccatccgttctccgccgtctgagtaatagaggagccagtttcggagagacctgtaaataattccattgtgaaacggatgatcagaaaagtgactgtaaaagtagcacctctttaccatccatatttactccatatgtgtcttgaaaacagtttatttcatttgttgaccaaaagttgatttttactacttcagcccacagggccaagattagtgggaaattaatgccaagctttaaaaaggcagttttaaatggggggaaaaagtagtagcaatctagaagtatatagattactaatgccaagctaccagtttgagttttagaaagaggcttcagaagcagtgaagagatttgcttcagcaaatcagtcttgatcaggatgtcacggcagaaaatctcagcacaaccagacactcacatttttactcacaagtctaacatctcacaccatgctcaaagtatttttcaaggtcaggtaatagctctcgttccatgcataataaattttaagtctggctaactcccagtcatccacattaatggaggcaaggtgtgatgtgaatcaattaaaacatgatgaattcaacatcttttgtattggatgctgggatgaagtttgcaggcacatttttaatatagcttgcatggtggtttggtgagtttgctgtacttcaaatagtgactcctaggaacactgtatttgaagaaagtggaataataatgtcttttctggctaagtaatgacagatctttggagtggggggggtggttagccacactcaactgggatgcctctaggccactagtattcaaagtttggtcgctgaaccagcaacatcagcatcacctggaaacttgatagaaatgcacattctcaggcccctccccaaacctgctcagaaaatctgctggagaggctcagcaatctgggtctggaggtttccgctttctccctctagcttcctttccactccctgctactcccataaagatatcccacttcaaagggggcctaagtgagtgcttggaaggccacggtttctcttcctatctcaactggtcatgtcagtctgctgtccaagtccttgaagggatgggac

SEQ ID NO: 94147 - DNA, 41402 bp, Homo sapiens
  misc_feature (1)...(41402): n = A,T,C or G
ggaagctgagccaggaaaaatcacttgaacccaggaggcggaggttgcagtgagccgagattgcaccactgcactccagcctgggcgacacagcaagaatccgtctcaaaaaaaaagaaaaagaaaaagaaaagaaaaagaaaaccaccaacattgcaataatcctatacatatgtacatacatctttgcacaattccacaactgaattgaattgattgaattcagtattcctagaatttaaactgctgagttacaaggtgtgtacattttaaaatttttgatggatagggaacttctgtgcagacttagggattactcaactctggtcctgaactgctcccctctgtaacctcccttgctctcctcccaactttgtccacatttctttgacaggggccacctagaggctaggctgtatgggacattttgggttttcttggcctcctccaaccagaggctggtatccctggtaaaaaaataaacaaataaaaataaataaataaataaactgaccaggctcgccagttgtcaacctcaaggtaaacagagcttcttggcccagccctaaccacctgagtactctggcgctggctcagcctcatccaggaattcccagtgggctccagcctagccagctccaaaccccaaatccagagccacactttcagtccagcctccttctgctgggaaagcctgcaaaagagaagaaatgctgctctttctaggggaccttccagatccatgaaggggacactatgcctccaggaccttccctccccttgccaaagagcagaaagaacggaagcacacaacccaggagaaaacaaccaaagaatacttataaaaggaacttatctgcatatgcaaatatacctcaaaagacttgaggaggttcaatgaaaaagactgtcagagaaggctccctgggtaggagaattttgagctggttttggagaaggaattggtgggactagcagggaaggaagatcctggaaaggagcagaggtagtcattgttaacatgtcttgagcacttattacttgccagacaatgcactaagaatttggtgtaagaattttgcagagtggggcagggtgggtggataatgaggatagctcaccctatgaagagcaggaggaggtactcccattatccccattttagattgttaaaaattataggccgggcgccgtggctcacgcctataatcccagcactttgggaggccgaggcgggtggatcacgaggtcaggggttcgagaatagcctgaccaacatggtgaaaccccatctctactaaaaatacaaaaattagctgggcgtggtggtggacacctgtaatcccagctactcagcaggctgaggcaggagaattgcttgaacctgggaggtggaggttgcagtgagccaagatcacaccactgcactccagcctgggcgaaagagcgagactccgtctcaaaaaaaaaaaaaaaaaaattatgggaggttggctgggagcgggggctcactcctgtaatctcagtgctttgggaggccaaggcaggcagatcacttgaggtcaggagttcaagaccagcctggccaacatggcgaaacccgcctctacaaaaattagctgggtgtggtggtgcacgccagtaatctcagctgctgcagaggctgaagcaggagaattgcttgagctcgggagaccgaggttgcagtgagccgagatcgcacccctgcactccagcctgggcaatagagtgagactccgtctaaaaaaaaaaattatggaggccattgttttcaactgagctcctacactaggccccaaaagactagaccaaaccaagatggagtaattcgtgctaaatgccatgtaatccaactgaaactttaaagaagcagatagattccaaaacagaccactttttcctgaaaacaggagagtccaatctacctaagtcagtttaataaggaagtcccctctgctttaactccacaaaaaagtaacctgaagtacctgatgttaaccaatcaggttttttcctattgctgtttcctggttcccaccttacaaaacccaccattctgctattgcccagtggaagctttcattctattttgtagaatgggggctgccccaattcatgaatcacaaataaaagtcaatttgatctacaactgaacttgtaagggagactgagtgacttgcccaaagtcatatacccagcaaataccctagtcagggatctgccttaagtactcaaccacatattcaagtacaggttgggggagggagggggtaatgtccaggtagctactttgggcccctgcagagtgggggcagggtgggtggataatgaggatggtatctttcccctccccccaccacagccccctggaactacccccaaccccttcttgcctcccaggactggcaggcacctgcagttccctcttttttttttttttttttttttttttttgagacggagtctcgctctgtcgcccaggccggactgcggactgcagtggcgcaatctcggctcactgcaagctctgcttcccgggttcacgccattctcctgcctcagcctcccgagtagctgggactacaggcgcctgccaccgcgcccggctaattttttgtatttttagtagagacggggtttcaccttgttagccaggatggtctcgatctcctgacctcgtgatccacccgcctcggcctcccaaagtgctgggattacaggcgtgagccaccgtgcccggccctgcagttccctctttgtgtgcaatgccttccaggcccacccatcccagacccccaccactattctttcttcaatagtccccacaagtcctgcaggaccccctgcaataggctctgggaagagggagggactggcagagaaatagcttgtacccagaagagaaggggggtgggccagagcaagaccaccttgtgctacagagctggaaaaggattgtccccgacacttgcatatctcattttgccctctgtgtctttgataaaggataatggcatggggaaaccaagagacccaggaagaattctaacttaggtgtgtgtggccccaaagtccttttgtgttttttgttgttgttgttgtttgtttttttgagacggggtcttgctctgtcgcccaggctggagtgcaatggcacgatctcggctcactgcaacctccgcctcctggattcaagctattctcccacctcagcctcccgagcagctgggattacaggcacccgccatcaggcatggctaatttttttttttgtatttttgtagagatggggtttcaccaagttgtccaggctggtctcaaacccctgaactcaggtgatccacccacctcagcctcccaaagtgctgggattacaggcgtgagccaccacacccggtccccaaagtccttttgactccacagtacttcttctgggtttttggaacaaagacacacaggatccagctaaactgcaggacagatttaaagctgggcccctaaaaaatagggctggagctgcttgttaaattcctgttgcctcattgcccagtgggtcactgcaggctgggatgagctacagggtagaggccgggagctgcagaaactgagctgccatccttggggaagcatgcccaccatccccactaccttggaggtagtgcgttctaggaggtagaagccagcatggctggtttctgtcagggccctcgggtgtcctgcagagagtggcatgcaggccctggatcccagggcctggtcagtcttctggctgagcagaggctactggccaagcttccctaccactgctctgagcccctggtggtcctgtgctctctaacacatgtggtgagcagagcagagctgggaacacgcagagactgctggaggccagggagccaaaggtcaagagagcagaacaatgccgaagcaccatgcctatggtttccgagtgcccctagcccatgggcaacttccatccttggcttcctgccacatcatacggctccccattggccctcccttgacacactgtggttatgtaacaatggttgacctctggtttcttttagaagaagaaaaaaaaaattacatccacaattgtcacaccagcctaaggaaaattcctgctacctaatactgtcagcccactgtttaccttacacttctctcatgtaaccctcacactactctgagatcatagttaattattctttttaggagaggaaacggaagcaccgagaggcttcctccatcgaaatgacacgaatggcaaattgctgagttgggactgaaacccaggtagaggaaggaagcaatgaatggaaagaggtggctcagctggaattagtaggcactcaaattgtgcagtttttttttttctggcttcttgtaagggtaataactttgtttaatccactcaaacatttatatgtaagagtaattttaaaacttcagtcttcgccgggcacagtgactcacacctgtaatcccagcactttgagaggctgaggcgggcagatcacttgaggtcagaagtttgaaaccaacctggtcaacatggcaaaaccctgtctctactaaaaaaatacaaaaattagccaggcgtggtggcaggcgcctgtaattctagctacacgggaggctgaggcaggagaatcgcttgaacccgcgaggtgaaggttgcagtgagcctagatcgcgccattgcactccagcctgggcgacagagtgagattccatctcaaaaaaaaaaaaagcaacaaaaaaacaagcaaacaaaaaagcttcagtcttggcatttccttgtcaaattggaacagctgttctggactgcagggttcacggaggtgagcaaaactagccagtcggagggtatctggccagctggctgcggaaaaggtttcagccccggacggctgagcccaccctcagctcaagaggctaccaccacaagttatccctttcgatttaccagttgcagtccagcgctgctctactggggacctgaatgctgccctccattttgcaaagcctttctacatccttccactatatggaacccccaaaccacaactgtggcacttttattttaattatttttattatttatttatttatgtatttatctcttgaggtggcctcgctctgtcactcaggctggagtgcagtggagcaatcacggttcaaggcgcctcgatctccgatccccggggctcaagcgatcctccctcctcagcctccggagctggagttacaggtgtgcgatgcctcgcctggctattttttttcctttttgggtagagacggggtctcgctatgttgcccaggctggtctccaactcctaggctccagcgatcctcccgcctcggcctcccaatgtgctgcgaatacagactccagccaccgcacacagcctacttttatttctttgaaaaatgaattcgagggtaaagggggcggggttgaggcagatgccagaatctgttcgcttcaaccaagcagccaggctgcctgtccagaaagccggcactcagtttcctcaggaaaacgaagctaaggctcccattcccctcgctaacaacgtcagaacagaggacagtttttagatttcagggatcttaaatagattggcagttcctggagaataaacatcctttgcttttctcctgcacacttttgcctcaggccaccccttcccgcttccaaagcccatctcttccaagctttccgcacgagaaaacaagtgagcccttctcattggccagattccctgtcaatctctccgctatgacgccgagtggtgccttttgaagcctctctagtcccgcctccctaacctgattggtttattcaaacaaaccccggccaactcagccgttcataggtggatataaaaggcaagctacgattggttcttctggacggagacggtgagagcgagtcagggattggctggtctgcttcgggcgggctaaaggaaggttcaagtggagctctcctaaccgacgcgcgtctgtggagaagcggcttggtcgggggtggtctcgtggggtcctgcctgtttagtcgctttcagggttcttgagccccttcacgaccgtcaccatggaagtgtcaccattgcaggtacggctcgcgggggggactggcggtggagcctccgcgcggcccgggcatctctctggccgcccgtgacgggtgaagctctggggctgcggtcaggccggcgaccggcttgggagcccatattctccattcccggttccggggtgatcgtggagaggcggaagccccttctggtgctagtagtgaagtatgacccggcttccagggtgtcgtgcgttgttgccctgtttctaggggcaggagtccgttggtcccgtagtggatccatgttacagcggcccgggtgcgacgttattgagtcgcgcgtacagatgctttcccctcctgccckctgcttgaaaacggtcttgaatgtccccgatcttggaaagggcagagcctagcacagtgtttctctggagcagctggccagcttacaaaagcgcccccttcctgagttcacaacgctcaggtggccaagggattgaacggatagccgcccaaactgctgctgccgaactagaattatttacggtgtcgtgtgctcgggacaccgtaaataatttataataataggcactcggtaaatamtgtatgcaggaactgaaagaagtgggtgtattttattgatgacatctaccatgttgctcaagaaaagaggtttccagacagacccacttggtgagataatatgtgtctgtttaacctgacacctggggacctggccgcagcgaatttaaattgtcctatttgtacaaaactggcaactccaccactgcctactaacagattgcaatgcrtgttgacatctcactatggtaggcattttgttcctagtttagggtaaacttatgattaaaaattcccttctttctctctttttttttaattgctagcctgtaaatgaaaatatgcaagtcaacaaaataaagaaaaatgaagatgctaagaaaagactgtctgttgaaagaatctatcaaaagaaaacacaattggaacatattttgctccgcccagacacctacattggttctgtggaattagtgacccaggtaaaatcaagctcatcaaaggcagttaacctagtagttgaaatggatactcttctttctgtacctttcatgtactgagtgtgacctttctgtatctctcatgtactgagtgtcactggaactggcctaaatatggtaatacttaatatgaacactttatggtaatcatgataacagaacaatgaatatagaataaaaataacagtatttctttgccttatttctagcaaatgtgggtttacgatgaagatgttggcattaactatagggaagtcacttttgttcctggtttgtacaaaatctttgatgagattctaggtgagtaaatcctttaatataaagatctggtcaaatctttcataagaagtatcattccaaataaaaatttaaaaaagataaaagtaaaaacaaaaagtatcatttctaccaaacctgctgtagccagggctcctgtcatttcaatcagttgataaaggtgagctggtttcctggagcccrggaggttgagcttctcstagaaacagtactatggacaaaaattgctaaattaacaccttgttaatgccactcctgtgctgtttgggaacttttttttctatatcttacttagarttacagaatgtttyttaaaacactaatttcttacaaatgtatattttattttctttcagttaatgctgcggacaacaaacaaagggacccaaaaatgtcttgtattagagtcacaattgatccgtacgtcttttgcttartttttgttatgtagctcgttgctattgttagctgcatgtattttgattactggtgaagttggcttttcctaaacagaagttgagaaaagtacacaaaagcagaatgctaaaatgaaaaacctatggatacccaccacctagatccaacagttgccaacgtttttccatattttctccatcttttttttaattagttaatttttttagaggaaggggtcttgctattttgcctgggctggtcttagaactcctggcctgaagcaatcctccagtgttggcattatgggtgtgtgccatggcacgcggcctatttgctctggatcatttcaaaataaattacaggacttatgacacctaatccctaaatatttgagcaagcaccttcagtaattgctttaagtattctggcatctggagttttaactttttctcatgatgctattcaaacagtaaaccagtaggtggtggtagagaataatttgatctgacatttctgcttataaatgcggggtgtcccttagtgggtgatcagggtgcttatttcacttttttgttagtctgattgattatgacaaagtatacctggattttcctaaggactcaatatcatagtctttaaaaaatgttgagctagggccaggcacggtggctcatgcctgtgatcccagcactttgggaggccgatgcgggcggatcacaaggtcaggagatcaagaccatcctggctaacacggtgaaaccctgtctccactaaaaatacaaaaaattagccgggtgtagtggtgggcgcctgtagtcccagctactcgagaggctgaggcaggagaatggcatgaacccgggaggtggagcttgcagtgagccgagattgcaccactgcactccagcctgggtgacacagcaagactctgtctcaaaaaaaaaaaaaaagttgagctaattttaattagttttttttatagataataagtactatgtagaacaagaaccataatgtatatcgagttattaactaaaatatagtaccatccaagaattaacttaaaataactgaaataagttttcagcattttatttgagagcaaggcagtttatgattgatattggttttccttttttttttttttttttttgatggagttttgctcttattgcccagtctggagtgcagtggcatgatctcggctcaccgcaacatccacctcctgggttcaagcaattctcctgcctcagcctccagagtagctgggattacaggcgcacaccaccacacctggctaattttgtattttttttagtagagatggggtttctgcatgttggtcaggctggtctcgaactcctgacctcaagtgatctgcctgccttagcctcccaaagtgctgggattgctgggattacaggcgtgagccactgcgcccagcctgtttttatgtactttgttgagtgggaacgagatgtatagatgatcctcttgaaaggggtataataggcatgatgactcactcctgtaatcccagcactttgggaggccaaggtgggaggatcagttgagcccaggagtagtttgagaccagcctgggccatatagtgagaccctcatctctacaaaaaatttaaaaattagccaggtgtggtgatggacacctgtagtcccagctattcaggaggctgaagtgggaggattgcttgagcccaggaggtcaagactgcagtaagctgtgatcctgccattacactgcagcctgggtgacagagcgagatgctgtctcaaaaaaggagtgggagtggtgtataataatgtttccagattgtccttttctttccattgggcataaatcatttccctctgtttatcctaacattttaaaattttgtattttttcaacattatcagtgtctattcaggtgttggaaaaggtttttttttcctcttgactcctatttcaggaatgtcaggaactaagcatggtgggaaatgttcctgctgaatttcagaaggtatatatgaaaagtgccaaaaaaattgagggctgggtatggtggctcacatctataaccccaacactttgagcagttctcctgcttcagcctcccaagtagctggaatcacaggcatgcgctaccatgcctggctaattttttttatttttagtagagacggtttcaacatgtkggccagaactcctgscctcragtgatctgccctcstcagcctcccaaagtgctgggattacaggcacaggccaccgcgcccagcctgaatatacatattttagaaataatagtatttaaatatttttaaatgttaagcattcgtttaatgtgttgtaaaatacaattttcaatctttttttcttagggaaaacaatttaattagtatatggaataatggaaaaggtattcctgttgttgaacacaaagttgaaaagatgtatgtcccagctctcatatttggacagctcctaacttctagtaactatgatgatgatgaaaagaaagtgacaggtagagtattgaggggaaataacatatttgttgctaaaaatatatatatttaaatgactgtctgtggcatgagggttaaagatatggaaataaatctctataattgaatagctctgccagtgattaagaaataaagctgtcaatgagatagtaacaataaaatagtgtttcatatttatttgcccaggtggtcgaaatggctatggagccaaattgtgtaacatattcagtaccaaatttactgtggaaacagccagtagagaatacaagaaaatgttcaaacaggcaagtaaataagtgtcttgtaccttaatgataaatggtagtagtatagccatttataatggcattaatgattggtttaatttaacataatttataagctattgaagtatggaaaattataagcatatatattaggttattaggactcataaatttatgttatttacttccagtttgtgagatgacttgaatttttcatgtttcctattctttacttccatagacatggatggataatatgggaagagctggtgagatggaactcaagcccttcaatggagaagattatacatgtatcacctttcagcctgatttgtctaagtttaaaatgcaaagcctggacaaagatattgttgcactaatggtcagaagagcrtatgatattgctggatccaccaaagatgtcaaagtctttcttaatggaaataaactgccagtgagtattttcctggatgttaaggataataagggattttgtaatcattgtcaagtgcaaaattgaattttttcccctcccatatgtttttgtttgtttgtttgtttgtttgtttgagacagagtctcacactgttgcccgggctggagtgcagtggcacgatctcggctcaccgcaacctccacctcccaggttcacgcaattctcctgcctcagcctcccaagtagctgggattacaggtgcctgccaccacacctggctaattttttgtatttttagtagagacaggtttcactatgttggccaggctggtctcgaacaccagacctcatgatccacccgtcttggcctcccaaagtgctgggattacaggcatgagccactgcacctggcccaaccatatgtattttcttaccacttctcacatatgttcttgaaaagagaatggtatgccacattttttaatcagctcattttaaacttaccgaaggaatttctttctcaaagaaacacctaaaataaatatttcatgtcctttttttattttcctttttctttcttttcttgataacctcgctgtgtcacccaggctggagtacagtgatgcaatcacggctcactacagcctggacctcccaggctcaagcgatcatcccacctcagcttctggagtagctggaaatgcaggcagcaccaccatgcccagctaatttttttttttctttttaatagaggtggggatctcactatgttgcccaggstggtcttgaactcctgggctcaagtgatccacccacctcggcctgtgtcctttaatgaccattcccttatgcctatcagtgaacatcattgcattggttttggaaagtcctcatagtctatcattgaacctattttttaataactttcttaatactgttacctttaattcctgtacaggtaaaaggatttcgtagttatgtggacatgtatttgaaggacaagttggatgaaactggtaactccttgaaagtaatacatgaacaagtaaaccacaggtgggaagtgtgtttaactatgagtgaaaaaggctttcagcaaattagctttgtcaacagcattgctacatccaaggtaattttattcttaaattattaatcatgatttatctttacatatatgtgttcttattgtttttaatatataaagtggacttgaatattgggctagcttagtataaaggaggttaaattagtttttaatgtttgattattataattttgaggatactgagttttacagtttggtatttttccttattagggtggcagacatgttgattatgtagctgatcagattgtgactaaacttgttgatgttgtgaagaagaagaacaagggtggtgttgcagtaaaagcacatcaggtatgtgcttttggcagttttctttttctaaagtcaaggaagaagagaaaggctataaataaagcatgagtacatttttagtggcttaatatcaacttctattgcaggtgaaaaatcacatgtggatttttgtaaatgccttaattgaaaacccaacctttgactctcagacaaaagaaaacatgactttacaacccaagagctttggatcracatgccaattgagtgaaaaatttatcaaagctgtgagtacttagaggaaaataaaaatagaaacacctgactttattttccattgcacttcttagctctgcagaaacaatgattcttctcatagtgagcttctccaagtcttcccaatctgaaaaggaagtaaaaaagggctttactttaactgatttaccaaagacttaatgaccgtctatatttcagtatttcccaattacattttaccattaagcttagatcacttttgaattaatctagctgtttaacaaacaccctcacttaaatgcctaagacttgctttcagtcaacacatccaaaattgaatttgttacctccatactcactgatttgcccatacaagcagccccccactctccaacaaaaaaacaacttcctatcttagtaaaaagccccaaccaacctctaggttgtataaacaagaaagctgggagccttcctttatttcccctcctctctaatccggtcaataagaatcatctcttggatgctgcagtagcttctcaccattatctcttttttggtttactacaataggttcttaaccttcatactggttaagtcctttccttggaatgcttttgagtgacttttgtgttaaaacacccatttttatcttcactctcatttgaaatctttcaatgacttccactcagggaaagtccaaattccataatttggccaacaagaaagatctgctgtaatctaattacacctacttctccaactcatctcagtgccagtttttcgtatattgtcctgttgcttttaaattactgaaaagcacagtgctcttcccctcctcagagtttattcacatgctaatccctctgcatgaaatacatccttttcacctggctactttaggtcttgtcctttcctcaggaaagcctttactttctacccttccccccacctaagttggttccaatataatattgaacataccttattagcaaacttyttgcttatccataacacttataacactgtaacttattttatttctgtctttttttttaggcagagtctcgctctgtcgcccaggctggaatgcagtggcacgatctcggctcactgcaacctccgcctcctaggtttcagtgattctcttgcctcagcctcccgagtagctgagattacaggcatgcatcaccatgcctggctaatttttttgttgttgtattttcagtagagacagggtttcaccatgttggtcaggctggtctcaaactcctgacctcaaatgatccacccatctcggccttccaaagtgttgggattacagccatgagccactgtgcccagtcttttttttttttttttttgagacagagtcttgctgtgttgcccaggctacagtgcagtgacgtaatcctggctcattgcaatctctgcctcccaggttcaagcgattctccttgcctcctgagtagctgggattctccagcctcctgagtagcggggattacagacatgcaccatcacatccagctaatttttgtatttttaatagagatggggttttaccatgttggccaggctggtcttgaactcctggcctcacttgatccaccatcctcggcctcctaaagtgctgtgattacaggcgtaagccactgcacccagctatgtctgtcttctatgttgtgtcttaaacttgatgaggacaagtgtctcaatttgttttatttgtgtctaattttatttatttatttttaatttttttttttggagacagcttctcactgtttcccaggctggagtgccgtggcttgatctcagttcactgcaacccgcgcctcccaggttaaagcaattctcctgcctcagcctcccaagcagctaggattacagccatctcaccaccaccatgcctggctacccttttttttttttttttttttttttttgagacggagtttcacttttgtcacccaggctggagtgcaatggtgcgatcttggctcgctgcaacctctacctcctgggttcaagcgattctcctgcctcagcctcccgagtagctggaattacaggtgcccaccaccacgccagctaatttttgtatttttagtagagccggggtttcgccatgttggccaggccggtctcaaactcctgacctcaggtgttctgcccaccttggcctcctaaagtgctgggattataggcgtgagccaccgtgcctggtctaatttgttttaaccactatatctccaacaagtagctcagtgctagcacaatataattatatagtaaatatttattgaacgaatgaaccaaaaggagcagctccctcagtggtgataacctgacatgggaagatgtgccaccctctatccagaaattattgttctacatctttttaatttttgaatcatttttatttgtattaaggctcatttgtattctagatttctgatagatcccttcttccctaatatgatccctaatatgaatcttctcgttttcaggccattggctgtggtattgtagaaagcatactaaactgggtgaagtttaaggcccaagtccagttaaacaagaagtgttcagctgtaaaacataatagaatcaagggaattcccaaactcgatgatgccaatgatgcaggtatatatttaataatgtttccaaacttttaagtcttatagttgttattttattcattaatggcataccacrgatatttatttttcccttgacagaataactatattcaacagaataacttgttaaaaatcggcccgtttcctattatggaagatttaggtcatttccatgttataaataatattgaggtgattattttggagtataaaacaagaatgtttatattatgatctattacctaacaaataattttgctcattatatagtaaattgtgttttatcacaaggctataaacagcatgttcaagttagtatatttgaggttgaactaaatgtgctaatattaatatgtatatttttattttagggggccgaaactccactgagtgtacgcttatcctgactgagggagattcagccaaaactttggctgtttcaggccttggtgtggttgggagagacaaatatggggttttccctcttagaggaaaaatactcaatgttcgagaagcttctcataagcaggtagaatataagacgatcttcagaatctaaatctaatttataatacaagactttatgcttatatttaattccctcattaggcattttaaaatatattttagacaatttgtgcttattttgagaaattaggtacrttgtagcctattttaacagacctttctgatgtagtaaattataagctaatagctcaaaatactggagctcaagaaaatccaagcaacatatactgttaaatttctttgttcttttcaaatttataaacgatgctttttttggtatatgtccatttcagatcatggaaaatgctgagattaacaatatcatcaagattgtgggtcttcagtacaagaaaaactatgaagatgaagattcattgaagacgcttcgttatgggaagataatgattatgacagatcaggtcagatttgttattaaatttttagattgttcaactaaattaagcatgtcttaatttaatttcattgttttttgccatgaaaataaattasttaaataggagctttattcatcatctctaatcaacatctaatcagatatgcttatatcatatgtatgttgcaaatacaggttaagtgagtctggatttgaacagaccttttttgattcccatagaaaatttgacaaattgccagtaggtcagtcataatatttttttatttctaaacaattctttgtttgtttgagatggagtttcgcccttgtcgcccaggctggagtgcaatggtgcaatcttggctcactgcaacctccgcctcatgggttcaagcgattctcctgcctcagcctcccgagtagctgggattgcaggcggatgccaccacacccaactaatttttgtatttttagtggagacagggtttcaccatgttggccaggctggtctcgaacgcctgacctcargcgatccgcctgcctcggcctcccaaagttctgggattacagatgttagctaccacgcccagcctaacarttcttttgaactttggctttcaaatctttctaggaccaagatggttcccacatcaaaggcttgctgattaattttatccatcacaactggccctctcttctgcgacatcgttttctggaggaatttatcactcccattgtaaaggtacgctaatttctaagtaccatcatggatattttaagaccctactcctcaaacctggatatacatataagccccgtcacatgtagtggtatacaggggaccccacagtgtacaaagccacagtcattgttttttatcacaggtatctaaaaacaagcaagaaatggcattttacagccttcctgaatttgaagagtggaagagttctactccaaatcataaaaaatggaaagtcaaatattacaaaggtttgtaatgaaacccatatagaacttctcattttattatacaccctgtacaagactatatgaaggaacttggtatttttggttttataggtttgggcaccagcacatcaaaggaagctaaagaatactttgcagatatgaaaagacatcgtatccagttcaaatattctggtcctgaagatgatgctgctatcagcctggtaggtttgagttgtattttatatacattctaattttagaaatcactactttagccagttgaaacatttacatttttgtataagactccgtatcaaaaaaaaaagaatgttttatagaatagaatgtttccagtaagcatatcccagagaaggaatcagatattttagaaaattttgatttttggctgggcttggtggctcatgcctataattctaggactttgggaggccaaggcaggtggatcacctgagatcaagagttggagaccaacctgtccaacatggtgaaaccccctctctactaaaaatacgaaaattggccgagcgtagtggctcacgcctgtaatcccagcactttgggaggcagaggcgagcagatcacaaggtcaggagatcaagaccatcctggctaacaaggtgaaaccccatctctgctaaaaatacaaaaaattagccggccgtggtggcacgcagctatagtcccagctacttgggaagctgaggcaggagaatcgcttgaacccgagaggcagaggttgcagtgagccgagatcaggccactgctctccagcctgggcaacagagtgagactccatctcaaaaaaaaaggaaaaaggccaggcgtggtggctcacgcctgtaatgccagtactttggaaggctaagtcgggcagatcacaacgtcatgagatggagaccatcctggctaacacggtgaaaccccgtctctactaaaaataaaaaaaaataaaaaataaaaaattagccgggcttggtgacacgcgcctgtaatcccagctactccggaggctgaggcaggagaatggcgtgaacccaggaggcggagcttgcagtgagctgagatggtgccactgcactccagcctgggcgacagagcgagactctgtctcaaaaaaaaaaaaaaaacaaaaaaggtcgggcgcagtggctcacaccagtaatcatagcactttgggaggccgaggcgggtggatcacctgagctcgggagttcaagaccagcctgaccaacatggtgaaaccccatctctactaaaaatacaaaatattagctgggtgtggtggcacgtgcctgtaatcccagctacacgggaggctgaggcaggagaatcacttgaacttgggaagtggaggttgtgggagccgaaatcgtgccatcacattccacaagagtgaaactccatttcaaaaaaaaaaaaatacaaaaattagctgggcgtggtggcgggcgcctttaatcccaggggctcrggaggctgaggcaggagaatcgcttgaacctaggacgcagaggttgcagtgagccaagatgacaccattgcactccaggctgggcaagagaacagtaactcccgtctcaaaaaaaaaaaaaaaggaaaacagtatttttgtttttctgttgttcgttctttgtagaaggatattttggaacctattakcctattagtaccagtgacatcttttcatcctttaatttataggcctttakcaaaaaacagatagatgatcgaaaggaatggttaactaatttcatggaggatagaagacaacgaaagttacttgggcttcctgaggtaaaagttttaaatatatgccacaaaatggattgttagactgaccttttggtattgatactatagcaaattaaacttactgaatagttattttagtaaaaaatttgatatgatagagttgtgcagcagttaaatttgctttatctttaaaacatataaaatatttctgtattattcaatattttttaaagacttaagaattacagaaataattcttagttctgaaaggtttctgtttgatttttgtgttgagcattgtttagaccggtagactcatgtaatactatttggtccttcaggattacttgtatggacaaactaccacatatctgacatataatgacttcatcaacaaggaacttatcttgttctcaaattctgataacgagagatctatcccttctatggtggatggtgagttccaatttgttagtctgttttcattgtaagatggaaatcaaattccaaaattggttaaattgaggatacttacgtttgctcttatttcattttaaaggtttgaaaccaggtcagagaaaggttttgtttacttgcttcaaacggaatgacaagcgagaagtaaaggttgcccaattagctggatcagtggctgaaatgtcttcttatcatcatggtgaggtaaacacrcaatccatgtttccagaaagcattatatcagaaatccctgcagagtcattctcaaaacagatttggtgaaagtataagctcatatattcatagtaaagaacaagttggtaaaacctgtgaaagaataaaactgcttgccctttgatttctgaaagtaatattcctgcagggatattcataagtctgcaaaggtctacattaaaaaatgcttagtatgtttattataactttgtgatgtcaaaatttagacctccactgatttgaaaattgttataataaattgtgacacatgtatgcatggaatcagtgctgtaacttcagtaaaactgtgtgcactgacactgaggaatatccagggtctattctcaggtgaggaaaaaaagagacagaacaataactaaaaatgtctacaaggatatgttccaaattgttcactttagttacccctgagaactggaaagggcaactttcactttttatatgtgtctgaattgtttgactttacaccaatgttttgtgattactttttgcattaattatgtaaaacagttttaaagaactagattgcctacaggtttctagaattttaaatataatggttgtcttgttgctttcaatcaaaatatagtagggatacaataaattttcacccaacgaacatttgttgaatgcctaccatgtaccaggtatacaaaaataaataaaaatatgttccttatccccaagatataataacaatttagccagagggccaatacacacacagctatagaataaagtgatacatgctagaatagaaatgaacacagcattgtaacacaaaggaggaaatatttcattttgctgaggataaggagaagaactatgccttcaaagttgagtgggatttaatagaaattgttggacggcagccctaaacttggagccagaagttgtaggttcaagtactatttctgccatctattaatctgaggaaagtcactaaacaactagacctcacaaaatgttacaggattatagtgaggttaagtcataatgtatttgtattagtaaaagcctcagcttaatgaatctttttttccccacagatgtcactaatgatgaccattatcaatttggctcagaattttgtgggtagcaataatctaaacctcttgcagcccattggtcagtttggtaccaggctacatggtggcaaggattctgctagtccacgatacatctttacaatgctcaggtaggtatgctttcactttctagtgacttgccatttccagttttgaaacaatgtgagatttagttcaccaaaaatacaaaaactcagttaatcagaagatactggcatctagtggcagaggccaggggtgaggcttatacaggaaagcccccccataacaattatccagtgcaacatgtcaattatgctaaggttgagaaatcctgatgtagagcttgggactgagtaaaggagactttgattcttcctaaatatcacaattgaaattttactcctttacaagcctatggaaagtatattatgaatggtcaattttcagctgtcatcccagtcaccctttcagtggcattcaaacagttactaattgctccatccttcttgaaactctttatttggcctctatgactgtagactcttctggttctcttctaccttattagctttctctgctgggtccttctcaccttcccaacctctaaatactggcccattccagggctccttcatcagatctctttccaatgcctacactcaattcccaaatgatctcccattcatccgttctatacctttaaatctccagtcttggtctctcccctgaactcccaacttttatgtctgactgccctcttaacatttcccacttggatatctagttaagtatctcaaacataagtctaaaaccaaatccttagttttcctgtctcagtaaatggaatgccatgccatccttctaattgctcaggctaaaaaccttgtcacccttgactcctttgcttgatacttaacatccagttcctcagccaatcctataggatctgcattggaaaaatactaagccacccccatctcatctaaactattgtaacatatcatcttttcttaaagcagccaattattttttaaaaaataagtcactctgattcagaaccttcaactgctcagagtaaaatctaaagacctattttagctaaccagacattatgtgatccgtgtccccaccttccatgtcttttgattccttctcataccatctcctctccagccacactgtccttggcctatactcaaatataccgagcacatttcctcttcagggccttttacttactggttcctttgcctgcaacactctttctctagatatccacatggttcagtccctcagtttgttttttgttgtttttttttcttttgagatggagttttgctctttttgcccaggctggagtgcagtggcgcawtttcggctcattgcaacctctgcctcctgggttcaagtgattctcctgcctcagcctcccgtgttgctgggattacaggtacacgccaccatgctcagctaattttatatttttagtagagatgaggtttcaccatgttggccaggttggtcttgaactcctgacctcaggtgatctgcctccctcagcctcccaaagtgctgggattacaggcgcgagttactgcacctggcgccctcagtgtcttttctctgctcaaatgttttcctatcagaaacggcttaactttccttagcacctcttcagtcactttcccactttttcttctcttgtttatcccaccacctaacaaaatatgtgttaattgcaaacttctactggactgtgagctccttgaggattgagactttatgtccatgtgcgtgacacatagcaagtgctcaataaatattgttaaatgtatattagtcagcaagtaaaaccaagataattttcatgtataatacatgtcctttccataaaagttaagtgtgaaattcagtatttttgtaaaataacattctttgtttcttttctttagctctttggctcgattgttatttccaccaaaagatgatcacacgttgaagtttttatatgatgacaaccagcgtgttgagcctgaatggtacattcctattattcccatggtgctgataaatggtgctgaaggaatcggtactgggtggtcctgcaaaatccccaactttgatgtgcgtgaaattgtaaataacatcaggcgtttgatggatggagaagaacctttgccaatggtaagtattctgtgtgtgttaagagccttaacttttccttgggtttcagttgaatagattgtatgattaaagatgatgcaaacataaaatttaatttcatactttagatttattgttaaacgctgttgtgatttccgtctagtatcacatttagaaaacatactgtttttttaaatgccaatttagcttccaagttacargaacttcaagggtactattgaagaactggctccaaatcaatatgtgattagtggtgaagtagctattcttaattctacaaccattgaaatctcagagcttcccgtcagaacatggacccaggtaaataattntggatttcttttttargtttgtgatcaaaagaaataccttttgtactattgctgttgactattcagaagcctatattttagaaacttcaggattatttctttctttagacatacaaagaacaagttctagaacccatgttgaatggcaccgagaagacacctcctctcataacagactatagggaataccatacagataccactgtgaaatttgttgtgaagatgactgaagaaaarctggcagaggcagagagagttggactacacaaagtcttcaaactccaaactagtctcacatgcaactctatggtatgtatttgttttgtgagatgtacacgtttcaatttatattaaagattaatatcaattttaaaagtatatcttagtctacctttataaagtttagccaatttgtctattcttggctctaatcttgttttcctttttcaggtgctttttgaccacgtaggctgtttaaagaaatatgacacggtgttggatattctaagagacttttttgaactcagacttaaatattatggattaagaaaagaatggctcctaggaatgcttggtgctgaatctgctaaactgaataatcaggctcgctttatcttagagaaaatagatggcaaaataatcattggtatgttttgggaataataactgcttactaaaactctagttacgccaaactttctttaaacatttttggtgagagtaatggtggagaaagaggcaaaatccatttaattcacctggtcacttatacabgcatttctttaaaatatctgattaggtatttatagtttgaaagagatgatgtttccttgactgagcatcttgagaaatcaagatttagttgacaattagacatgaggagaatagagagctaghagaccttgcataaactgattgaccaagagaatagatacactaatcatgtctacaggaacagaaaataaaagagacagagaagagataataaatctgatggtaaaaaaaaaaaaaggcaggaagattacgaatggcttctactctctgggtgtggtggcgcatgcctgtaatctcagcacttgagctggggaggtcaaggctgcagtgagcctaggtagtgccactgcactccagcctggacacaagagtgagagagaccctgtctccaaaaaaaaatgatttgatcatagcctcatatatgatttgactgcccccttgtggtaatttacatttgtcaatggtttagggagacttgcctgtataccgggatatacaaatttatgcaagcacgaagacagtttaatttccagttttaaacttttgacttgtgtaaaaccttatccccttcctaaaatattactcaaaatcattatctctgtttacttttttaaaaatagaaaataagcctaagaaagaattaattaaagttctgattcagaggggatatgattcggatcctgtgaaggcctggaaagaagcccagcaaaaggtaatcttgggtggcacttttctatattgttaaagactatgtattgtacaatgtttatgtttcacattttctaataaagctagattttaattaatcctttaggytccagatgaagaagaaaatgaagagagtgacaacgaaaaggaaactgaaaagagtgactccgtaacagattctggaccaaccttcaactatcttcttgatatgcccctttggtatttaaccaaggaaaagaaagatgaactctgcaggctaagaaatgaaaaagtgagttgatagtaggatggtacatgctgcttagttttgttctattctaatggtaaaagtaaaattgtgtgttgcatgaaaatgctgcttgtatacatatattaactcaattttgtaattatcttatgaaggaacaagagctggacacattaaaaagaaagagtccatcagatttgtggaaagaagacttggctacatttattgaagaattggaggtatgtagtttataatgcccatgttagaatttttattaatgaaataatatattccagcagtatacctttgtcaagatagttcacaattggcaataaaaagaaaataagaggcataaggataaattccaaatagcgtataaaagaacagattattggccaggtgcagtggctcacgctggtaatcccagcattttggaaggctgagttgggtggatcacttgaggtcaggggttcaagaccagcctggccaacatggtaaaaccccatttctactaaaaacacaaaaattagccaggcatgatggtgcataccagttactcaggaggctgaggcaggagaattgcttgaaccgagaggcagaggttgcagtgaaccgagatcacaccactgcactccagcctaggcaacacagcaagactccgtctcaaaaaaaaaaaaaaaaaaaaagggacagattattaaatactacttagaatacaaggccgggtgcggtggctcacacctacaatcccagcactttgkgaggccgaagcaggcagatcacctgaggttgggagttcgagaccagcctgaccaacatggagaaaccctgtctctactaaaattgcaaaattagccaggcgtagtggcacatgcctgtaatcccagctacttgggaggctgaggcaggagaatcacttgaactcgggaggcagatgttgctgtgagctaagatcacaccattgcactccagcctgggcaacaagagtggaactccgtctcaaaaaaaaaaaaaaaaatactatttagaatacagtaaatgataccaggagactgcccagacattcagacatttctggacaaaaaaagaaaagagcaggagttgatttttgataaagggaagaacatattaggactgagaagataaaaagagcctaaatgtggaagaagaccaccaacccagtcccccaagtcaacttaaaaggacaaagccacagggcatggtggctcatgcctgtaatcccagcactctgggaggctgaggtgggcagatcacttgaggtcaggagttcgagaccagcctggacaacatggtgaaaccctgtctctactaaaaatacaaaaattagttgggtgtggtggcatccgcctgtaatcccagctactcaggaggttgaggcaagaaaattgcttgaacccagaaggcagaagttgcagtgagccgagattgcgccactgtactccagcctgggtgacagagcaagactccatctaaaaaaaaaaaaaaaaaaggagaaagcagggctatccagatggtttcagaaggttatttgttacttaaatcttcctaataacatttgtttctcaacattattttaacataagaaaaaaggccagcactgtggctcacacctgtaatcccaatgtgctttgggaggctgaggcaggaggatcacttgagattaggagttcaaaaccagcttgggtaacgtagcaagacctcatctctacaaaatgttttttttaaatagccaggcatggtggtgtgggcctatagtctcagctactccggaggccaaggtgggaggatcacttgagaccaggagttcaaggctgcagtgaactatgatcatgtaccattgtactcagcctgcgtgtctcttaaaaaaaaaaaaacaaaaaaaaaaccaccaaaagctttatttcttaaatttaacaygcaaatttgtattactgcacttcagtatagatgcctagctcattgtaatcagttggttggataagtgtgcatcacttcctttcatattttgtatgtgagttyrcaaatatatatgtatatacatgttttatttttagtttctcccttgttttcctcaaaaaggttaagtggtagaatcaggaataaaacccagtccttctgtctccacaccttccttttcaaggtgtgttttaattacatcttcactattgttgatagtatactaggttatggagcaatttatcactagtttttaagatgtaacaaaatgaaatcagtttaactgttgggtgtttagatattgtaatgtttttgttaacatttaaacttgctttcttatatcccttctgtaggctgttgaagccaaggaaaaacaagatgaacaagtcggacttcctgggaaagkggggaaggccaagggraaaaaaacacaaatggctgaagttttgccttctccgcgtggtcaaagagtcattccacgaataaccatagaaatgaaagcagaggcagaaaagaaaaataaaaagaaaattaaggtaatactcttgtggtggctcacacctataatcccagcactttgggggccaaggtgggtggatcacttgaggtcagtggttcaagaccagcctcccaacatggttgaaaccctgtctctactaaaaattaaaaaaattaggcgggcatggtggcaggcgcctgtaatcccagctactcgggagactgaggcagaagaatcgcttgaacccgggaggcagaggttgcagtgagccaaggtcacaccactgcactccagcctggccaacagagcaaaactccatctcaaaaaaaaaaaagaggtaatactcttaaaaatattatgcataaaatattgatgcatatgtccacttaaaattgaaaaaaaaatgtataaaatttttttgttgttgttgttgagatggagtctcgctgtgttacccaggctggagtgcaatggcaggatctcagctcacagcaacctccgcctcccgtattcaagcgattctcgtgcctcagcctcccaagtagttgggggcacatcaccacacccagctaatttttgtatttttagtagagatggggtttcaccatcttggccaggctggtctcgaactcctgacctcaagagatctgcccaccacggcctcccaaagtgctgggattacaggcgtgagccaccgctcccagccaaaaatgtataaaatctctaatcccatagttcagaatttattctatatccaaccctaactttgctatcttttagaatgaaaatactgaaggaagccctcaagaagatggtgtggaactagaaggcctaaaacaaagattagaaaagaaacagaaaagagaaccaggtattacaacatttttagaaaaatggtataaagtgaagattaaattgtgtttgttacctagtacattccacatagatgttcaaaacctttttgttgaattgagaaacgtgaaagaggactgtatctcaattctacttggacctctttttttttttttttttttttttgagacagtttcactcttgttgcccaggctggagtgcaatagcacaatctcggctcactgcaatcttcacctcctgggttcaagcgattctcctgcctcagcttcctgagtagctgggattataggtgcatgccaccacgcctggctgctttttgtatttttagtagagacggggtttcaccatgttagtcaggctggtctcaaactcctgaccttgtgatttgcccgccttggcctcccaaagtgctgggattacaggcgtgagccactgcccctggcctggacctctttaatatcgtccttgggatttgattcattatagaaaatattttgtaatgaagtagtttgttaatttgaattccttaattgggatctaagaaaatacccagtttattagatttcattttctagccacttacgaggttctagtatacaaagtttcttaagaaaagtgactacatattagtaatgtttgtagtatctctagagttcaacatcatgcttcggatataaataatgtccactcaatgaactaaatagaattaataattctgttaatcatttgataatgcctttactgtctactttttttgaaacatctttattgagatattcacatgccaaatttgcccatttaacgtataccatttggctgggcgccatggcttatgcctgtaatcccagcactttgggaggctgaggctggcggatcacttgaggtcaggagttcaagaccaccctggccaacatggtgaaaccccatctctactaaaaatacaaaaattagttgagtgtggtggtgcgtgcctgtagtcccagctactcgagaggctgaggcacgagtgtcgcttgaacccaggaggcagaggttgcagagagccaagactgtgccattgcactccagcctgggtgacagagcaagactccaactcaaaaataaaaataaagtatgccattcagtggttttagtatagacaaacagttttaatacaatttattgccccccaagaaaactgaactcattaacaatcatttgccatttgccaccaactcctctccactgggtgaccactaaaaaatctaggggcatttcctataaattaaatcatataatatgtggtcttttggagctgacttctttacttaacacattttcaagggtaacccatgtggcagcccatatattagtacttcattcttttttttttttttttttgaggcagagtttcgctctgtcgcccaggctggcatgcagtatgcagtagtagtgagatctcggctcactgcaacctccgcctgctaggttcaggcaattctcctgcctcagcctcccgaggagctgggattacaggcacgcaccaccatgcccaaataatttttgtatttttagtagaaacagggtttcaccatgttggccaggatggtctcaaactcctgacctcaagcgatctgcccacctcggcctcccattttgctaagcccgtgaaggtaaacctctgtgttttcttctaagcattttatagttttagctcttacatttaggtctgtgatccactttgaattagtttttgtatatggtgtaaggaaggtgtccaacctgattctttgcaggtagatatccaattatttcagtatcatatgttaaaaagacttctttctacaatgtttgtcttcacccttgtcaaaaatcaattgactataaatgttaaggtttatgtatggagtctcaattctgttccactgattgagctatatatgtccttgagtatctactttttttgagacagggtttcactcttgcccaggctggtcttgaaatcctggctcaagcaatccttctatctcagcctcccaagtagctgggactataggcactcgccaccatgactagctaatttctaaaagttttttgtattttgtagagacagtccttttttctttttttttctttttttgagacaagatttcactctgtctcccaggctggagtacagtggcatgatcacagcccactgcagcctcgacctcccaggctcaaacaatcctcctgcctctgcctccgcctccctagtggctggaaccacaggcgcactccaccatgcccattaatttctgtattttttgtagagatggggttttgccatgttgaccaggctggtctttagctcctgagctcaagcgatccgcctacctcaccctcccaaagtgctgagattacaggtgtgagccaccgcacccagccaagacagggtcttatatcttaccccagctgatctcaaacccctgggctcaagtaatcctcccgccccagcctccctaagtgctgggattacaggcatgagccactgtgcccggccacatttatttatgagattaagtgaccaagctatatgcaccacaaaaacagagaccatatctgtctcttttcacgattgtattctcagaactatcacaggagttaataaatttgaaggatggatggatgatagatggagaaaagtgggtctaatatataaaggtgattaatttctrtctcccctctaggtacaaagacaaagaaacaaactacattggcatttaagccaatcaaaaaaggaaagaagagaaatccctggtctgattcagaatcagataggagcagtgacgaaagtaattttgatgtccctbcacgagaaacagagccacggagagcagcaagtaaggaaaactaaagaacattatagataaactgtaagagtggaatggccaatatacttcagggtactttgccccagaaattactgtgtcttaatagagcagtaaattatgttaaagctttgaaacactgaagcatctttcaggagatttaaaaactaaaatattcatgaaatgttatgtcaacctatgaattgtttctcctactaccctctttgatttttttgtatatggtttttttactagcaaaaacmaaattcacaatggatttggattcagatgaagatttctcagattttgatgaaaaaackgatgatgaagattttgtcccatcagatgctagtccacctaagaccaaaacttccccaaagcaagtatcttatctaatatgggttttgtcatgattgtttctaatatattgttttttgcttgacacatttagaattggttgtcaggatttttttttttaattctagacttagtaacaaagaactgaaaccacagaaaagtgtcgtgtcaggtatgtatttaagtaaaagtagtgagacatctgccttactgggacactcagatccaactgggttctaatcctggctacattatccaagtacttcctttggaaataaatttgagttcttattaacattatgttgatactgttcactgggtttagtttcacatgtaaataggtactgcattcagtatactaaaagtaatcatagtgcttgccaggtactttgctaggtgctagagatacaaaaaataaaaactgttcttgctgataaaaaattsagaaattagaacaaagttttaagagtatgttttaaatattccagaaaagtcacatatttggtgtttaaataggaattcataccagggacaaagcagaaaatggattttcatgtgttgcttaaatgtactattttcctttccatttgaaataatagaccttgaagctgatgatgttaaggrcagtgtaccactgtcttcaagccctcctgctacacatttcccagatgaaactgaaattacaaacccagttcctaaaaagaatgtgacagtgaagaagacagcagcaaaaagtaagcctaaatctttgagatgggttaatgttgcaattacctaactggtttccacgtgtctatttcaatttttttattgccaaaacttactattgatattacagattaaatgttttccaattggaagcaatttcttttcgatctttataatcaaaattagtagtcaaggctgttccaaaacagtaagttatctctattgattgttcagttacagatcaaactccttgttctactcttttccctccttctcactactgcacttgactagtcaaaaaacaaaacaaaagccaggcagagtggctcatgcctgtaatcccagcactttgggaggctaaaacaagaggattgcttgaggccaggagttcaaggctgcagtgagctatatgatcaagccactgcactccagcctgagtgagagagcaagaccctgtctccaaaaataaggtagtccaaatgtttaaaatcagtgagtttctctcagtaccaggcttcatctagttcatttctgtgacaaggataggatttataagcaattgcaatgtttaacgtaaaacgtattcttgaaattgaattaagtttaaggctgggtgcagtggctcatgcctgtaatcccagcactttgggaggccaaggtgggtggatcacctgaggtcaggagttcgagactagcctggccaacatagtgaamcctcatctctactaaaaacacaaaattagccaggtgtggtggcacatgcctgtagtcagctactcgggaggctgaaacaggagaatcacttgaacccaggaggcagaggctacagtgagccgagatcgtgccactgcactccagcctgggcgagatagagcaagatgctgtctcaaaaaaaaaaaaaaaaaaatagaatgtttaagaatactttgattctctgttttcacctctcttagattgtcttttcctatgttaaatatacagtcatcacattgctgaagaaagttcgcaatgagaacaattcatctaagagtggctgtgactaggtcaggcgcggttgctcatgcctgtaatcccagcactttgggaggccgaggcgagtggatcacctgaggtcaggagtttgagaccagcttgaccaacatggtggaatcccatctctactaaaaatacaaaaaattagccrggtgtggtggcacaygcctgtaatcccagctactcaggaggctgaggcaggagaatcgcttgaacccaggaggcagaggttgcagtgagccgagataacrccactgcactccagcctggacgatagagtgagaccccatctcaaaaaaagagcagctgtgacaaatgcctgtattgaattgcaggtcagtcttccacctccactaccggtgccaaaaaaagggctgccccaaaaggaactaaaagggatccagctttgaattctggtgtctctcaaaagcctgatcctgccaaaaccaagaatcgccgcaaaaggaagccatccacttbtgatgattctgactctaattttgagaaaattgtttcgaaagcagtcacaagcaaggtgagtgttgatcctagtcagtccttttgctgtagatgttctgaaacacgtaactaagccattgctcttaaaaatttggcatatctttaagaaaattaactctcatattctgttagcttttactgtacatatttagttttaacaaagttaaatatgccacttatttgggcaatggaagagttggccttagakctgcttcttattacttggtagaaaatagaaaactccttgaatatagtgtcttgatacatttttttacattacaattatgttgtcagatttacaatgtgcaagttacctgggcttttctcttttagaaatccaagggggagagtgatgacttccatatggactttgactcagctgtggctcctcgggcaaaatctgtacggkcaaagaaacctataaagtacctggaagagtcagatgaagatgatctgttttaaaatgtgaggcgattattttaagtaattatcttaccaagcccaagactggttttaaagttacctgaagctcttaacttcctcccctctgaatttagtttggggaaggtgtttttagtacaagacatcaaagtgaagtaaagcccaagtgttctttagctttttataatactgtctaaatagtgaccatctcatgggcattgttttcttctctgctttgtctgtgttttgagtctgctttcttttgtctttaaaacctgatttttaagttcttctgaactgtagaaatagctatctgatcacttcagcgtaaagcagtgtgtttattaaccatccactaagctaaaactagagcagtttgatttaaaagtgtcactcttcctccttttctactttcagtagatatgagatagagcataattatctgttttatcttagttttatacataatttaccatcagatagaactttatggttctagtacagatactctactacactcagcctcttatgtgccaagtttttctttaagcaatgagaaattgctcatgttcttcatcttctcaaatcatcagaggccnaagaaaaacactttggctgtgtctataacttgacacagtcaatagaatgaagaaaattagagtagttatgtgattatttcagctcttgacctgtcccctctggctgcctctgagtctgaatctcccaaagagagaaaccaatttctaagaggactggattgcagaagactcggggacaacatttgatccaagatcttaaatgttatattgataaccatgctcagcaatgdgctattagattcattttgggaaatctccataatttcaatttgtaaactttgttaagacctgtctacattgttatatgtgtgtgacttgagtaatgttatcaacgtttttgtaaatatttactatgtttttctattagctaaattccaacaattttgtactttaataaaatgttctaaacattgcaacccatagaatgcctcttttaaaacacacactacacccttttccttattctaaaatatagtcttcacttccctttcagaagcattccaatcatattgtgacagaccttacagcctctggctaaggtgataagtccaagagataggcattaagacctaattaaggccaaagactctttattgagattttatacatgaggactaagttcttcatctccaccacacttgatcagtaaatatgcatgtatcttttttttttaatgataccttcctttaacaactattttgataacctagtcaactacttgatggtatcagtaagatatattgaggcaactggctaatccatttagaaaaaaaatcagataaatctctttcacaccttacaccaaaattaagttcaaatagatgaaatatttaaatgtcaaaaactatttaaaaagtaactataaaaaaagtaatcttgagttacagagggataaactgaacaaaacccaaaagtagtgttgacaaagatatggaggaattagccctttcaaagaaatctgggccaggcatggtggctcacacctgtaatcccagcagtttgggaggccaaggagggaagattgcttgagcccaggaagcagaggttacagtgaccagagattgtgccactgcattccagcctgagcaagtccctgtctcaaaaaaaaaaaaaaaaaggaatttcgtttgacagaagaatcagacatgcaaaaaactatgtaaacacacacaaatatgagtataagtaaatctgagtaagatcaatgggttgcttcaatgtaagtattctggttactatataattttgcaaaattgggaaatgggcaaagtatacgatggatctccattcttttttttttcctttcagaaagagtccttgtttctgatccatttctttttttttttttctgggacagagtcttgctctgtcgcccaggctggagtgcactggggccatcttgactcattgcaacttctgcctcccgggtacaaacgattctcctgcctcagcctcccgagtagctggcattataggtgcatgccaccacgcccagctaatttttgtatttttagtagagacagggtttcaccatgttggcccggctggtctcaaactcctgaccttgtgatccgcccacctcagcctcccaaagtgctgggattacaggcgtgagccaccatgcccggcctgatccatttcttaaaactatgtgaatgtacaactatatcaaaacaaagccacatgcaaagatgcttattgaagttgctgtaataataaaatggaaaataacctaaatgtccaaaaggttaaaatggtaaatatggaataccaggtgcctattaggaatgatcatgtaggccaggcgcagtggctcacgcctgtaatcccagcactttgggagcccaaggcaagcagaccacgaggtcaggagttcgagaccagcctgaccaacatggtgaaaccccgtctctactaaaaatacaaaaattagccaggtgtggtggcgtgcacctgtaatcccaactactcaggaggctgaggcaggagaatcgcttgaacccaggaggtggaggttgcagtgagccaagatcgtgctattgcactccatcctgggtaacatgagtgaaattccatcaagaaaaaaaaaatgatcaggtagaccaggcacagtggttcatacatgtattcccagcactttgggaggctgaagtgggaagattgcttgagcccaggagtttgagaccagcctgggcaacgtagtgagacccccatctctacaaaaaaaaaggtaaaaatcagctggacatggtggtgcatgcctgtggtcccagctacttggaaggctgaggcaggagtattgcttgagcccaggaggctgcagtgagccatgatggcactgcactccagcctgggcaacagagcaagactgtctcaaaaaaaaaaaaaaaagaatgatcatctatactgtttatttattgacatttattgacatgaaaagatagatgttcacgacattgccaagtggaaaaaagcagattacaaatcaaagatgaaatccccatctggtaaatatgccagttgtttacaaaataaatagtgggaggaaagtatgtaaactctttttagaaagtaaaagaatcaaatatttttccttttttttttttttggagatagaatctcattttggcacccaggctggagtgcagtggtacgatctcagctcactgcaattctctgctttctgcctcccaaggtcaagcaattctcatgcctcagcctcccaagtagctgggactacaggcgcctactgccatgcctggctaattctttgtgtttttatttgtgggattttctgggtttttttgttttttgggggataaagtcttgtcttgctctatcacccaggctggagtgcagtggcacgatctcggctcactataacctccgcctgcctggttcaagtgattctcatgcctcagcctcccaagtggctgggatcacagggaatacaaaaattacagttaatttttgtatttttagtagagatggagtttcaccatgttgtccaggctggtctcgaattcctgacctcaagtgatcgtcccacttcagacacccaaagtgctgggattacaggcatgagccaccacgcccagcttaaattttttgtatttttagtagagatggggtttcaccatgttgcccaggctggtctgagctcaggcaatccgcctgcctccgcgtcccaaagtgctgggattacaggcctgagccaccgcgcccggccaatagttctcttttgaaagtagaagttttacatttcctgatgagtaaagaccttgctaactgaaagcggataatgtttccttgactcttttttttctttttttctttttttgagacaaggtttcactctaccatccaggctggagtgcagtggctcaatctcggcccactgcaacctctgcctcctgggctcaagcgatcctcctgcctcagcctcccaaatagctgggaccacaggtacacaccaccacacctggctaatttttgtattttttgtagaggcagggtctcactatgttgccccggctgttctggaactcctgggctcaagtgatccacctgcctcaacctcccaaagagctgcgattacaggcgtgagccaccatgccaggcctattcattatttcttttttttttcttttatttatttattttttttttgaaatggaatctgactctgccgcccaggctggagtgcagtggcacaatctcagctcactgcaacctccgcctcccaggttcaagcgattctcctgcctcagcctcccaagtagctgggactacagccgcctgccaccacgcctggctaattttttatatttttagtagagacagggtttcaccatgttagccatgatggtctcgatctcctgacctcgtgatccacccgcctcggcctcccaaagtgctgggattacaggcgtgagccactgcgcctggccttcggccttcattatttcttaagctactgacacattaaaggatataaagatttgctaataaacgtgatagttttatgtatttagaccctttatagaatgtggttatttcctatgtgtatgaaacattccttaaatacatataagttatgaattacaaaagaatggctattgagaaaagattcaaaagttgcattaattggtaaaggattcaacagtaagtttactgagtctttttttttttattttattttttccatgagacagagtcttgctctgctgcccaggctggagtgcagtggcaccatttcagctcactgcaacctccgcctcctgggctcaagcaattctcctgcctcagcctcccaagtacctaggattgcaggcacctgccaccactcccggcttttttcttttttttttttttttaagattgagtctcgttctgtcgcccaggctggagtggaatggcacagcttcggctcactgcaacctccgcctcccaggttcaagcgattctcctgcctcagcctcccgagtacctgggattacaagcgcacgccaccacacccagctaatttttgtatttttagtaaaggcagagttttaccagtttggccgggctggtcttgagttcctgacctcaggtgatccacccatctcagcctcccaaagtgctgggattacaggcgtgagccactgtgcccagcctggccctttttgtttttaagatacagtgcatcccactgtttctgctgcaatggattttttttttaatgatttctagccatttttcctgaaacccaaacagaaaaatttaattcattaacttttcattcttgagtaatggatacctgttcttgcctgtcccgtaccctttcctcagtaatttagctgtggaaaaatatgttaaagtccaaacgaaaacatttaagtccaaaagcattcattgaagcattatttacactggtgagaaattgggaacaacatagatgtctcacaatagaagaattggttaaactgggccaggtacagtggctcacgcctgtaatcccagcactttgggaggcctaggcaggcagattgcctgagctcaggagaccagcctgggcaacatgtcgaaaccctgtctctactgaaaatacaaaaattacctgagtgtggtggtgcacacctgtagtctcagctacttgggaggctgagacacaagactcgcttgaacccaggaagtgcaggttgcagtgagccaagactgcgccactatagtccagactgggcaacagcaagagactctgtctcaaaaataaataaataaataaataaaagaagaattggttaaactggaacatccttacctacaatgtattgtacagccattagaagtcatgtttttccaaaacatctaatactacaggaaagtcctcattatgttgggtagagagacaaaagggtacaaaactatttagtatcattttgtcaaaactcatcaaattatacattataaaatggtgcactatgtgtaaattctacctcaatatggtggggggagtaactgttatatactatgaggcttaaaatataaaccaatccttctcaaacctgtgcttaaaaaaattttttttttttttttttttgagatggagtctcactctgtcacctaggttggaatacagtggcacgatctcggctaactgcaacctctgcctcccaggttcaagcaattctctgcctcagcctcccgagtagctgggattacaggtgcccaccgccacacccggctaatttttgtatttttagtagagacagggtttcaccatcttggccaggctggtcttgaactcctgacctcgtgatccacccgcttggcctcccaaagtgctgggattacacgcgtgagccaccgtgcctggtgcttaaaaattttttagggatcttattaaattacagattatgattcagtaggtctgagctggggcctgagattctgcattacaagttcccaaaatgatgtcaatgcctctggttgcagaccctacttggaacagccaaggtgcacatatccagtgcttctcaatgtatgatacctggaccaacagtgtcagggacacctgggagcttcttagaaattcaaattatcagctggatgtggtggctcatgcctgtaatcccagcaccttaggaggctgacatgggtggattgcctgaggtcaggagttcaagaccagcgtagccaacagtgaaaccctgtctctactagaaatacaaaaaattagctgggcatggtggcgggcatctgtaatcccagctactcgagaggctgaggcagaagaattgcttgaacctaggaggtggaggttgcagtgagccaagattgtgccaatgcactccagcctgggaaacaagagggaaactgtctcaaaaaaaaaaaaaaaagaaagaaagaaagaaattcaaattatcggctccactc

SEQ ID NO: 94148 - DNA, 309996 bp, Homo sapiens
  misc_feature (1)...(309996): n = A,T,C or G
aatgcaggaattttctatagaggtttcttgttatttcactcttctgtactcttggacaagtcattcaagcattctgagccttattcctaaaataggtatgataataatactacccccacctttttagttttagttaggaaaagatttagatgtgagtgacagaaaacccaagacaatggtggcttaaacaagatagaattttttttccctcccctaagtcccggaaacaggcagtcaggtttctatcttgttttttttttcctatacatgacattcattctcatgttcacctcacaatctaagatggctgctccagctctggctatcatgcctttcttccaatcagcagcagaagaaagaggggcaggaaaagggcagactctattccttcaagctctctttccagaaattgcaaaccactttgcttatatctctttggctgtaacttagtcccatggccacatctagctgtaagggaggctaataaaggaatatccatatgcttaggtcaaattcagaggttctactactgaggaaatgagaacagattttggggggaaattaggagtctctgccaccctactgataatgttgtaaagattaaatgagatagtatgtattctgtgcttagaacatgcctgatagataatacatgctcagtattaggtcattgtttttataattacccttggtagacagtcatccatttttactctgtcattctaaattctctctgtttatttgttcagcatatattgagcatccctgatgctgaataatgtgcctctgtttaaatctatcagtaactgaaagaaggccatcatccaagatagcccaccctttgttgaaaagctctaaaagttagggaaatctttatcagacggatccaaagcttacctctcttataattcatgtcttagtcctgatcctcccttttgaaagaatatgagatgagcccatttcctcatctcaattcttcaaataaataaagatggctatcaagcctcccacatagttttcttgctctaaccatgcatttcattaattcattatttatctagtacatggactggcagacttttctgtaaagagccagatggcaaatattttcggctttgtagaccatatggtatttgttaccacttttcagctctactattataatgcaaaagcagctacagacatgacataaataaatagatgtggctgtgttccaataaaatttcatttacaaaaacagatggcttaccagatttgggactcagtatgtagttttccagcccttgatttagcccatgaaaacacccatcaacaggattattcctggcccatagtcccctctcctgaagctgaaaacttaccctgtcactcctgattctgcttatacctttcatttatttttcttgtcttaatgctttggctagaatttccagcaattcttgcatctccatagatctacttcctggccagtcatttctttagtcatattacctatccccaaatatctcaagattggacatactatcttgacaggtaccctcttgttctgccatatttttagcccacacaacctttgacctctcccaggctggcacttatccaatctcccccataaacctgttcacactaagaaaagaagaatccctttttccatctttttcttcttcaaacccactagactatgttcttcattcagtgctttaggttatctttagccaacagttgaatgccactataactctaaatctaacctaacctagccagcttcccttaaaaacaacctagagctgaccaagagtgagtaaatagaaagttaacagttattgatgggtcagctgctgctgacatacaaaatgtatatatatatttcatctcaatattatagatgtggaaagtatatctcaaaattgataatttaatcagctcaggatcatgcagcttagatttaaggagttgatcccagatatagaactgaaattaaaattggagtggacctagtgaagggtgtgtatctggtacagtaaattcaatgccatttcactgatacaacagagctgccagaccttggttgttctttcttaccaagatatttcaaggcatagaataataaacatttgccttgaatttttggatttcaaagtatttccttcacaacctgatggagtaggtgattttatttctattttacagaagaagaaatcaaaccccaaagtggttaaaatttttacctgagataccagaccccaatgtctgactgttttctttttatgactgcccatatttgctcttccctgaaaactccaccccacctgtttatctaactacttcctacttatcttttgaaactcaactgagttgtcttcttgtgaaggaaaccctccctggaaatcactcccaccccatcagcactgtctgctttagatgttcttcctctgtgttaatgcagattatagctctatttacactgtactttggtgacttatcagatggtaaggaaatccaggacaagatccctgccttatttaattgtgtactcaacaaatatttgctgaataaaggaatggtctgagattgaaccaagtctagtgctctataaagtctgctccctgtaatgttgctcatccatgattcatgatagtaagctggaggcaaagcaaagaccattgcttcgatgtctgtgtatatcctcagccttccagagacaaagccacatataagataagcttcttggctgggcttggtggctcatgcctgtaattccagcacttcgggaagccaaggtgggcggatcacaaggtcaggagatcgagaccatcctggctaacatggtgaaaccccgtctccactaaaaatacaaaaaattaactgggcgtggtggcacatgcctgtagtcccagctactcaggaggctgaggcaggagaatcgcttgaatccatgaagtggaggttgtagtgagccaagatcatgccactgcactccagcctggcgacagagtgagactccatctcaaaataaataaataaataaataaataaataagataaaaaataaaaaatgaaaggcttctcctagcagccatgggtcttcatagctagaagacatcagaaacccaaacccatagggcttcagactagatggaagataaaacagcatagtctatggctaagagaagagattctgtagtcagtcttcttggatttgaatcctgtctcaatcattttccagtggagggatctttggcaattcacttagcttttctttgctttggtttctactctttcaaatgtggatagcagaaattatttgtattagttatctatcactgtgtagcatattagcccaaaatgtagtggctcaaagcaataaacatttatcatctcacagtttctgtggtcaggaatttgggacgaggcttatctgtctgagggtctgtcatgtggttgcagtcaagatataggttgcagatacaatcatctaaagccttgactatagctggaggatccgcttccaagatggcrcactcacatgggtgttgtcaagagtcctccatactttccacagggatctcttcttacaatatggcagcagattacccccagagcatgcgagagaggagtagcaaggaggaagctccaatgactttcatgactgattctcagcagtcatgtactgttccttctaccacattccatacattagagggaagccactaagtataacccacattcaaggggcggggaattaggctccaccttgtgaagagaggagtatcaaagaatttgtggacatattttaaaaccatcacactatcttgtagtattgagtgagaattacacaagataataattgcaaagtggccgggcacagtggctcacacctgtaattccagcaatttgggaggctaagatgggaggatcgcttgagcccagaaattcaagaccagactgggcaacatggtgaatccctgtctttacaaaaaatacaaaaattagccaagcgcagtgctatagtctcagctacttgggaggctgaggtgggaggatcacttgaacccaggctggttttaaaatatgtccacaaattctttgatatttctcctttcaaaaggtggaccctaattcccctccccttgaatgtgggttatacttagtaattccttctaacatatagaatatgatagaaggaacagtatgtgactgctgaatccaggaggcagaggttgcagcaagcagtgattgtgccattgcacttcagcctggtaacagaatgggactctgtctcaaaattatgatgatgatgatgatatttataattataataacaacaataattacaaagtccttagaacaggacctaagcatcaccaaaaatgttttccccttctcctcctttgaattgcttacctcatgggtaagaaaggacatattagctgtcaatctgaaggctttggcctgaaaaatctctttaaaaaatagagcagatatttgaattcaagttagtgccatatgccactaaaattatctatataatcttgacctgaaaagttgttcatggtgtgctttgaatttttaaaagcaggtacagaacagaatgaccaacattatctggtatttgcatagttatacacatatatctctatgtatgttgatgcatagggagtgttctggaaggaggtttctgaaagtattgataatagttattgctgtgtgataggatttgttaggatgttgagctaggacactgctgctctgtgtgggctggtttattccctgcaaagaatatgatttctagggtttccagtgatttttcagagtagttgtagagacatgaatatactgggagcctctcacccttgaggctgtgtttgtgcttgagggaacacatatagaagggattaaggggtagttgatgactctttgggaaaagagggtacgggagaagcaaggggaagaaagacatctatttgtcaaagagcaaaggcaaggcaaagctggtgttggcagcagagcgtgactgctgattagttttctcgggagcaactgcttctcctggaagggaatgatatgctcatcatgggcaccttctagtcctatagtgccttgtatatcctttataattgtgtttccacattggatagaaatttttttgattccctctctctactaacagagttacaagcagtgcaggcttgttagtgataagttatttcagctttatatgcctggaaaagtttttacttaatttttatttgcagaagacatttttgctgggtatagaatttgaagttgacagtagtttttctttcagtactttaaagatttgtccactctcttctggattgcattgtttctgattaaaagtctgctgtcattcttatctttgtgcctctttgcttaatgtgccttatttctctagcttccttggcctccctgaagtcttaactatttctcttctactcaggtaaattgttggattttatctgagtttcccttccttgccttgttgcctggaaactttctaagcagtaagctagggcatttatagggctcacttcttttttttttcttctttcagacatcaatgtctgtgttgctcgttgttcaatatctgaaaaccactgggtttttttctgattttctttttagttatttaaggtggatgaataaatcttgcccttgttactccattttggctggaagcagaagttctgaaacattaaataaaaaaaaaatactaaaaacataaaaaccaacttctgattgcaaaaaaaaaccttttttctcaaaattgtctgtatcttaggattgtgagatcatttttttaaaaactcactgagtgccacagtgtttgacattatctcttttcttacaggaaacaggaatcattcaaactggattttaaaatcattgcaaatcagtgatggatcagaagttgcagagtgcaatcccgagtaaaagtcttcaaaaaattttgcttcaggtaacagaggaaggaaaattgatctaccaccttaaaaccctgatctagaaaaaatatatattcatgataggaagttataactaagaaaatttatttgcctcttaatgctcctgaatgaaagraattatccctttgttctttgggaggacttgtgtatctgagattgttgtaataatcagtcattttattaaaaccttgacatgatcaccagggaggaaaaatagagcaatagtcaaaacctgtgtgttagtccaagatgacttctgaagaaatgacagcttctgttctcatacctgtgactcagagaaaagtggtttctgcccagtcggctgcagatgaaagtagtgaaaaggtctcagacatcaatatttcaaaagcacatactgtcagacgaagtggggagacttctcataccatctcacaactgaacaaacttaaagaagaaccttctggaagcaacttgccaaagattctctcaatagcgagggagaaaatagtgagtgatgagaacagtaatgaaaaatgttgggagaaaatcatgccagattctgcgaaaaaccttaacattaactgcaacaacatattgagaaaccatcagcatggccttcctcagagacaattttatgaaatgtacaactctgttgctgaggaagacttgtgtttagaaactggaattccttctccactggaaagaaaggtgttccctggaattcaactggaactagacagaccttccatgggcattagtcctttaggaaatcagtcagtgatcatagagacaggcagagcacaccctgacagcagaagggcagtatttcattttcattatgaagttgacagaagaatgtcagacactttctgtaccctatcagaaaacttaattttagacgattgtggaaattgtgtaccactacctgggggtgaggagaagcaaaagaaaaactatgtggcatatacctgtaaactgatggaattggccaaaaattgtgataataagaatgagcagctgcagtgtgatcattgtgacaccttgaatgataaatacttttgctttgaaggctcttgygagaaggttgacatggtatattcaggtgatagcttttgtaggaaagactttactgacagtcaagctgccaagacctttttgagccattttgaggacttccctgataattgtgatgatgtagaagaagacgcttttaaaagcaaaaaggarcgatccactttgttagtcaggagattctgtaaaaatgacagagaagttaagaaatctgtgtatactggaacaagagcaattgtgagaactctgccttctggccacattgggctgactgcatggagttacatagatcagaagagaaatggtcccttactgccttgtgggagagtaatggaacccccgtcaacagtggagataaggcaagatgggagccaacgtctgtcagaagcccagtggtatcctgtaagcatttgagtttctttttaccatttctttaaacttgctttttttttcaaaaaaaagtccaaatttccattgtcataattgatgagaaattttaagatctgtcaaattatgattcttaggttaagcatttgtggttattgaaaacagatactccaattgatagctatcaagattgagttgatactgcaacaacataaaagtgtgtcaraaaataatgttattgggagtggaggaattagggagatttcctggtagtggaaaaatggctccatttgttgcttatctgtttgtgttcttttgagataaatgcctgggtcctgttctatggtgtagttcattattgtttttaggtctccagacctaacagaacttaattctgttttttttcattttccaactaatggccccacttccttccctcttaaacttttttatgccctggattcctttggcaaagtgatgaaacctatggattcagaatgatgtttttaaatgaatcagatgaaatagaaatcatcataaaggacaagttatgcggatatacatttatcatgatttttttaaattaacctgacaatttaggtgcttctttattaatacatttaataataatatctagttatgtgataactatcataatttcaaaatagaattagccctcatctgtatccacagattcaaccaactgcatatagaaaatatttttgtaagaaacaaaaaataacaatataacaataaaaaataacacagattttacaatctaatacactgtaacactatttacatagtataaggtattctaagtaatctagagaagatttaaagtatacgggaagatgcatgtatgttatatgcaaatactaggccatcttacataagggacttgagcattcttgaactttggtgttcgagggggtagggggcagttctggaaccagttcctctgagctattgagggataattgtagtgatgaatataagtccttatattcataagtatagattgtatacttatgcatatattggattatgtatatatacttatgtatatatagtatggatttcttgaaattttctcaattttagcactgtaaattccatgtcctggaaaacccttcagaccaaaccagagcagtcgatcaccctaaatatcaataacattttaggatatctatcacaactgtaataggatatggaaatatctgtgacttctattggtgacaagatcacagttactattactactactgaagtttgttgcttatattcagaattaaaggaaatgctaaatttcctttttgagattaatgaaaataatgaatcacttttttttcctcaaccagatttccaggtcctctgaattctatccacagtctcccctctttaagaatcctgctctggaaatacacatgatcaggctgcctgctctcagaccttatctgtacatctgaggacagtgccatgtgccatcttggatttttttatcctgaaaactcttgcttccttcagtcattctctatgtgaaactgtttctagaactctcacattccaatttttcataagtcctttaaaacctgaccctagaaataagcacctggtctagagaaacatcatttttattgaaatataagtgctatatttttactttcatcatcatcatcatcatcatcattgtattagtctgttctcatgctgctaataaagacatagtcaagactgggtagtttacagagaaaaagaggttcagtggactcacagttccacatggttgggcaggccaaacaatcatggcagaaggcagaagaggagcaaagacatgtcttatatggtggcaggcaagaaatcatgtgcaggggaacacccatgtataaaaccatcatatcttatgagacttattcactaccatgagaaaactataggggaaaccgcccccatgattcaattatctccacctggccctgcccttgacacatggagattattacaatttgaggtgagatttgggtagggacacagcccaaccatttgagtcatcaatcagggtagctaacatttattgagcattcaacaaatgccagatattgggctaaataatttacatattccatgttgtacaatcatcttaactaccttaggattttgatatgataattaacacttytattgctaagcaaactgatttcctgagaaattatgtacctcatcaaggttacttagctagtaagtgaaataactaagatttaatccaggcagctgacactcctaggtggtttcttaagatccagaaaggaataaaattcagaggaagcttttaaaagaacggaagaattctgttcgtttcagcatctgttgattgagtgaccccattcattgatgctcacggtatctcagacttggccatgttaggtatggtgattgtaaacctgcttacacgtcacagtcactgtccagacccctcctcaggccctttgaatcagaatcactggggtagggcacagcatgaatatttttttcaaagttcccttggtgattctatagattctatggagttgggaaccattggctaggagtttaaacagagctctttgctttttgatcaggacatttcaggaatatttgcctttccctaaaaaagacactgcttgggttcttaggaacatttgggctgacctgggaacctgcctgaaaagtgaaagcctgcaggtccttctctatacagttgaccactcaccccagccagtgtctaaggatgtgtttctgtgtctcttgacctgattccacatgaaacctgagtcacagacaaggagcccctcaccagcatgcctgtcctgctcagcactagatgacttgcacagcatctccctgccatgaaactgctgctgagagcaacgtgtcatcttagttaaaaatgcagtggtttaaaaaatcatgtacactcgaacattaagagcacaatcgaaatttaaatatagcaaagtgaatggaaataggttgctttagaacctttatcattgtttccctatgagggttgtgaatcgggtgtaaatttcagaataatttttggtatgcctataccctcctccagtttcttcttttctatagccctgctgctgtttcttctgagcttgttcactggtccccagctcaaacctgcccttgttcatcaaaggcctgggatggttaatttctaattgaaaaggacaaaagggatgatgcaaattgtctcttccctgcttcttagtctctggaggctgggagaggttgccacacctgtcagagtagactccaggaacttttatccccttggtctgagcaggcttggaggaggctattggcatttttattaaccattaagatgcggctggggaataggctggttgtcctgtcctttcttaagggagatttctaaagggggggccctttctgaatattcaaaccacaccatatcagcaatgaatcagtattttctaaggtatggtgttctgtatatcttgttttttagtttagaatctggtagaaattctcaaaagttgcacaggtgaattataactagtttttcccagctcctatgaattacttccttcaaagatgcggatcttaatgatatgctccttttcctgtgttttggtwattacatatgtgtccgttctggttcctcaatcagattgtaaatcgattaaggacaagaaataagttctgcattattttactctccataatgcaagcataatgccaagtatacagagaataagggcaatgtaatggttacaaatacagtctctggagtcagtcgacctgaatttaaattgtgaccctcactccatcactgactggccatgtgaattctggtacacagtttgacctctttgtttctaattaccttttttataaactgagaataatggtgttattgtggcgttaaatgagatgctacccaccacacagttctagcaaggagtgagtgctgctctgctcactctggccactgtggatatgctttgtcgagaacacatttccaccaccttctgctgtgtgtcttctcactcagggatgtttacagtggtatgaatttgaattcatgtttctcaatctataatgaggtagtttgaacaatccttcccacacatttaaagaatgtgctgtttgtacaattaattccttggccctcacattaaacatttttttttcttggataccttggtcagaatgacccatttaatttatatttgcacagctgtgtagagaagattggctttgaatggaaaacattaatgaagattaatgcttgctgacatactaactactggtatcctccttctcctcctcataagaaattaaaaccctatcccttatccagttacagtcatactccctctctcctgctctgaaataagacaggatattttgatgggtggctaaagtctccaagctaaagattggttaggggtgtttttcctttaaaaaaaaattctcaacctgcctgaattttgaggagtttagatacatatagttatcttgaatgtgaagtacaagaagtttctgcttctgccttgctggaattgctcatgtaacctgagatccacgtgcactcagagaatgtgaaggtgccagggcagaaattccactggctcctgtattatcactttacttatttcccttctttgttccacaagatttactgtacaagaatatgtatgacaaaatagaaaaaaaactcagatacactaaagagtaaaaaacaaagaataaaaatgtaaagattgaataaaaaaattttacatcagtctagaaaagctataatttaaaaaggaaggtcaaaagcagcttctgtattgctgcttcttattctgctttcttccttttaaaagttgcctttcttcttcatactttactctcaagaacagaaaattaaacctaacaggcaatttttttttagtgtttcacaaaaatgcctttgttggtatacatgtccttgattctatattttgtctctttcaaattgaagagacctgaaccttaggggagagataatgtctgttgtgtgcaaagggaccaaccgctaataaattcatcttctgagtygtaatttttatggatgataaaatatccattgagccccactgttcaatgttgtaagggattgctgttgagatagcaacatgtcttgttttctggtctggaaatttggttgccctggagctagggtacagtttggaccttgagacaattaaaatttcgtggggtgcttaggcttagctggaagcctgtgcttggtgatttgccaggctgcctctttcattacgaagggtagtgatgggttgatgacatgggtataggatgatgctggccccttcctgctgggcacagtgaaagggaatccagcttcctctcagctcctgtgcagtttagtcatgtctagtgcctcagtggaaaatgtgatggctgtcagagtccagctttgtgatgattggactgctttcccttattagctgcattggtgcactataggataaatgtccccccgcatctctgtagttataccagccctttggctaagatttggtaagagcgggaatgaaaaaccttgactctggattccagtgtaaggtaaatgcactggtggccactgttattctcatagtattctttggacagtatcagcattaggattattattatttttcttttccctagatgtcctacataatgggaattagcagctggagaggccccatccctgaaaatgggccgtggtagtatgtggcctgaaaagaattagatccagtgggcaaggataaaaccatctggtgaaaccctgatctgctccacaacctgtattttgcagaccagagactcaagctgccctttgaatgacctctgaaaagtcacgagtcatagaagtggccccttctgagcttaagggagtcctggggttagagaggaggtttccaccctgttgatcaaatgattcagcattcaaggatttgaagcatcagtggggggaggtgcacccactgacccccacgactagactaactggtggctcagacagcgccctctctcaaaagctgttcttagacagcrgtgctrggcttattttctggcaccatgacaaccaaatggtgcccctttcagtggttctttattctagtggcttgcttaaacacattcagagcttcacattaaatataggtcttctagagctcaggcaccagaaccctgaacccctaaccccaaggctcagtcccttacaaggaaccccaaacccttccttcttatttagsccatcactcctcaaaccctgagaaagctcagcagaaaacctcctcagccttcagcaatacaaagtcatgctatcattkttcaaggatagggaaagccagtcctttgaaacacaatagcagatttccttgaaggggaggagaaatgctttggtgtcttcttattttttttaacagctttattgatgtataattcacataccatacaattcacccagttaaggtatacaattcagtggttttaaatatgttcacagatatgtgcaggcatcactacagtcaattttagaacattttcatcatctcaaaaagcaaccctgtttcttttagctatcaccctctatcgccccatcctgtgcctctcccccagccctaaggaaccactaatccactttctgtctctatagatttccctattctggactttcatatgaatggactttcatactgtttggtcttgtgactggcttctttcacttcgcataatcttttcaaggttaaatattcatttatacggtagcatgaatcaatattcatacttttcactgctgaataatatttcattgtatgattatgccccattttatttatctgttcatcaattgttggacattgagttgtttccacttttggattattatgaataatactgctgtgagcattcatgcagaagtttttgtgtggacatagtttccatttcttttggataaatacccaggattggaattgctgggtcacatgataactctgtttaatcttttcaggaatggccagactgttttccaaagcagctgcacattttacattcccaccagcaatgcaaaagggttctagtttctccatatcttttttttttttttcccggagacggagtcttgctctgttgcccaggctggagtgcagtggcacratctagactcactgcaacctctgcctcctgggttcaagcaattctcatgcctcaacctgaggcatgagtatttgggattacaggtrcgtgccactatgcccrgctaatttttatatttttagtagagacagggtgtcaccatgttggccaggctggtctcaaactcctgacctcaggtgatccgcccaccttggcctccgaaaatggtgggattacaggcgtgagccaccacacccagcctgatttctccacatcttgaacagtgtttcttattgtctgtcttttggttatagccatcctagtgggtgtaaactgatatttcattgttttgatttgcatcttcctgatggcaaatgatgctgaacatcttttcatgtgctcttagccatttgtatatcatagaaatgtctagtcaaattatttgcccatttttaaattgagctgtcttttttatttttgatatatattctggatataagttcattatcagatatgtggtttgcaaaatagatttagatatatgtataggtatagatatatgaatgaagatcaggcaagtggcaaaggaggtttacaattttatttacagtggagcttgttaaacatgtcccttggacattcatctccttctcaatatttctcacattattctaccagcaacaactttcaaatatgattaaaaattttttttgtagcagcaagatcttgctatgttgcccaggctagtctccaacttctggcctcaactgatcctcctgcctcagcctccgaaagtactgggattacaggcatgcgccactgtgcctggctccaaatgtgattttaaaaattttccaacttctccagattctcccaaactccagtctgcatagcttttcttttttttccctcctccctttctgcctaaatgttgttatctaaattgttttttttattatccaaactctgcaccccagagcagtggctgggaatgagattgtcagtccacaaccttgggcacaaggacatcatccaacacagtgatggttgaggaagaggtcgccacatcacaataatgcactccgttatgcacaggtacaagcagggccatcactagggtgagacaagtgagtgtctcacccttgtgcaccttctctcagggtctcagaagtgccacccatatacttcttagtgagtgcctccttaaattgtgagtgctgggcagctcccttgtcccactctagtcctagccttggtacaagggcctaagagagtctgtggtttagaaatgaataccatcttcctagttcaggaatgaccttgactgaaccctcaggtacatcaatacagatatttgtaaaataaaagctaagagtggcttctgcatttttaaatggttgaaaaaaatcaaaagaaggatactatttcatgacatgaaaattatatagaattgaaattgtattgctcattaataagggttagggagcacagccatactcattcttytatgtattgtctgttggtgcttttaccctctaatggcagagttaaatagccacaacagacactgtatgacctgcagaaactaaaatatttgttatcttgtcctttacatgaaacctttgcctatccttggcttagaacatccctcgctacctggctaactcccattcagctttcaggcctgagcttagtttcactttctcttggtggtcttctctgccagcccccaactcccaccctggaccctaggccagagtttctgacagtcagtgctcaatatgtatttctcgaatgactctttgaattataaatgaagaagggcggtttccacccacttctgctgtctccttctttccttccccagaactactgcaggcttgttagctgtcctccgcctgaccctcagagcttggaaccagttcttttgtgcaatacctgtaggacggaatcaggattttccattgaaatttgaaaggatctttttcagtcctgcaaacccagcaatccatgcttgtcatctccccagacttggcctgaaaggtcatgtttgcatctccttgtccctggctccccatttcaactggctgttagaacccttgagaaagtttctggatcctttttgcttacaagggaacacctgagacagctgtgtgcttcagtgggccaagaaggaaacacgcctcccgatctcaagaccccagagctctgtctctgctcttcagaacccccagtgcttcctagacagaattttccacatggactggagggaatctagcttctgtcagtgggggttcggggatggacatggtggtggagggatagggacagcatgctgtcgttgtaagttggggagatcatttcattcctggggtttggaaggtgtttgtctagttccttcaaaccatttgacaccaatacttttggtaagagacctgaaacagcacccctctcttctaaaaagagccaagtactaattccagctctgccattggctgcttgtgtgacttgagcaagtcactttagggccgagaattttaggtatttttcagtattaaaaaaagagggagggcagacatgtattcattgcctgctgtatgtcaggcactgtgtctataatttgcatatagtaatttaacaaaktataaattaacacttcctcttaagtctaaaattgtgccagtctgtggcttcctgatttaaatcctgaccctgagtttcaggttgagtattctacctcccycagcaatgcctccttgaggtttgatttggaatgaatcttgtgactcactccctgacgctgtgtagtagaagggcagaggatttggctaagcctggaaatgtctgtagaagtaagatggtaagtactggctggatgctttctgtgtcttacactgggcttcccagatgtcttgtcttttatcttttctttcctttcattctcatggcgactgtctatgaggttaaacacccccatttcattgggtcctgtgtgaccaatgtcacaccatgttagcacttgaacccaggtctggctacctctaaagtccatactcataactgctcctaagttcctctggaagattctgatgcaacttacccctataacttggcagaaattctgttctcttattaaatgtgcaaatgttgagctggatgagtccctgagctcttttttttcttcaaatgtgaactgggtgtgacttttggatgaaatgggagatgcagggaacaataccaattcttaatgcgaggggtgtgttgtctattgaaatggctaagatttattttttatgactcagcctgctaggaggaggaaaccaagccccaaggtttgaatgttttacagaattgctataatttagaagtacagttaagaagttttataagtaagtaagcaagagcaaagtccaaagcaaactgcacacatcttgagtcagaatctatagcttattcacaatcatgctgagatacccaaaaatactggcaacgtatgttagtatttttccattttaatttagttttctgtgatctctcagggttctgaccaaccgacctaagtatgaaagacatgactcagtagcatttctttccataatcacaccattagaatgaagttttcacctacttcacaaggttgtgaggcggtaggaaaaagatctaagcgtgttgtatattaaagtgcttggcaaacactatttaaacctccctgcaagtataacttttctcctcttactccatgctctaaaggattcagagtgaggcacctggaggaaaaacagacacaaaactacagaggaggcaacaaaacaaaaccagaggcascctgttttcctttcataaatgctgcaagcgcagtcgaacccgctatggaaacccgacgctttggtttgcctttcagggtgctggcatgaatgaataataacttcattttcaacttgagattagataacttttatcaccaacacctacttcattttatccctatgttttaatagaataaggaatagagaatcaatttgttggtagaccatgctgagtagcttagcttcagaaagatttagcaccaaattataaatggtgacactttaatagtgagtgtgatgtgcattgggagccagcctgtgggagtttggcagttggaaagccccatagcttcattttttccagatttttgtacccttccatcagatagtaactccttagccttgagaaactctcttccaggacaaggggaaagtttatttgagttctaaattgtttaatagcaaatgcattatttgtctctttaatgagaccaagaaaatggcttcagaccctggttgaaccagccagttctccttttgatggccacaaaccaaatatgggcagtgtaatgatggtatgactctggcctgactaatatttttgtgargagaatgccattattatggtgaccatattttccaaacaaaaaattgggaactttttattcagaggaaagaggggcagaatatttgaaattgagactgacccaggaaatccagaatgaatggtcttggtagctattgatcacagcataaaggaaaaagaatgtgaatgaaccagtgcaaatctaattggttgctagaaaagtcaggagcctcaaaatgaatgacttgctagtggtggcaaagaatcaccatctacatgyaaagaaaacacattagatgccctgagaatccagtgactgtttttctcagagtttttatttttctgtatttttgccgagtacatttagtagctaccatgttttggaaatgtgaaagtaatgaaatagatttaaactccaggtcttgctcagctaaataatgtccctttccaaggaatcaccttgaaaggttgtccccactttccatttatgctgccattatgcacaatgtctcaacccttggattgagatttttagaaacaatccattcaagcatcctggctaatggtggtttgggtccatattgacatgtgattataaaggacaggattggttttattagagatcttaaaaactgaatggaggtgaaaggagatgtctggaaatattttaagcaaaggtaaaactatatgttttgtatacaaaacacaaacttgaacacagacttggccgttgcttcacagtcctggccatggctctcttcagtgttgatggacagttcagaggcactcacaaactcagaatgcagctttggtttggactgagcctcatgggcacaaagctcatgccaaagggcagattggaatttagccctgtctcttccaccttcctcggctagatgcccttctacagggcacaacctgcccagccccacatggtcatgctagctagaagcacatggaacagaagcagaagagcttctgaagcccaaaacttcgatttttttttcttggattcatacattatatgctcagaacagtggagtctgttgagttccaatggcctaaaatatgaagacattaaattaattcaggtgaatgcttttctacatgaatataaaataattatttggtaactttacgaactatagattcttgagctagctcatcttttttaaaaattttttattattattttttctttagagacagggtcttgctctgtcacctaggctgaagtatagtggttcaataatagctcactgcagtctggaactcctgggctcaagcagtcctcctgcttcagcctcctgagaagctgggattatagatgcataccaccatgcccggataattaaaaaaattttttttgtagagactgggtcttgttttgttgcccaggttggcgtcaagtaatcctcttgcctcagccccctgagaagctgggaatatgggctcgtgccaccacacctggctaatcaaaaatatatatatatattttttgtagaggtagggtctcacgttgttgcccaggtttgtctcaagctcctggcctcaagtgatctttccgccttgacctctcaaagtgttgggattataggcatgagccatggtgtctggcctggcccatcttctataatcacgttcagtcccttgctttatggataaactggccaaggccctagacaggtgaagttacttgaacaggtttacatagctaatgatggaagatccagaactggaatcaaggtctctatagactctctctcctcatctctaaaatattataaaaaatacatttctgatacaaatagctgtgtcacctagtaggttctctgttgatgttggcagattctgaaccctaatgcctttacagttcctgggatgcatacattcctgaaacagagcaccagccctggaagagttcatggtgggatagtggaggcagacatgtctgtctctcacttatttcatcctcttcccaggctgtaaataaccttggttgggccaggcgcggtggctcacgcctgtactcccagcactttgggaggccgaggcgggtggatcacaaggtcaggagatcgagaccatcctggctaacatggtgaaactccgtgtctaataaaaatacaaaaaattagccaggcgtggtaaaaaaaaaaaagtaataataaccttagttggtgcatagtttctcaggtttgtcctgccttctctgatccattatggttttcttggctgatcctgtcttcatttctttaagaaactggcacatcttgttgcaataacattgtcaattctttaagtgctcagagatgcccttttaatttggatgtagccaggttttgtgagttcatttctccccttagtctagtttctttccmtccttcacttggcaggtagttctctctggttaatgagtgtgagtgcttcaaagcatacagagcagccatggggtccctcccagtctctcaggaggatatttcccgttgttctttttcttttatttgtgagaagcagagccaaatgcaagacactgagcccagcaggaggggccagacctggcccaggaagagccagtatggtstgggctgcaaggaattgagccaggaaccccaggctcataaaacatcagcactgcaagggccttagagaccatcaggtccaacccttcattttcagaataggaaactgaggctcaaagagacaatgacctttcacaggtctggtcaggcatcagtttcagagccaggcctggagcccaggttgctctcagatcaactttcctgccctgtgcctggatgccaaacactatttctgacccattgggtgtggagctgaactgatcaaattataacagctaagtaatggagggcttaaggctccataatgattaaaggtatgaggttaggggcatgcctagtttcaaattctgacctggcacttactatttatagctctgaggcttaatgcaagttacttaccctctctgtgcygctatttatttctaaataattgtacctacctcttagagttgttgtaaagattagtagacttttatacgttgaatgttaacatatgttaacaaacacgttacaaatgtttcagcatttagaacagtagctggcactatgtagctgttgttgtttccttttattcttttttaaaattttgttatttttttataaataacctttttaaaataaaaaaccttttaaaaaataaaaagccaaatttagcagtgggttttgtataccaactttagtgacactgttaataagttctgataacccactaccattggaccaaccttctttgattcttgtcttgatttttaaccacaatgctatattacctccaggtaaataaagatttttctctagggaccctgacagaatagctataaaacktggtatactgtctcttaagtgctatatgagtggcagggtaatttgggtagtcttagaaggcttcatgggagaagtgggatattagttcctgccaggggccagaattgcttgtctccctaccagtgagaaggcaaagtgttccgccataagaaaattgaccaccgttttctttcacaggagtccatgggatttattccaaaaataatattgatttctgaggcccttttgccattttgttttagccagttcttttcctccygccttttatgacttcacataaaatttaaagggatataattgctctcaatagaattgaaattttcctgttgtgttttcaaagcatctattttgaaaattgccttctacactttgcagaaattgttgccagcatctgttgatgtgaggcaaaggggaccaatgtatttatttttatttgtttttttgtttatatagttagtcattttcagtagtgaaataagcaccgatgaacttaacagccaatagtaaaactagaaccttgacaaaccctatgcctagccatatggttccctgctcttgaccaccccaaacctctacatgtccctcccttcccaggtaccatcttccttaattctgtttctgtcattcccttactttccttttatacagtgttattgcatctacatgtattcttaagaactgtatattttaataaatgccactgaattgtacacttcaaaatgrtgattactatgtgaattcatgtcaaaaaaaacttcagattttaaattttagttgttttgaagtttatataaaggtacactgtgtacaatmttttgggacttattttacactgtattttattcctaagattcatttatacttttgtaggttgctgtagttcatttgttttaattgctgtattatattcctgtatgtgaatatatcatactttactggtgcattctccagttgatggacatttagagtgtttctatgtttttggtattttaaacaatccatccatgaatatttttgtatatgttctttgttatatgtgtccaaaattttctcttggatatatccctagaaagcaaactgttgaaacacagggtatgtgaatgttcaaatttaggagatagtagtaaactgttttctaaagtggttgcatcagtttacacaccccccaacccttgccactatgatgtacaaaatattctttggatctacactctctctaatactttatatgtttcaacttgttattttgccaatcaaatggattaaaaaatatttctttgtttaattttgcattttcctgatcactgatgatgtttaccatatttttgtgttttaattggccgtgtagtttttgtgtgtgtaaaatgcccattttctgttgggttgcttgtgcttctttattgatttgtaggatttattaaatatatatatgtgcatatatacatatatatttaatatatttataaataatataaatatatattaaatatatatgtatatatgcacatatatgtatatacacacatatatatagagagagagagagggagagagagggagagagacagagtcttactctgtcacccatgctagagtgcagtggcaggatcttggctcgctacagtatcaaacttctgtgttcaaaagatcctccctacttcagcctcccgagtagctgggactacaggcatgcatgcctggctatttttttttatttttagtagggatgrcatctcactgtgttgcctaggctggtcttgaactcctgagctcaagctatgctcctgcctcagccttccagaatactgggattataggcatgagccagtgtgcctggccagatatattcttaatattatctttttttgtttgtgtatagtgttaatactttctcctatattttaattgtcttttcttttttgtaagattttgaataagcaaaattcttaaattttatagtcaaacttattaaagttttatgaacactgctttttgtttattaaatgttttctctctacctaaagtctaagatattcacttatattttctgctagaagctttaaagttttrtttttgacatcgaattccctaacccatttaaatctttgattttgtatatggtgtgacgtaggcaggaatccattgtcattttctgtgtcaatattcattttccagctctaatctgacatgtcacctctatcatataccaaaattccatacatgtgtgggccttctctgagccctttaatttagttcattggttaattcatccatcactgtgccagtaacattaggaagtcctaacaacattttttaagaagtgtctttactattcctggccctttagttaccctgtctgtctgtctgtctgtctstctctctctctctctcataattattgttgaagtataacacatctacagaaaaatatgcaaatcatataaggtgtacaggtcaatgtatttcacaaagtaaacacagatttagccagcacccaaaccaacaaatggaatattagcaccccagaagcctttgttgtatctcctttcagtgtctctctccctcccacaaaacaaactaatattgtcttctaacaccattcacttggcctatttttgaacattatataaaagaattcatagttggtactattttgtatgtctccttttacccaaccttatatctgtaagattcatccatgtcgctggatgtagttatagtttgtacattctcattgctatttcccatttcatttcatgaatatcccactctttattcattcccctgttaacagtcatttggtttgttcaccgtttggggcttctatgaatagtgctagtctgtttcctgccagcctttaagtccttgcctgagctagttccctcttcttgtcatatctctatttactccacgtattagtccattttcacactgctataaatatactactsgagactgggtaatttgtaaacaaaggaggtttaattgactcacagttccacatggctgcagagggcttaggaaacttacaatcaggcggaaggggaagcagtcaccttcttcacaaggtggcaggggagagagaaagcatgtgaagggggaactgtcaaacacttataaaaccatcagatcttatgagaacttattcactatcatgagaacagcatgggggaaacttcccccatgatgcaatctccagtcacctcccaccaggacactccctcaacacgtggggtctatggggattacagttagagatgagatttgggtggggacacaaagccaaactatattactccactacttaagatcctggccatttaacaaaacctaggtaagtacatcccatcccttttgtgaagagctcttagactaccctaatctaccaagttcttctctgtcagggcatctaaccttgtagcttatgagttgaactataagtgtaatacttggaaggtttttttgcaaaaaaataaaaatttaaaagaaaacaaaaaaataattatctagcacatatgaattaagagaagtttttcctaaacatgtaaacactgagtttacttgtagtcataatatgcaaggaaaggagggaagaaacagcttccaagagtttgttcaattcaaagagatgattggcataaccaacttgcatttcatctttcttcagaagaaagcataggctaggttcacagcatgaagtgatggagaaaatgatcaaggttgttgacttacatggttctgctcctaactctggccagtttatgggatgggatacttgtaagagctgaggcagagtattaatatttagtttgtgaagctgtcagatcactaggcaatggaaacttgaaaagatctcctcaactactttttcagattaaggattttggggtaccaaaaagccatgtgacttagtagtggtttgaagtgcatcattttcttaccaatgggacaagatatctgaatacactgaattagaaaatgttaagataaaagcaaaattcaagccaaacaaataagactttcagagttaccagcctgggtgatagagcgagactccaactcaaaaaaaaaaaaaaaaaaaaaaaaaagactttcagagttacttagaagaaatggaaattgcagaagagatttgcagtttttcatgtgtaagaaccgtgcatgaagattttgccagctgctctggtctagttagatgattaaacatctgcttcatcatygaagctcattgtaaaagaaactgatccatctaaaaaagaagtcatgcccatccaaaggatacgtcattcaaataattttgtagataagtatatgcatcccaaaactagccggaaatttctgattatgtggtcaaacacttggcaatgttggaggccaatgggcattgtaaaattactgctaagattgaaacttaaagtggctgttagtaaaataggcctggattcagaattgaaatgcgctggaactgaatacagtccacagtttctaaacctgctaaacatcagtattctcatcaacgtgattaaaattgaacagtgacaagcacacatctacatacctacttgtgatcatgtgactcactacttggctgccttcatttgtatttgtttaatcttacctaacttggctttaaacttaaaattataaaagtaatacactctccttgtaaagaaaaatcggtgtataaaacttttaaagtgacctcttctccaatttctcccaccaagtgaacaaacagttcattggttctggtttcacactttcctgtgaattctgtctaggttttcagctccttcggggcatgaatttcttatttaattttgtaatcctttttatccagaatagtgctttgcacaaaacaagttctcagtacataacttatttgactaatgattgattgaataaggattggaggggagaatgcccacatggaaacctagaggcttgtaaccaaaccaaaaagcaatgttttcaaagttcaattcagttgcatttgacaagaagtattactaataacctttaaaggagcactctaattgctacttttctaattcctccttccccctaaataccaactcacaaagagataataaacaaatctttgagaaaaggtaagtgtgagtccctcctccctacttctccttcttagagtgagggacatgaggcaggagaggctggggaagacagtagaggtgtcctcgcagtagataaatctgttactctgtattgcctgactgtaaaatttgctgtggaacatttttattggtaatttcttttgcagatgtttctggagaaagttgaaattatgctggtaaaaacatatctagactccacattgcaaatttaaacatattgtattttatttccttaagcaaaaagggaactctttttccccctccttcttttctttctttctttttctttttttcttttttaagctagaaaaaaggaatgaggaaagtccaaagtgtcttttcctatttggactgaaaaattaattatkgctttgggaataaaggtagtgagcatcatatctcatttctagttaacyggtagttccctttacatataaagagcaattacttttgaagactcaaaaaatatatagtcttaaggtgtgcttcatattatttccccatggtttcatttttatttcattatcctctgactccatgacaaaatgtttatttggtgcttgcaaattgaaaaaatctggagtggaataagccacttgccatttctgattaattgccttggatatgcttttaaatcctcccactgaacctgaagcgtactgtcccaaataacgctttttgaagagaaaacttttggaatgcccttcatttctttgagttttcataagagtggaatgtgttatacaggcagcctagtgagcagttaagagctgggctctggaaggagtcccggctccaccgttaactagcagtggagccttcagcaatttacttaatctccctaagccwcagtttttctcacctctataatgagaatcatgaaaataacacctaatctagagagtcatgaggattcggtatctgaaaaagcaacatggcacatagaaattgttcaatagattttagctgctgctattgtcattatgatctctgtgactactaatcgtaagaatgaattgtgaagatctttagtacaggaatgtgctctttatgtctgagcaaatattttgcacattgccacagtctttatttgttagcacgcatgacatttttactttgctatgtggtcatttatagtcggttgcccctcctagattgtaagcctgctggccggagggagcagctcttctagattagcctttgcatgcaccagtagactcagaaggccttgcacttagcaggtcctcaagaaaggcttattgaatgcactgggaagttataggtggagggctgggatccagcttgctccagagtgaggtctctgcctcagaaatatcctcgcagcagttgaataagggccaggactagggtttgggatttcgcatttcaaccaggaattggagctgccaagatgctagtcacaatagtgagagccagccttccagtcgctgaatgaagttgaaaagtagaacagatttggaaaacagaagttatttcatttttcagggtgaccagattagtttttctttattttttttatattgcatattttgaattattaaaaagtaaatggttcagaacatgagattcagatttgtaaactgccagaatccaggttgaagaaacaggcagtaagagtgtcagtagaaattatccaatcatcaagggaaaaatgcaagtctgagagtctcctgacataattaaggaagtgagtcttccttatggtctagtggggccttccttctgtcacggcaattaaagacacatccctaggcacaaaaacacatcacatggaaagttggagagcccctcatttctctagtcttttaatacagcagaaaagaaaaggtacataatgcggtggtctgcttggtgaaggagactggttagctatttaaccaaacctattttctcttcctcttcagtgcccagctagaccatatttccagactcccttgcagttagatgcatccatgtgcctgaattttggccactggaatatggaaagaagtgaagtacaccatgttctaggcctagcccattaacagaacctcctgggcaatcctataccctccctcttcccatcagcctgctgaaagggaaggattggagtttctggaatagttggagggcaagatctaaggagcttgctccctgaatctgagcacctgcaggtgactcagagaccgagaactaaactactttgtgaagcctctgggagagttcagggtttatctcttatagttgttcgaattaataacattccctcagccattaataacattcccttatagtgctttacatctattggggtggacagatacaaagtaatcacccaaattacttaggcaaaagaaaaatgccgtgttcaggccgagtgcagtggctcatgcctgtaatcccagcactttgggaggccgaggcaggcggatcacgaggtcaggagatcgagrccatcctggctaacaccttgaaaccccatctctactaaaagtacaaaaaattagctggacgtggtggtgggtgcctgtaatcccagctattcaggaagctgaggcaggagaatggcgtgaatctgggaggcagaacttgcagtgagccgagatcgggccactgcactccagcctgggtgatagagcgagactccatctcaaaaaaaaaaaaaaaaagaaaaatgccctgttcagtaacacaatacaagggcaagcctaaatagattacagagtcacttttaaggagttgaaatttcaactgtgatctgaaagaggaaaatgaattattttattataaggaggcagtataataatgaagataataattggtcctatgtgacagagttgttctaaggattaagttaatgttttaaataacctaataataattatatatattaataaattagtcaaatgcacagaacattgcctaagttgtaaatgtttattatttttgttgtcttatttttttttttggagatggagtctcgctctgtcgcttggactagagtgtggtggtgcgatctccactcactgcaacctccaccccaccccccgggttcaagtgattctcctgcctctgcctcccaagtagctgggattacaggcacccactatcacacccggctaatatttttgtatttttagtagagtcagggtttcaccatgttggccaggctggtgtcaaactcctgacctcaagtgatctgcccatctcggcctcccaaagtactgggattacaggagtgaatcacggtgcctagctgttgtcttacttttgagttgtacttcctaggtgtaagtcccagctctgcctcctacttgttataaccttgggcagtgtacttaatctctctgattctcatttcttcacccataaagtattgatggtaatgatacatactttrcagagttatttatggatcccttctcagggcccaacgtaatgagtaacaaatttatggcctttttacttcaagttgttttaggatccatagagatactccaagatccctgttcagagagaccttgctgtcatacgctcaagaattaaataaccattcaaggcattgtgtgatttcatgtaaataagagtgcttgtatcactgttgtggtcgtatgttaatttgaatggtcaaaggacctttgactcccttctgaggtgctgcttagttgaatagtctacatgccagtagatttctgtagtgtggctattctatggatatctgtagagcaagatcatcttttttagcaaacccttttctgtgtcagtttgtttgaattctctaaaagctagagatttattattttggtttcattttaaaaatgcagcctcttgtgtttaaatttatacwaattactcttagatttagtccatgttaaaaagagaggattgaaaaaaakcagagagagggttggattagataagtgcttttcagatggggttggaagagcccctagaatttatgattgtctttgtcaaacaccgtgtaattctgtcctttgaaacataaaataactaacagtataattgtgtactaaataccttattattcttttaaagtaattgatttttcagattttaatatattgtgtatctattcaaaaaaattaaaaatacaacagagagaaaaaatctataatccaaccactaaaggatgcctagtgttaatatttggtaaattttctttcaattttcattttatgcatatatatttttttcccacaaaatttgagtcttaccatatataatgctttttttcttagcctttaaaaaataatgacagtgagataactcacataatataaaattcaccccttttaaagtatacaattcaatgatttaatttaccatattcatggagttgtacaatcataatcgtaattaattttagaatattttcatcacaccaaagagaaactccatacccattagcagtcacccccatcctctcctttccacccacccacccgtccctggtaactagtaatctgctttttgtctttatggatttgcctattctggacatttcatatatggaatcacgcaatgtttggccttttgtgacgggcgtttttcacttagtgtaatgtttctaaggttcatcatgttacagcatatgttagtacttcactactttttatgactgaatactaccccgttgtgtggatataccactttttatgtatccattcatcaggtgatagacatttggattgtttccaccttttggatgtatgaatagtgcttctgtgaacattcatatgcaaatttttgtgtggatatatgttttcaattcttctggttatatatatctaggaatagaaatgctgggtcatttggtaattccatgtttaatattttgagaaattacccaacaatttttaaaaaatggctgcactttttcgttttcataggctgttttttcatctaccataatatcatgattatttatatatgtcttaaattttcttcaaaaaaatttattttccttaaaacgctcataacagattatgaaagtatttttaatagctgacctacactccactggttacataagcaaattaattgttttcctaattttggacattttacattattattataaacaatgatacaatgacatttgtatgcatgtctatttctttagtgtaagtatgtagaggtagagttatggggccaaagggtatagacatatttaatatccttgatactttgatgccgcacttttctctcagaagaattaccaacctatacttccacgaaactgtgtcctttgctaatttttctaaagagaacttaacaaaaacttatatgtattagttctattgctgcataacaaatgacctcaagtgtagtggctttaaacaatagaaatttatcatctcagtttctgtagaacagaaatctggcatggtgtggctgtaatctttgctcagggctaaaatcaaggtgtcagctggggttgcaattctcacttggggctgggatcttcttccaagctcacttgttgttggcagggttcatttccttctcctactttctattcattaagttattttctttttctgtgaattaggaaaagacacacttctattctattcacctttagtagttgaatacctatgctctgcaggcttgacatttgagaaccagtgaactagattaattttaagaaccttctaggtataatattttcagtttgttagctatgtggccatctttttacaatagaaacccaaccttaactgaattggtggtccttcaggggaactcctacaattaacaatgtcaaagagacatttttttaaatagagagttaacatttcttttgcttgttactgcatgttgaaatacttttttaaattgtcaagtgctccataaacattagctcttattggcatgtatattttgggggagcagtgtgcagtctttctctcatcgcctttcaggattttgcctgtctctggaattagaaatgtcaacagcagagatatcaataatgataacaacctttcacaagtgtgttctgtggaactctagccctggaaagtattttcttgagcaaagcattccacgataatcaagtttgggaaacatcacatttccacacccctctgaaaagtcataggcatatgaaaagttcttcagtaaaaaatttgtttcaattagtagagcaagttttccttgaccatggaatgagcatgctgtgggcaatgctgacttatgtgtctccctcccttcattggtcaggttaagcagagttgagtgggtcatctaaaccctgggtgatgattaagagctcaaagtcctgggttctggtgtcctagagcaaatcacctaacctgtctaggatgctaattcacccttggtaaaatggtgatggggacttaattacacattttaaagcctcagttctaacattatggcattctatcatttactttattataaaagtataaaggaaaaaagttctcataaacacaaccttgccaaaaataaaataataacgaaaaccatagcaaaaccaaaaaataaaaatcacctgctggacctctcaggagcaattggatcatgagaatctttactcatgaatttttgcttagtcacatagcgtaaacacatgtacctatgggcatatagtttgtgatgatctgtctaaatgacagtcaggtgtatgttcctatatgtcagacccacaaagttggtggtaatgtgcaaagaaaaaggagaaaagaagtttgactggatagacacagtcatgatggagaaggagaaaactagacatgtggaaaggaaagagctgagagcmttgaatgacttggggctaaaaggcagcccttgttcattcatgaggataggaataacattatgaacggtatggtttagaccagttgcttaggctgtagtggacagatggatcagaagagagaattgccacaaaaactgggactgaggccttgacaacaacatggtgggaagagatggacagtgccaggttgatgtctagagaaatgtagaggaagggttattggaacatgatgactcataaggtctgattgttgagggagaggaagaaccagtgggaacacctgggtggagatctcagatgagggatgtggtacagttgatgatacggggagggggtgtgtgtgcagaaatagtgatttagaggtaaagtgaaagttttacctctaaattttactacatgtattgagatctggaggggctatgaggcagacaaatggagctggccaggcaagcacatgggaagtgggactgagaaaatcacagttgctttgcatattagaaatatgtgtgttacatgctaatcttatttactcatgcactattgcactgggcaggtacctctgtactccatttaacataacttctaacttgtttgagggtaaatttattagtgtttcaaaacatctgacatttatactgcttttctagccccattctatttctcttttagtgaatgtagtgagtggttgctatttcaacccaagcacttggtgttcacrtcttgcttgttccttggtggcttctgtttgttagtttctattgtggcttttgaagaaggtacctgggtttgattaaatttgttacacccttcaattatatcaaattatagtggaagtgttttttgtgttttttgtttgctgtcttaaaaaggcagcagaaaacaatatccacatggacaggtctttaacttgcatgattttgatggcatgtggtatgtaggtcaggattaggtgatgtgagaggcagtgtggcttttaattaaggcttgctacatgctggtcttggtcaagttttttttttttgtctaagcttctgctctttaagctgtgtaatggaaatactcatgctacttatttcattatgtgttctaagacttcagtgaggtgatacatggatactgtactaaaggcacacagttcttggtaccaagtaagtattcaatacattaggaatactatttttattattattggaaatggaattatgtgaggcctacaactgatagaactggttagaaattttaatttatatagaaaagaataaaggtatgaaaaataaaagagtatgggaaacaagattagcttgctgtaaatgtctgtttcttagttttgtgagcttggcaagactttacttccctgtgccttgaatgagtactcgtgtggcttgccttacaagaaaattgcaaggattagtgaatttatattgaactcctagactctctgattgcaaagtaggaaatattttttgcagctgtgatacattaacgttagcatgaacccaggcacaattactggacttagacattatttaactttttttttttttttttgagacagtctcactctgtcactcaggctagatagagtgcagtggtgtgatcaaagctcactgcagcctcaacctcccaggctcaagtagtcctcctacctcatcttcccaagtagctgggactacaggcgcatgtcaccacacccagctaatttttgtattttttgtagagatggggttttgccatgttgcccagcctggtctcaaactcctgggctcaatgatcatccacccgcctcggcctcccaaaatgctgggattacaggtgtgagccaccacgcccagcctgcccttatttaacttatgaaacctttcagcatttcttagtctccgtactgagactaagcaggtactgtactgcctcccaggggttcagcgaggaggaaactgtggggcaagggcactggatgctctgcatgtcaggtttcaagcaaaacctgctttttggttgtattttgtttcttcctgatcagagagaactttccacaaaacttccttctcacttagacaaagctcaggaaaccagttgtgtaagattataacaggatgtactgcaactgaaactcttctattggagatgtaaagattagcttaagcaggtgatcaactgacagttccccaggagtccatggaaatgggaaagacaatagcaaacccatactatgaatctgtggatggggactgaaatgttctaagggctaggcccttaaggaaggtgtccaggacaaatgagaactccttgatggcttttcattaacattacaccaagcaatagccagactttcttatgatgtgcataccattagccaaagagaaactgacttttgtacttacatgatcaagaagataatgcactgtctaggtgtggctcatgcctatagtcccagcactttaggaggctgaggcaagaggatgacttgtcaggccaggagttcaagaccagcctgggcaacacagagcaaccttgtctttactaaaaaaggaattaaaaaaaaaaaaagaagttaatccttaggattttctgtctaccttttgttcaggcaaataaggaagtgaaagttttatccaatatatttaaattgtagcacactgaaagctcaagtgcaaaaactagtttttgctgttacatgcctcttataacaccatttggagggacagctcatgggaggagtcagcaacctgagttagaccaaaaactcctgagccaaactgcctgagattgaatccaggcttgacctcttccaactacatgccgttgggcaagtttcttgacctttgtgtctcagtttccaaatctttaaaatggcagaatagcagtatctatctcagagttataaggattaaaagaattaataaatgtataatgttaagaacaatacttgatgtacatagtaagcactagatatgagttagctactattattttgataggttggtggttaaaactgttggtactggactcagatggcttgaatttgtgtcctagctctcttacttgtgagctgacttcacacagttatctaacttcttagtctttatatttgctaaatggttagactccttccttcttgttttttttcatttttggaggtgagatctcatgaagttgcccagattggagtgcagtggctattcacagatgtgatcagagtgcactacaggctcaaactcctgggctcaagcaatcctcctgcctcaatctcccaagtagcagtccactctgcccagctcaaatgattagactttttgtgcctattttattggacttatgtgagaattaaatgagaatttgcagagcacttcataattcacaccatgtctggtatatattaaacactcaataagtgttagttattggtttcttggttttgttttttttttttgttttgttttgtttttttttttagatctcagagagaatgcaattagccctcaagcagaatgttggaaaatctgagagtaatatcttttgggggcttatctccaccttcagttgctggaagattgttcccagatttgtatgcttgccactgaatgacatagtcaactgttgtctttctgagttcaccctccagaccatgatgttctatagcagatcttggcaacacatcaggttccgggaaagtacatgaatcatgatgggactctttaatctgtacctctgaacttcataaaaaacatgtgattctattagcagatccctagctaagttccatcttccctgctgttctcacatcctttcatctcctctctttacccactggcactcaccttccattgccttctcaactcttcgctggtctccatgtccaagcctcccttcctgttgtctttgatccaatccccaatcctttcccacctggactcctctcccacatgctcccttcctaatgcctcttcttcccattcttcagaacacctcctatgctatgcgcaagctctgtgtacttctgcctcactcaccactctccctcctactcttttcctttatggtggttttgtttttaactgaagacatcacatactctgctgtattcccatgtggaagtcccaccttcttctgtgggaaaggggggaattttactttctcgtcgctctgttctgagagtggatgattgaactgccactttctccctgactctcatgggatgttcatgtcatcttccaaggcccttgctatcgcattgccacatctcgtttccaccatcctagatggaatattgacaacagagcctggcacatagtaggcattctaatatgtgccacgtgaacataataaatgagcgagtgaataattgattcttcctaaaaggttttagcaactgccacactgctttttgcctatcctaagcacattttcttgtccttatttattgattcactgaatagacatctgtagagatgctaggtgtggcttgccactgggagtacagtggcaaacacgatgtggttcttctcttggagcatgccatttagtgaggggaagatatattacatacataaattaattacagttgtgagaagtgtttgaagaaaaaagtgcaggattttatgyggcctaacctacgggcgatgagggtagccagtgagggcttttattagggagtgaggttcaaatctgtacttgggaggcaatagtaattagttaaagtcaaggagggtggagaagaaggaagagtaaagagtttttcaggcagagcatgttgcacgtacaaaggccctgaggagtgaaggagcatggtacacattgaaggggctgaaaaaagaccagacacgcaggagcaggagtagggggagtgggtgagggtactgagaggtggactggggtcaggtctaggggcttcagcactcattttgttaaccttgatatttcttaacatcatggctatccactgtgtacaaaggatttttgccctccatgtttttacacattatttatttctatccctgtaaaagctctttgtcttatcttcaactcaagagtgatcacaatggtgagtttggaaacaaattagtcataataagtcaggctagttggacaattaagagcgtgagctttgttcagacgtggtggctcaggcttgtaatctagcactttgggaggctgaggtaggtggatcacttgagcccaggatttcaagaccagcccaggcaacatggcaaaaccctgtctctacaaaaaattagctgggcatagtggtgcacactgtagtcccaactactcaggaggctgaggtgggagaatcacttgatcacaggaggtagaggttgcagtgagccgagattgtaccactgcacttcagcctgggtgacagagtgagactctgtctcaaaaaaataataaaagaaagaccatgagccttacaaaggcaaagctgggtttcaggtcccagcctcgtcaccttgctgctaggtgatcctgggcaagtttgacctctctgagctttcatccgaaaatgaggacaataatctttaccatgtggatttgttaagattaaataaacaaatgtggtaaaagtgctgagtacagaacctgggttgcatgaattgttcattacatggctgtgcttgttgagggtcagggagcattcagagtccctgtgcagtaagaaacagagtagcccaagccctttttcagctgtgtsccaccttttcctggcagagccctgagcaataactggggtgggagttcaggtttattgatgttttattctgtgactgctttcttagggtatgagccaaaaactttttctcattctttgttctaaactcaagagtatttggcaccaggtttagtcctagcctctgtttctcacttgctccttagggaaactatctgtttttcctctgttagcttgtgtctgcctcctcctatttttattgtctctggctctcacatcacctaagcctgactccccatatttttatttcccaccccagcttctcacccaactcctgccttcacccgtcctggattctggacctttgtcttccctggtcactggaacctgattgtctttgtttcarctgtccaccaatttggtcccagactcttggattgcactggattggtgataccatttattccttttcctccctttgacctctcggctctggggccatagctcatgtatgacacttgctctatggagaaacttaaaccttgttttccaagcttagacccagaatcatggccaatcttctcttggccttatgtgctgtgtgcaaaaccttatgctgttgctgcttttatttcttcctggatgagaaagacatgacccgtggattatcatcatgaattctacaggcctcactctgttgtactttagtcagatcgcaggcatgaggcttattgcatcatatttgcctacccccataaaattatgaaatctctggagacagcagttgtccttaattatctctgtgtctccagtattttgttcagggcctgttatacaaaagaaggcctttaattaatgttttcagtattaattggaaattgacactctgccagaaaaggtcaacccacagcgtcagggaggagtaggaccattggctgttagagggcagcagggaccttggaataattccagaaatggtatctcagcctcaagttatttgggggaatgtcccatggccatttgacagagtcagtgaggtggccaacctctctgcttggggaagactttctagataaccattaaggcacaaaaattgctgtgttaatagcctttccccctcctttaacctgtaaaagataagtctgtgtttgctttgtcagtgtcctctctttaaagaggcagtattttggctagctgagagagagaagctaagttcatctataaaacaatctatactctcagggggaggagaagaggcacaaaaatcacaaagatctatgtggagacagcaaactttggggaggtcattttgcagaagagtgttctgcagcagctaaaggataaaaggaattggagaggaaagggaaagggtgaatgggcccctctgatattctctaacaaaagcaaataaaagatttagcttgtgaattagctttctctgtctttttcattgttctgtcccttgcatcaggcacaatgcttggcacatagatagctctcagttaatatttattcaattaattccttaaataatatttgtggctgttggaattgtatccttcaacaaatgatgctgcccagactacaagacctatagtcacacaattcacagtgttatggggcttggagcacgatcttttgagaccctaactctggtatggtggaggtattaatggagaggcagggagacatgtaccaactcactcccaacttcacagtgaagtggccatgcccttctgtgcgttagttcaggaccaaggacagcattccttggacgctccccctcacattttaatgcactattcccatgcttgcgtgtgatttcaacatcctgggccccttgtctttccattacacctgctctgcaacttcccgactgggatcaatctaatactgacttctccacttctagatatagacggctaagtactgctggagagaaatgacaaagctaaacttttggatgacacacaatttcatggtttgttatctcagctccaccaagcagtcctaaaatgtcccttgtagtcactctttatcccatacccacaatggtattccaaacctgcatcactccagctattcgcacgtttgccttcctgttctgtctccatatatgactttgtctcctatttccagggggaattgaggttacaaagtgtgaattccttcaacttcctttttacactcactttgctttctttgttcacccttaaaggaaaaggtgtcccttggcctcttcaaaacaaaacccctatctctgcttctgattttcctccccaaccctcaggtcctctaggaccagamcctgttacctcagatattctctccttcttcttgatctctgctggatcttcctaacatactggttagtgacccggacaaccatgagactctgtcataatcacaaggacttcttatttaaatatagagatttgggtaccctgtttctagctgactgaatcagagtttttggaggtgggccctggaatctacatatttaaccaggattcctggttcagaaagcaccattaaaagctctgcctttactcttgctgcccccaaacatcctgaacccaggagccagaaagacctcttcataatgcaaatctgatcatctcattcattccttgttaaaagccagagtttttgtttcctttaaataagtcaggttcaaggcaggatacacatggcacatcaaactggacaatatgaagagagtttaatgctggtgatatttacaaaagtgtggcaggatgtgggacacaaataaggcctgagcaacaccccagggctaacagcaaagggcctgaagggggaagaggagggagcaattacttgtgcaatgaaagagggctgcttggccagatgtgaaattagtggaaagagtcatctagcctgcagcaagtggcaggaaagtacagagtaaaagaaatactccttcttcctctgcttcctccttctgaacctgggttagtgctggcctttggatgaggataagggagactggtacagtgtttacaggccagcctccagcatccagagcttggagcaggtggagaagggaggagtatgggtcttggggaaggggaacatgcaaacagaagttacatagcatggtttctaaccagcactcctaagataggggctgaacccccatggtggcacataatgtcctcttccagcaggctttgtcctcctgccttgcaccctcccctgtaacctctatgcagactggcagaagtggggctctgccagtcccaggttgtttaattgctcacatctgtcccatctctttgctcatgcagtcacctatgtctgaaatgcccactctgcttttgttcacctaaaaactcccaaacttcctgcaaaagtaagcccaagtgacaccatctcaatgaagcccctctttagccttctcagcaatagaattgaccactgcttctttcgtgctcccatcatactccacgcttctccaccattgtaatagtacagttgaccctctgttatgcatcctcggattcaagcaatcacaaatagaaaatattcgggggaaaaataacaattcaacaataaataatacaaataaaacaatgcaacataactatttacataaaatttgcattgtattggatattataagtaatctagagatgatttatgctatacaagaggatgtgtgtggatttttgcaaatagccattttatataaggaacttaagcatgtggatttgggtatctgagggggtcccggaaccaatgtcccatggataccgaggaatgactgtattaacatgtatggaatgcttactatatgcctggcactgagaagtttgcatgtgttaactaattaagtcctcataataactatattatccccattttacaggtgaggaaactgaggcgcagagtggttaagtaagtttcactggattaccaagctaataattagtagagacaggatktagagccaggcagtctgcttaacaacactgccataaagctttatggcactagtaccactcgactgtattaatttgttacatgcctatcttcctctactcgaccacaaactcaccaaggacaggacggtattttatttacctcttattcactaccctcttgccctgcccctgtgcttagcacagcttggcaaatagggagtattcaatagatgaatgagggaaatgaatgaggagtgaaagaaaaggaatcctttacaaacattccttctttatggttgagaaggctgcaactcagagaagctaaataatttgccctaagtcctagcctatgctataatttcagtccaggtcttcctcactacaatacatctttttgcccaccatatcaggctgctttcaaaaggaacacaaaattttaatgctatacagttgtccccaaataaaaaatatggcaagctggcaaaatataggttcaattcatggaattgaggtcaagatccaaagcagaaactctaccgagggaccaggcatggtggttcatgcctgtaattccagcactttgagaggctgaagcaggcagatcacttgaggtcaggagttcaagaccagcctggccaacatagtgaaaacccatctctattaaaaatacatgcacacacacacaaaaataaccaggagtggtggcacatgcctgtagtccgagctactccggagcctgaggcaggagaatcacttgaacttgggaggcagaagttgcagtgagccgagaacacaccactgcactccagcctgggcaacagagtgagactctgtctaaaaacaaacaaacaaacaaacaaacaaataaacagactagagatatggaacagaaagaaagttctaggtcagaattcaggttaatatccaaaragttgggatttaagaaccacagttctggaagcagaggacagacatttgaatagcggattattttgacagcatctgagacaatcccctctttttgaagctatcacttgagcaaacagagggtggtcaggatttaaggagtgcgtcttctgaggagcggggtggagtctaaccaaagccaggtctataggacagctctctgggggctccagttccgttattggaaataaagtaccagttaactcagagctcaactggcaactcctaaaatgaatagggaaagaggaatttctcctttcttatataagcctccttccttcaattaaaaactgttttaaagcgtgcttatcaaggttggctagtctccaaggagtgaggtaatgtgctgtaccctacagccacaggcatataccagccaatggtcagctgtcactatgaggtactgtcagccaattttaaaatggaaaaatgcatgccatgataatgacttatcttcttatctaaattttaaacagttaagatgcctggcttggaatagtaatgtatgcaatcaatcaataatcccttatttttaaacataaagaaggaggcatacattttcttattaatagaggatcagtttttatccttgccccccaacaagtaaatgttcagcatatatgttaagaacattagtgtaaggggtccccaaatatctgctattccactcactgaacccacccctctctgctaatggctccatcctaaggaggaagagatggrcttccctctctttcccaggaatgctgatcccccagcacaggctagtttgttcttcctagtgcctctcagctggccccttctctctttcctttattactttctcagtctagactctaattgttcagttactgggtcaattgccttcaaggcattttcagcatggagatacgctttttgagcaaaacttccaagcctgtccacaatttgatgcctctatacattgaacacttttcttgactattcctgctattcactttaattgggggaagtttccaccatggttcttacagacagaagatctgggttcattgtttattctataccttcaagccatgtctccccagcttctatcttttccctacatacaggctcaattcccatatctcttttttcttcaaatcctccccatcttaggaccctcttttgctatgaagctttccttggctgtactggccaacattaatccgcttctcctgatggcgaccttgtacatgccaggcaccgtgctagacacttcatacccaaccgcatgcttaatcttgccaacaaatctgggaggagagcttcccctttcacagaagaacaaagtgaagttcaggaaggctaagcagcttgctcaagacctgatagatagtaagtgctgcggctgagccctgatcctggagttactgtgaaattaacccctattccaccaagacgtagtcatccagcttgggcctgacccatgcacggaccagaagggctggaaggagtgtcctgctcacatcctgcttccgtgtccctctcacaccatcctggctaggaatagtttcctccaaaccagaggcatcactgaagctcttcatctttttttctcctctgggaagaggagttcattacctcacttcttactccccgcacattccacctcaggctgactttcctgaaatatatgcacacatcttaagcctcctttactctctttctgcctttgtctagttacatagaaagtcttcctcgggttttgtctgtgtgtgtgtgtttggttttcgtttttttttttttttttttttgagtcactctcactctgtggcccaggctggagtgcagtggtgcaatcatagttcactgcagccttgaactcctgggctcaagtgatcctcccgctactcatcctccccagtatctgggactacaggtgcatgccaccatgcccagctaatatttttttaatttgtagagatgagctctttctgtgttgcccacgctggtttcaaactcctggcctcaagtgattctcccacctcagcctccaaaagtgctaggaatacaggggtgaaccactgtgcctagccttcctatttctttccccctcagtgctcccctccccctctatttgttatcactcttatttggccctgtcctctctcttagtattaactcttatcttcccatttttgtctcttttaacgtttctctttcatttcattgcattgaggagctgaaaaaccctggatggtgtttgagtaagagctgtgctccagggcactgttcaggaggtccagcatcattctgcctgcatttggctcccagttctgccagtttcttaccttaggcaaatggctaaaactctttctgattttcctcatctataaaatgtgcatgagagaagttactgaggctgaaatgatactcctttaatgtttgtctgttgttattgtttgcatttgaatttgaatgttcttggacagggcccatagtctctactctttacctttcctatttccaccactttgcctgaattacgcatttctttctttctttctttcttttttgttttttttgtttttttagatggagtctcgctctgtcacccaggccggagtgcagtggggcgatctcagctcactgcaagctctgcctcccaggttcacgccattctcctgcatcagcctcctgagcaactgggactacaggcacccgccaccatgcctggctaagttttttgtatttttaatagagacgggatttcaccatgttagccaggatggtctcaatctcctgaccttgtgatctgcctgccttggcctcccaaagtgctgggattacaggctacccatttcttttatttgcttggctcctatagatatttgactttgtgacctatacagacgaaagcataggaactcttcagaatgtctctttcaaattgtcatttatttctttattctcctacaaatagaccagtttattttcaagcatcaatagtgatacttacttattttttgttatgtttcatccctagaatttcaataagagttttctgtcttcatttcttatgtaatgaagagggttagatgagtctgacccaatgtcaccaggtggccttcctctttgagctctcaccagaagtgtctactcacccacacagatgcactggtgagcaatgtggagatcgctgaagagcccatggtgctgatgggggagagggtgtacaccttccctctcagtagcagcttgggcccctcctctagcatttccagctgcagagcctcttttgtcagggagcacagggtgttttctttccctctctgccccccacttcctaccccagggcacaccagttatcctggctcctgtcttcatccttccatatccagtttcccaccccaaacttccagcattttctaggagtgtaactgctccccccaccaccccacccaccaaccccaggcagttcatgatcgtttctttttaaatgaacattctggcacatacattgtttttccccatgtcattacttagatttttatagactagcatagtatactaatcagcatttatattaccttttccatgagcaaacatgttttgaattccaagtaaccaacttactttataaacttctaaatgttatgyctaaagttatatggtgctcagtgaggactggaaattgtcaggaatggcttcatggaaagtggggcttgagttagacctagaggggtctgtagaaggaggtcagacagggaaatattccaggtggaagggtgaagatacggaagcagaattgagagaagacagttaaaaccagtatggagaagacagcattttatgattcaataaatagaagccaatcgatcaatttagttcatttcctcttcccttccactttagggttttaagtcaggaatggcaatactgggcacatgtgctacctccagcccactgcacccatggcagatgctactaatcatgacacttgtttttcatgaatttgttaccaaaacaccagaggtttggtttaggtcctactgctccccacacagaatgccaatcaccaagtcagcaagcattgccagggaagaaggctttaatcggtgctgcaaccaaggagatgggagatgaggtttcaaatccagctcctggactgacaaaaattagggtgtttatatagcacagaaggcgggaaaacaggaattagggaattaatcatgatcaatgagggatttgatatctcactgtctggttgtggtgatctattgagtttcagtcccttgtctgagggtcagttcctgaggaaggcactcagttaagacaaatacaagtttcaagtgttaagatggagggccaatttttatgtttattcagtgacccataaatatcatttctatgggaaaactgggtcagtttcaagttcagacagggcctaaaatttttttcataatgtatcataccaagcagttcttttttttttttttttttttcttgtagacagagtctccctctgtagccaggctggagtgcagtggctcaaacatggatcactgcagcttcgaactcctgagctcaagtgatactcccaacatcagcctcctgagtagctgggaccacagatgtacaccaccacacctggctaatttctatttttcatttttattttttgtagagacagggtctccctatgttgcccaggctggtctcaaactcctgagctcaagctatcctccaaagtggttggaccataggtgtgagccataacacagggcccatcccaaacagttctaccagttgatcagagttggcatgcaatgtgaaatccattttctattcatgtcctgagtttagtaaatctggtgatttttatctctaaatggaactgctttatgagtatctttattaagtccaaaatgtaaacagccatttagaacaacattaatataattactcaaatgctttacgatactatcttgccagaacatagatttcatagtgataaaccaaaacccacttaactaatgcttaaatatatttccttttaaaaggtgtcattggtctagttactaatgatattaattgctttatttcctcagatcccaattttgcattgatccattttccagggcttagtattgattttttaaagaataacttgtataatattaagtgagacagccatatcaatcaattatagtcctctcctcaactggacaatttatgccttgtaaatgtgggtctacacataatgttttctacaatgtcagtaggatttcaagtgcctggggttctgttcttgtctttgtggattcctttctctgcctgccttcttccccttctcttcttggcctaattattatctttcaagaactaacacaggaattatctttctgtgagatctttctggaatccccacattcaccatcacaattagtttctctctcctctcggttctgtagtgctttgtttttgcacctttagcagaatggctagttagtcagggatgtgcccatgtccccagctagactgggagctccttgagggcagcacgtgccttgtcaccttcttctcccctccatctaatacgaagtaggtggcagatgcatcctttccaaatgattgacatcaataagacattgaaaaaatattgggctagtagaattttaattttgtttgaacatgttaatgtccatgttggtttacttgagaacacataattggtgtaaaattaggtgacaaatttgtaaatgtggatttagggagtcattcacattgaaagattgaattctactgctgacttctactgactaaactgctggcattctgttctttacagtaaaagtgacattgggtgaaagcattggtatcggtgtctagctgttttgagctgaggctacctttgtttgaatgaagggaatatttggatcatctgactggaaatatgtatgtcatgagacaagtatgctggcacttctgttatgacaacagatgatatcctcttcctgagtgaactgggaaaggcagggagtttggggagacctgcagcatgacctgggtcacattcagaatgcgttctgctgttcagagtttccttgctcttgagtatcaccctttgcctcagtttttcagatggaaaatgggtggaagtcagtggaattattgtgtaataaaaacagctaatgcttatttcctatgcatcaagtaccatgctgaatacatgagttcatttaatcctgacaacagccctgtgaggtgttaccattaggatgcctactttacaggagaggaaatggcaccttggagaggttaagtgatgtgctcaaggccaaatcctagtcaatggaaaagtctgagacccaaattcaagtctttttgaccattggccctgtgtgtgtgtttgtgtgtgtgtgcgtgcgtgtgtgtgtgtgtgtgtgtgttacctccatgctaagctgcttctgcggtagctctrgagagcctcataaaagagctaaataaataaaaggggtacgggatatccttattagagagaagagtgtttagtaggaggttattatctgttttcttgagagaattcctggcttagagtaaagacagatgttataaaaactgtaccctggttgatttgattgacacctcaagatgttttgaatctagttacacttacattactgtcaggtgatttctgagatgttgctttgttgcagtacaagttcagaggacaaaggtcttccagggttggaggggtcagtgtgaatggagcattggaggttgtgccgccttttctgagctgtgcatggttgtcttttttcctaccagtaggtggaaatagaactgaatctttcagcacttgctctttcagctgaatcctggcaggattcctttaatttctgccatgaaggaaaaaaataaaaaacctcaggagaattttggagtgtacagttggaggactgttattctgcagactggaatacttccagtctgatggtcagataatgatttcagcctcctagaaggccagggtgctggaagcagctgctggcagccgtgggtgtcccatgagctctgctggacacccaccttgaggggggcttttcctatcctgaccacacatccttttacaagactcctcccgtcccacccgtttaaacctttgtctttactgtgaagttgtgtatcatgtttattttcagaaactgcatttctgaaattaaaatctaccaagctgaaacagcacataagtggataaagtacaagaggaaagcctcccacccacagttccctcactttctcattgtattaactgttttttgcatacctatccagactttttctataacataaacaattatatatctcatcgaaataaaacaggcattatgtaacaagtgttgttctttgctttgtgcacttatgagtgtatcagggctgcctatgaatgtgattcgctctggtgtttcccagttgggggcagtttggcccccgaggtgacacttggcaatgtctggagacattttcagttgtcaacaactggggtgacgggatgctactggcatctaatgggtagtggccagagatgttgctaaatattctacaaggcacaggacagcacctcacaaagcattatccagcccctaatatttagtactgaggttgagaaaccctttgctaggtaacctcattctttgcaatggtgcactgaattctatagtgtgaatttctcatcctatgttaatgttttcctactggcagtcacttaaggttgtttccaactcatctcacctgtaatcccagacctttgggaggccaaggtgagagaatcgcttaaggctagcagtttgagaccagtccaggcaacatagtgagaccccaagtctgccaaaaaaatataaataaataaattagccgggcatgatggcatgcatctgtagtactagctactccggaggctgaggcgggaggatcacttgagcccaggagtcaaggctacagtgaactatgattgtgccactgcactccagcctgggtgacagagcaagacactgtttcaaaaaaacaaacaaacaaaaaaacagtgttggaataaatattggtttacatctttgtgcactttgagattttgtttctgcgagataaagatacaaaattaaaatatctgaggatagggactttattttaaaagtaaaaagtactcttttacacccagaatccctaatttgctgttccaaaaagcaaaagacctaaaaacaaagtttaaaaattcacagcaaacacaggatttggtggcaaaaccttagttgaacttgtgtgaggctagtctttatttattacatttaatgtgaatatttagacatctgttgcagaaatctttatttgattatgggttactgtctcagtctctgatgatgtagttacataatatggcaccttattgactttttaaaaatatctgaattgaattctaaagctctttcagctttttggcaaacattgccatctgatagatttgtttgcattagaatggcagcctcgggaatttaatattatagtgatgtgcagcatttagtccttaataattcttatatgttgaaatgagcaggttgtggtgacttcagtgattttgttttcagcatctataacccccttttaaaggtgattttagtcctatgaagaaaaattgcatgttttcaggtcgcaattcttgccttgtgcttttccgtacaaattagcccctcagaaaacatgaagcatggtcttgaaaatcactttttgctcattttttttttttgagacagagtctcgctctgtcacctaggctggaatgcagtggtgcgatctcaactcactgcaacctcccctcccaggttcaagcaattctctgcctcagcctcccaagtagctgggatgacaggcacccaccaccatgcccggataatttttgtatttttagcagagacgagtttcaccatcttggccaggctggtcttgaactcctgacctcatgaaccacccaccttggcctcccaaagtgctgggattacaggcgtgagccaccatgtgtggcctgctcattctttaaaagattggcaatagctrcaacattttgcatgcttgctctgtttcatgcttagcaaacattaccaaatctgacctccacaacaatacctctaggaggtagtctttttgtcttagtttatctgcagggaatgggcttctggaagttgaggatgtgtgcaaagtaacatctgggaagaggcagaacccaaatctgcagctgtaggtgctacatccctccacggtgtaattagaattcactttccccaatgtggacagagttttaatatttctattaaactgtaattaaattaattaaattgtaattggtagccgttacaaaatttttgagaaaaaaaatagccccaagttgctttttctctcaaggggctacacttggacttgatggcaaataggaaaatgtcacttgagtcaagtggatattttcatcacaacattaagagaaagcattggagcaaatctgaggtcacgaagctctcccaccaaagaactaagcattatttgaaatgagaaaacattaatgtcctctctggagcctggaattgacatgaaattagggaaaagcattgagttatatttatttcttttggtttaatcccaagatgtcggttttcattatgaaaggggaggggaacatcacacaccagggcctgtcgtggggtggggagcgaggggagggatagcattaggagaaatacctaatgtagatgacgtgttgttgggtgcagcaaaccaccatggcacgtgtatacctatgtaacaaaactgtacgttctgcacatgtatcccagaacttaaagtataatttaaaaaaagaaatttaatttaacataaaaaatttaaaaacatattatcttctattctttatagcagagccagttcaagaaccctcaggaaaaattcttgccctaagccaactggaatttctgacttctgaatttttttatgtgacaggcttagcctggggtagagtccaggaaggatgcttctaggttggttttttagctgttgctgacatgattccctttgctgcctcctagctctcgaggtttctccaaaaagcatatgcaaggaactttcctattccttccttggaggagtttccaatgttccttctccactgtgtcctctgcaactcaatactaccgatttgttttaacatttcaagtttatagctgattttactattgtgatggggaatcccagggtatgaactgtgtgcaggacagttaactactcctgttatttcttggcttgctaggtttttattgttactttcagctgtctttcagccttttacccatcgtccttcacctttgatgagttctctctggtactttggtctttgagaaagacctaagtacactccccttagtccctcatttaaatgcccattctcacagcacccctgaaccttgagatgtctttagattctgcatgaacacctcacaggtccaaactcctctctgcytcaggccctttgtatgtgctagtccctctgtctgggacacactctcctagctaccagcctctttttacctggttgttaacttcagtttatgttctcagggaagccttcytagaccaccacaccccttctcctagctaagatcagctattagttgtgattctttcatgagtcagtctctaccatgagattggacatgctattagcccagggaccaagtaaaatgtttcatttcagtgcaatgactatttgtgcagtgaatgaacaaatgaggcctgtacttctctggattccgagtcagcttctctgcttttagactttattttccagacctacattcttactgaaatatgtgtgtttcctcacatcattcacctgtccttttcactggcccccttcaccagcctttacactgtttccattgtaggcccagcctgcactctcaaaaacagagttatccaggcacttctgtattctgttgtttcttaatatcaacaggttgttttagagatagtttgtttgcttgtgtttatttattatggatatttcaagaatactgggaaagcacaaggagcttatgacaaatagccatgtaccactgcccagacttgcaggtggaaacatttgcagtatttgcttcaaagaaataaaatgttacagaaacagttgaagctcctactctctcctctcccctcagagctaaccactgtgtggacaattgccacatgaattgttggaacacctcaaatgaaagtaaataggaaacttgacattttggctagattatgggaggaaaatgttatctcaatcttgtttttttaaatatttaactgatttctagtaaagttgagcatttttaatgtttattggctacctgggctgcttctatgaattacatgtttatatctttttccattttacctatttgccatttttctatttatttttcttcttggtttgtaaagatctctgtatatttggattattctgttgcctgtaatatgtgttacaaataccaacttctaatccataacttttcatttagttttgtttatattatcatgtgttgtgtagaaattttaaatttctttgtgatctaatgaacatttttcttcatgatttctgctttttatattttaggaaatccttatgctgagattgtgaaggtattctcatcaaaatgttttaaatgttttgtttgttacattttaacctttcattcatttggaatttatttttgtaattaggtagaaatctattttaaccaagctgcagtatgcagttgagtatatttcttcctttgctatctttataccactggcttgtttttcatgtcttattacactgcctagtacctctagtatgatattaaatagacatgtcctcaggcatttgctaaaccttacttaacttgattacactaataatcaataatgtaggtctgtatcagctttatagatgaagtgactgaagcttagagtagttaagtaacctttccagaatcatacagctaggaggtaattaacagagtctggggtcaaaccccagtcccagtaacttcagagtccaactgcctatactgcctcttggtctcagatgacttgggggaaaggtatccctttccaccttgcctgcttgtgcaggcatgaaattttattgaagtgatgccagagaagcacttccagtgtgtctgaagaaaactaatagactttgtttaatttagacctgccaagagtagattaaagaaccttataagtatgaaacagttcttattccagataatataagcattcactcaggtaatataatcacatctcagtggaacttcagctatagggagtagatcttcatagtaaattaacattctgaggaattaacaagtaactgcaatgccttccttcccagcctctctccatgaaaaagctgaggcaccttacaaagatcgacctaaaacaaggtgaaataagaagatgagaaaattaggacaaagagaaataatatggtaaaacagaaaataattattgccttagtgtcattggctagagtttggccaccacataatcctaagcttcctagcaactgaagcaaagaaaacctatccagctctacaattcacagtgggcacgagatgaaaatagaatggttgctagggggatactcagcttttcctgctcccgggactggagagaagcttgtgctttggtccccagggaggggccctgtgcaatcacagggacagcgcttacagcatcttctcagtggtgggagtgcacctcatgtgactacattcccctctactttacctcaagctccttgaggggtgtgttcttcatcatatatcagagcccagcacagtgcctgagacatagtaggtgctcataatgtatttttraatgaatgaatgttatttgtaatttctgtcaatgaaagccaatgggtggatacaagatcaatacacaaaaattaataattttttccatacattagcaatgaaccatctggaaataaaatttctaaaagttccacttataatatcatccaagcaataaaataattaggagtaaatttatcaaaaaagatgcaagacttatccactgaaaactacaggacattgtagaaaaaccaatggcaaacatttgaacaaattcattaaaagcaattctatgtgaagcaaaaatacagagatttttaggtatatggctttctgatgatctgacttgatcaaaaggtgtaatttaaaattttaagaggaatatttaaggtgaacatagttttggcaattctctatgattatttctttttgcaaccaagctcctgataagaaggaatcacagagaattggagtttgcattctctgtttgcattgcatcagattcttggtcaagaatctgaatgttgccaataaagggtgctgttaggaattaaggtgagcccataacatatgttccgtaattgctttgtgaattggaaaggtgtgtattggataaaataacatcagggtgtatgtgaaaaatacactgcctcaaatgtttagcagtacctaattaaagacccttaagattactgattccaataattaatctgtattctgatgtataaaggtgtcggtcgttttcatcagcccatttttttggggcccacaacatatgcttaacagttccctaaacaactctataaaggaggcactgttaccatctccttttacagaagaggaaactgagggctagggaagataagccatttgcccagggttccacactagcatgtgatagaccagaacctgcacccagacatccatttgccctgctgtgcagcccctctcatttctggcctaaagatagccaacagcagtttcctctgatttgctagaagtatttttcctgttaggtatagtgtgtgcttggactttggaggcttcattttgatgttgtgctcagtatgccacaattaaagaattatcctaattttaagatcatctttccagagagtccctcagaacttcaggataaccaagtacagtctgaatgacatttgccaagtgttggcctcggaaaatttattgcttcaacaggggcctgttgccagtaatgattggccgacttttttcttgcctagcaaagactttcattctgtaaaggtaactgagagtttgtagttaagatcttggactccagactcagtggacacggttcaagtcctggcttaataatagaaccttccacatagtattattgggaggattaaaggaggctatcacatagggcacttagcaccatggggtgcttagaaagcttttaagaatggtagctgctaaaacatacaatcctttaaagttggactttggagtaaggagtgcgcttcgacaaccagcagtagctgccagcagtttagactgagaatggctctgtgcagccaagcctcctaaagccacctggaagctctccagtctggactttgaaaatttaaatatttttcaaatttatttttgaccaagtttaaagaaaagggattcccacagtgtgaaaggggctgccatagctttgccgtttcccctaaggaagggcctgagggaagcttctttttgttggtggaagaaatgaggggagagggcaagagtttggggtagggaagaactggactggaagctgagtctggtcctctttagtctgcctcttcaggcccccatccccggccacctattcctcttctgtaaaaccagggcgctggactaagaggcccttcctgtgccgacattctgtgaaaccataaacgcttgtcttgagctacagtttaatgtgagccctcagggcccttgtaagtctgggccattggaaagatgtctccgcatctttcatgtgagtcaagaggtggctttgtcttttatcttgtctggtgtccatacatcccagctttaaattcctcttaaaatttggagccagggaaaaatttctcttgctgcttaaatcttcacactgtttctgattggacaatgccaatgatacacctcagggtatttctgttattgtttcatttgccaagaatctcagagctaaatgcagtgaccagcaattgcggcttccttcaaacaagtcaggtctcaaaatctatcttaaaactgtatgttgctgtttaattttatgtactttaatggagaagccacatcaaatccatttgtggcattaaacaggaaaaatcacccatgcagaatgacatagtaaataaatgcagaaatgaatgaatacccctcctcactgtcagctggctccttctctgcccctagtgagtatgaaattacaacaacaataacaaataaaatgtataaaggacctactctggaccagtcactgttctaagtagtttatgtatattttctcattcaacaatcttgtgtttgggggtactattattgtatttatttaaamatgaggacaggcaggatttggggggacattagaccctgcaaaattctttggctttgggggtcctagtggtagagaggctttgccccatctggtactggcttgtttatgtggctaattagtaagctaaccaaagtcaaacaaccaagaaaaagacaaggaggaggaggggagaattgatgaccacagaaggcaggaaaaccctctctggcttctgactatcctgagatctactctgaactccggtactgacttgaggaatctgtggcgtctcagaggcagtccatattttggaatgtgtttgggggtagagctgtgcttggaggagtcatcccgagttcctgcagacaggactgttaggaggccagctgggctgcagggtgttccacatgtccattgaggcaccctgcctacacctgatgagtttgtagaaacattccccagcggttgcctgacttccagggctggcactaaagggggaactagtcagcccatctgaccatgagtcctaaatagttcccatggaatattcagtgctctgcacttacttctcttagcactgaatgccagaacggccactagcaggggcaggatgggaaactgtagtagccygtcacgagcaggctgatcatccagggcctggcctggaagacagactgggtaagtatagtcttcatttggccattgtgctcaactggcaatgtgcccacagtcaatatgcagatgtctagatgtggccaaataataatacaattttaaaaaacaaataatcgagaatttgcatgttcaaaatatctctcagtcaacaaatatttgttgagccatcccctgtgcccagtacaatgccagatcctgggggcatggcagcaagcaagctcgttggggacctgctgattgggagctcacagtgagcaggcaggcatgtgattattctgcaggcagtgacttctggtgtggttaagtgctgtgctggggaagctttgtcttttggaatctctttgggtagctctttaatctggagatggtatcattgctcaaaacatttttggagctgccctttaggaattgcctttagaactgatttgggtcacacagtaaaatctatctcacttttattttacggccacacccagcttgtgaccaaaaatggtattgcccagcttgacgacccattttattttctagtcttggctctgatttgcttgtaagccaaaattacatccaccctttaaagatggatatttatgaccactgagcatattagcagtaatttggataattttgaagcaatttctcacttgcctaagctcccattgtcctttatatctctgttgtaacactgtccaatctctcttgcagctgaattacctccttctgcctgtgttttccccactagggtgggggtcttggaggataggcccatatgtctacactctctgcagtgcccagcacggagcacatgttcaaaatgtgtatttattataattgaatgtatgggttgaattgaaaggaatccaagaggtgtctcaggattgctctgagtaacaggagcactgttggaatgatgggcagcccagtgggctctggaatctcacaggtctgcctccagtccctatttgtccccttgaccagctgtgtggccctatgcaaatcattcattccctcagatccttcatttcctcatctgtggaatagagataataatacttgccttactggggctattataaggacaagtggaatattcacatagtgccctaagcacagtgcctaaatggaggtgattagtattcttgtaatattggagcgaattcttgtttggatgcataaattctgattaaaaaaaaataactcacccagaagtcacattatttaaaatcatttgctggccaaacacagtggctcatgcctgtaatcccagccctttgggaggccaaggcatgaggattacttgagcccaggagttcgagaccagcctgggaaacatagtgagaccctgttgctataaagttttttaaaaaattagccaggtgtggtggcttgcacctgtggtcctagctactcaggaggctgaggtgggaaaatcacttgagcctgggagatcgaggctgcagtgagctgtgatcacgccactgcactccagcttggatgacagagcgagaccctgtctcaaaaaaaaaaaaaaaaaaaaagaaaaatcatttatcatagaaaatgtattctgcaaggaaccctagagcccatctaagtccaacctcctaattttctttttcttttgtagagagagggtcttgctctgacatccaggctggagtgcagtggtgtgatcacagctgtaacctcaaactcctgrgctcaagttatcctcctacctcagcctgtcaagtagcggagactacaggcgcacaccaccatgcccagctaattttaatgtttgtagaggtggtgggggaggggtcttaccatgttgcccaggaaggccttgaactcctgacctcaagccatcctcccacttcgtcctcccaaagtgttgggattacaggcatgagccaccatgcctgtccccaacctcctaatattaatgagattcaaaaagggaagtggactgactaaagtcattggttcatgacagaactgggccaggccagagctcttttcatgtgacgtttgatacttacccctacatttggaggtgccaccttccttgcaagggccttgcatttaggccaggagctcggatactggcacttctggacaatggtagccaagaatttaggatatgcacttggggagccacagcacatgctttgcacacccttttgcagcaacactttgtccctctgcagggtgttgagcatgctgctgtggttgtgtagctcacaaagctggcataagcaatacaaactggtggttaggaagcatgctgacaaacctggtaccattacctaatagcttaccactacttgatctctctgagcttcaccttcttcacctgtagcataggaacaataatggaatccaccctatagggttgttgtgaaggttaaatgagataatgcatgaaagtgcttacacattgcctggcacaggataaacacttcttaaaatttactattatgatcagtaatacatccaaaccaaatattctgcctctggcatctccactagtctcaagctaacctctaatctgcaatgaagccttaccaggtctctcttccaagcaggtgctgttgacagacttttacccctcccttcacaaacatgacctctcacatctcctgtttcaccccaaccatggaccacaagatcctaaagtaatcaatagcagttgcccatcaataatagggctaggaactcctgggttttcttgttcatcatcagttataggaagaaaaattggccactggcttaaacaaatactgtctttcttaggagttgtctttactttgaaggcacttagacccttgggaggctctgctattctgcagcatggcaggtgcccacatacctggatggctgccttctattattattcccttgatactgggttctttgcacatgtatacactttgggttctatttgctacccttttttttaaacttgactaaaacagtgagtaattgggaagttctgaatttctatttggaaaacaaattgatgagatcagaaaaatccaagtaatcctaaatttacagaagccagattactaaaacgcaaggacatttttttgtaatgtagaaaagttatgtttcacagaggtttttgcaatgccctgactctggatcgcagccctccctcgattctgggtattacatcatttcatttcagctaatgtaaacactcatcaccctgcacgttgcaggatttttcactgtgatttgagattgggcttcattcagtgggtcgtggtgattaatggtttcagaaggaagtgcagcaggaagagactttgcaggaatggaagaggtgaggcagctccacgtgagattctgcaaagggattaagatttggcaccaggcttggtttctgtgcagcctcttaggcagagagccccaggagagggaagcaggctgtcagctgtggctttgcacgctctcagctgtcttgaaggttggttggctcttcccgctctctgaggtacccaattttaccttgttaaaggatggatgtggatgctggaggcttaaagaagaccaggtaagggttcttgttgtctaagaaatcccccagtgttcttaatgcatggaatcctggggactgtttctttactagcaccattgtgcagtgttagccaaaatacaattcctctgagacattttacaaagaagatcagagaagtttctttccttgttaagaaagtttctaaaatgttttaacctaaaatgtttaactatagagatacaaattatttttcttgctgtgcaattcagctttgagattttttttgcatgttaatctacaagatctcgataggtatcctgagagtttattagatgtttgttttcattccttttgcaatggcctatggtatattatgtatcaacatttaatgtgatgaaaacgtctcacttatattcttcaggatactcgcttttgaataaattgctcttctttttgcagatttggtttgttgctttcttttttaccttttggcttttgtgattataatactagtaaggaatatcctgaagtagttatagttttttttctaagaggaaaaaactatactcaggagttaaatgcaaacatttgatagcatccctgattaaaatgagctacatgttttttggtgtttcaaatatgctttttaaaaaattttcagtgtaaatgtccatagttttgggaaaggtaatgcagtttatctgagtggtcatttacttataaacattaaaaggatattagacctttgataagattagctgaagaagaggtcattgaaaggagtagttttctgctcaccaccaactcatttccaaattctgttgcttttcttaaaaaaaaaaaggagttaaaaataacccagaataaaacttgaaaactgttttgtttctctgtatttggctaacttcatcccaaagtactgtgtttaaggaattcaagctatgaagactactcttgaaatggctcacataattctatctgcgaatttccataatccttttcaagagcatatgatgttttatgagtgttagggttaaaaatttcaattaagtgttcattccttctacaaccctgagagatggataacaaccctcagaaaaataacatgagaaattgtgtccgtgtcctgacgcaggctcatttttcctgtccaaagttgtgtggaaagggggcatttggcatctctccttccttatggaaggtgcggggtgtcttggtagaagtgaatgtctgtggtctttgtggtagatggatagatgcagggactcctgatcactttaatttattggaaatcaaatgttttcattagatgtaggggactgtgactctccagctttggttgagtgggacgaggtctatgcactcagtggttcttyttgtttttgttcggtgagccctttcagcctatgtcgtcctgtttttctttttggaaacagactggcagcagtctcttgcgttttgtgttactttaatctagcattttaaccattgtattttcttttagtgggatggctaatagtaaggttggcttgagcctcaatttgagaaggtgtgagaatagctgtaatctttaggaaaagaaaatcattccaagagttaaaacatgcagactcttaattgtgctgtgtccattctattttagaggaatctagacaagctattgttacaaatgcttttcctcaaatgttttcagaagaccaaaaaatatatatataattttttgtcagtgtattacattatcctcattctgtcttttttctccttatctgtcattttggagagagggaaaattgttcaggtaaacaattgaggaacaattgccagaaacatctgggaacagtcgccatggattatcttttccttcttaatgtgatcttgatgaaggttttacttgtttggtctttttatttctattaaaatggtaagacatgtgcatggttgaaaaaaattcaaacagtacaaaaagggtaaacaatgaaaagcctcctccatggcatcttaacactcagttcttccctcagcagtaaacaatgctttagatctgtgcttttcaaactttcgtatgcctaagcaacacctgcagagttggttacaacacagcttctgaggctctttggggtgtgaggagtagattgagaggggagagaaagataactatagttcattatataactatagtctacagtacctaagagacaggtggaatttgaggattctagtgacagcaggagacaggggtataaagaaaaaaagactgttgagtttcttaggaattgaaaatgctcttgagatagttggcaatgaagagtaagaagccagggtcatgaaacagagtattagagtagtgaagaaatccaaggagcttcagcataaaaatgccatcaggagaggcccagtgggtggaaatagggaaatagtcaatagttaatggaaaatatagcaatagaagggggttatgggccacctgacaaggataatgagattgagctggaaactggaataggactggccaagctaaaaaaaaatcaggccaattagcaataatgagagtgtttattcacttgtagattggcaaaatacctccctggaatgaactaggacaaatgatcatttcctgtgctaatgattttatagcagaaaagaaaaagaaataccatagaaggtacagggaggtgtctgtgtgtgagccactgtaatttaataaccctaagaaatgtaagattaacggtctgatgcaaggaacggaaaaccaagataatgtatacctgacgagaattttaaaagcatgaatagtaattatgaaaaatagtcaataaacctcaagaatcttgtcaatgaattttttttaaaaaaggttaactgccaaacaccttttcagaaacacaaaatatgacargattcaaaaaatcattttgagaggcacgggtgagaagaactaggtttttttccctaccccaccttctttgtccaataaagtaagaagaaacaaccgacgctaaacactttctttgtggcaggtattgtgtgaaatcctttatgttccttaatttattttgcccttatagctctggaggttgggatcataattattatttacagatacagtgcaaagagaattgctcaaggaagagcatattccttcataaggaagggacatctttgaaaaaataggaagttcagttggaaaaccagagaaacccacctagaaagcccagtaaaaaagttcacataatttaaggagcattctataagaaactgacattaaagcaaaaataagagagacttttataggaatcgaagtgaaggagcaaggcaaagataaggaagagacttcaataaggaagagacatctttgaaaaaaataggaagttcagttggaaaaccagagaaacccacctagaaagcccagtaaaaaggttcacacataatttaaggagcattctataagaaactgacattaaagcaaaaataagagagacttttataggaatcaaagtgaaggaaccaggcaaagatccagcagaacctttgcagatgctcagaatactccttgggcgatagaaaagggagccagcagacacaataaattatttgccttggtcttttcagaaaaatatatcaaaatcatctttagaagcagaggtactagatcaaaaagtagtaaatgaacagaatgttctagactgagttgacaaactggatatggataaatcacagggacaggttggccttcatccaagagttctaaaggaattcaagggtgaaatcatggagctgttgttaaaagcaactcatttttacttttgaaagtctagcagccccctaaaccttggttgcctggtaaaattgcccagctccatctccctgcagtacattatttaaacataaattataatctgtatgtaaaatgtaaaatataataaatcaaataatgttttcaataactgtgattttgaattcccaaaccatgtcatgtcactgttttgaaagtctttgtgaacgtttcattcttgaaattgctgagaattaccagccccttacaatcatgtaaaataagcttatcataattcatgtgaactcagtagcaaaagcacaaagaaacaaataggcagtgactcagttgcaagaaagtattcatcatacaatgttacttcactaaagggggaaaasaatcctgcagcctcagaaacagacagtcagtgtccattaattaaataaatgccatgtgaaggatttgaaaactaatcagcttttgagttcctagctgcacagtcccactgcccaatttgcctggtggtctggccctgctcccatttatctcaggccttcttccatttcttatggtcttgactctgcctaggtctgcagcccaggtgctctgttctctgctttactgcaggtggccctagttttctatcactcatgacctgcactctgtgtcgcagagtagaatagtgatggtggtctgggaagacaggatttgtgctgggtaagacagagagccaagtacagggtttgtcagggtcaaaagctagcagtaaaccagagatgtggagtggagatgaaggtcattcagtcatttaatcggtatttctttttttttttttttttttttttttgagacggagtctcgctctgtcgcccaggctggagtgcagtggcgggatctcggctcactgcaagctccgcctcccgggttcacgccattctcctgcctcagcctcccaagtagctgggactacaggcgcccgccactacgcccggctaattttttgtatttttagtagagacggggtttcaccgttttagccgggatggtctcgatctcctgacctcgtgatccgcccgcctcggcctcccaaagtgctgggattacaggcgtgagccaccgcgcccggcctcggtatttcttttgagctcctagaatgtaccaggcattgtacgaggtatacaaatatgaacaagacagccaccgtgttagagagaaacagtaaacaattacagtagagcagagttcctcaacctagacactaggttgacatccaattatttcctagaggcaaaattgcctctgtttgagaaccactgtgggagagtatgacaggtgcatgaatggagaaagaataggccattatgggagttcatagcagggcttcctaatgcagacctggaggtgaaggaagactgcctagaggaagtcatatcctgcaagacatctgcagggtgagtagccctcacatgaaagttggaagaggacagtcaaggaagggaatgattagacatggagaccagagggaggaaaccctgggtcagtcatgggtaactactcttaccagtggtggacgctccttttggtgccagccttatcaatcccaagtgccagagtttcacacccggcatctgacagcatgctttcagaggctgtgctcatgcacgtagctgccactagatgaggagtgatgctggtttagagatccttaggcttagtggtctcgggtgcaaaaggggaggaaatcgatatctaattccatagaagtagaattctcactaaattaactgcccctttcaactccaatgcctatttttgattagctaaatctaagttcatttgaccaagattaaaaacttattagcaaaaaaacttcttttcttacatggctactccacaaactgtttccaactgctggtaactgcagaccattttggcaactgtttagcaaagaatacattgtaatcatccttaaaatacctcccttttccctctattttctttatagctggctcctttctagagagagactggtctgtatttctgccagcaaagacccgttggccacatactgggtcagcctcgggactcatgcaatgacaggcacattcaagaaagatgcactttgtgtcttcacatcgtaggatcccctctgcagcatgccttttcctattggctccttgatccccttgtccctcaggggcctttcaatttctttctttctttctttctttctttcaattgttttgctttggtttcggttttgagacaggatctctctctgtcacccaggctggagtgcagtggcacaatcttggctcactgtaacctccacctcccaggttcaagcgatcctctcacctcagcctcctgagtagcagggactacaggcatgcaccactgcacctggctaatttttgtaatttttgtagaaatgaggtttcattatgtttcccaggctggaaatttcttaataacaatgattgacattcagcacttgctgtgtgtcaccagccacagggccgcatgggagaggagagagaggcactaaaaggtaggggaaaagaaaattaaagcctagcaccatactagccacttcaagtaagctatttcccttaatactcccagaaaacccttaatgggtggtgtcttcctcactttacagatgaggaccaggcctgattttatacagctattaaggggtacaggtgggatttgagccctttgtcagaccctgaagcccatgttccttctacttctgtgtttggaggaactatccaggccagtgggcctttttgtggcccagctcccaggccattaggacaatatcatcaggggtcttcaggctacaaggcagatctggagttgagggaggctgtcatcttcagctgttattgggggcttcttgtgatctacatacatccttatttgggccgtgacttcattgcccattcccagattgctgagatggcttcaaaagcaaggaccccagttctccttaccctcacagctgtcccactgcctgttcctagggcagtatggaatgatgttaaagattccagaaccaggatttagaaaatatggagactaggtacctctaccttccacttgctaacacactcaagacgaagcaacaaataaatctgttgcttatctaacagattgttttgcaaaatgataaaccagctgtattagtccattctcaccctgctaataaagacatactgaagactgggtaatttataaaggaaagagatttaattgactcacggttctgaagggctggggaggcctcatgaaacttaatcatagcagaagaggaagcaaacatgtccttcacctggtcgcagcaaggagaagtaccaagaaaaagggggaaaagccctttataaaaccatcagatctcgtgagaaatcactcactatcatgagaacagcatgaaggtgactgcccccgtgattcaattacctcccaccaggtccctcccaagacatgtggggattatagaaattaaatccccagatttgagtggggacacaaccaaaccatatcaccaaccataaaccctacctgattgtctcaactgattgccctgggcacraaatcacatgatggttatgaagacaggctgaaaagatgcacaacttaccatcgtaaagagatactgtgtcaacaataaaggggaaaaattccttattgaatttgcttataggagagacatgtttgctgagcagagggatgaaggtgactccataagaaggtgagttctagagagaaacattcatatcagcgagtctgacttcctcatgaggctagcaattggaattgtaataaagggaaactttctatacttaggtaataatgacattttgggcacaaggtattgtggcttctatgaaagaaagtaccaagaagtttataactgaaaggatcacactgattacccaactacccctctcctttaactgatgatgaaactgaggaccagagacatggatgggtagaccaagttcatgtgtagtcagagctaaagctaaggctacttgacctataaatagaggtttgtttacactgtgtgtatgggagaagggaaaccctagaatatcttttatttagattttacttgaaaattatctttgtagggagattatgtctccctccagaggctcttaaagatttggtcatcatgcactggaggtatgctgtgttgaaaagattaggacctgtgctgaagaaagcaccacacaggcacacatcaagggggaaaaaatgatttttttcacagaatttattcattaataaatctattcctttatccaaccaatatttactgtgcacccacaacagtgtgccaagcatgatgctaagtgccaggatgtagagtagacagacaagcctccttccctttgagcttccagtctagctgtgaccagacttattctgaaatgattaaggaaggtatccagtgagctatgaaaggtagtaaggcggagcttaaccatgagaactcctgagaggcctatttgagacagggatgtaacaaatgggtttcaaaatgggtgattccaagtaaaagcattaagcttggtggtctagtattttggaaagttcagctatttgcacagaaaggaaaaatgtcaaaataagggaacccagcaggagcctgctgccatcgtccaagtatgtggtgctgagcctttagccagagctggggcagtcagaatggagaggaaatgtgtcatctgagtcatgctccaaagtagcattggctgcctggcctaggggttgaaggagaggaaagagacaaaggtggtgctgaggtttctgacctacagcagtggacaggcgacagagatgagattatggagacagtgtggatatttggggaaagtgacaaggtcagtctgaagtagcctgatttggaagggactggagaatggtccaggtgagctgtcctcacaacagctgcttagccctcacttggataagtacatttaggacccttaggaagagaatgacttttcatgtcgtcaaggagactgaactctcgtggaagacaagtagttgcagaacaaaatggaagattgctggggattcaccattccttccttttttaacaaaaacttactgtgtaaaattttaaacaaacacagaaatacagagaatagtataatgaccccctctttacccatcacctagcttcaacatttataaacattgccaatattgttttatcaatctcccctcaggagtatttcccctctaccttgctggagtatttaaatcctagattttatatcacttcatgcataaatacttcttagtatatttttaataaatagagacttcataaaaaagagaactgcaatattatcatacctaaataaatatttccgaattatgatttaatgacaagcctatattcagacttccctgattgtctttaaaatggcttttaatatttggtttttggaacaggaatcagatgaggtccaaatattacatttgactgatatgtcttgtgaatcttttcatctctaatagattatctctttttattctctctttatatacactctttacttactgaagaatctgtggctatggacctgtacgacattcagctttctttggaacaccttgagttactgtttgaggcttacttcttacgaatacaacaggcataaaattgttaggtaattctgcaatgacctatcttgtattccttctgttttaggattctcagtcctccatagctgatactcctcgtggttctagggagctgagtgccaggctgtgcaagggcagcaaggattttctttactagaggtatattgagagcacagcacgtgtgaggctgtgccaggccatctgggaaatgcaggcaaagtggaagtgcctttgcttggctccaaggagcttatcacgaatttggaagaaagaagattgcatgaaactaacagattaacataggcagctcagtgttgggaagtcaagtaaagctacacttggctcaaaccccaaccttgactcttaacagctgggtgttggtgaacaagtcactttatatttctgaacctaattcctcttctttaaaatagcgaggaaaaactctgcctacttcaggattatatgaaaagcaggcatcatgggccctggagttagactttaaaccctgcttccttctgatattaagtgcctgcagtcaatgggcactttactccatgccagtcctgtgctcagtacttcatacacattacctcattttaggcctctcagcaaccctgttttacagatcacaaaactgaggcttagagaagcagtttgcatacatttacctacttagtgaattaggatttaaacccagacaaagtcaaagctcaaactttaaactgccaagatatattatttctctcgaacacatatgtcaaggttcagtattcttgtttataaggagggagctatcatatcaactttatggaattatcatggaaattaagacaaaacctactcaacagataacaaatgctcaaaagtatttgttttcatggttgttattatatcaatggttgaacaagtctgtaaaacatgaaattgtacagaaccatctataaacataataggaatgtggaaaatggagacattaacttgcattgaggcccttatggtgagagagggggcagggaggatccagtgggtctttggttatcacaggagataaaagcacattctaggatgggggagcagctcaggcagggagactagatgaatggggtgttaaataccctctttaaacttcctatttgtccagttaatgccagtgagggtttaatggtcagggagaacacacatgtgcacccctgatgccattaagaagactgtgtgggaaattacaaaaagaggttgtgatgaagagcctggtgctctgggtgggtctcagcacaacctctgtctggttctgtggtctcagcaagttactaaacttctttgcatctcactttctttccaggtaaaacagagatcataaaggactttatgatataggctatccagggatgtttgrggaattagatgaaatactttagggaaagatagtgccagaaagacccagggcagaaaccaagagaagccaagaactgaagtccttccattctcacctctatgtcaccttccctgcttctattggggttgcagtcttcaccaccccctcaccctccctaaatcaggggtaccacagagttaggctgctaaagtgacatagtgaaaatgttctcaagggttccctcctttctgcagaaacaggaccctgggtaatacatgtgagaatcaagaggagagaggttggatgtgctcatctaggctggttacttgcttttgctccccaaattttcttgcgtaagaagtttattcccaatttcttgaaaaatttagaggagggatatttggtgtaaaacaatgaaatcattggtctttgggatgttgactgagtctcttctggggaaagagaaagcagggaaggtgatgcagaggtgggaatggaagaacttcagttcttgtcttctcttggttcttccccgggtcctcctgcagataagagagattttcaagtcactaacactttggtgtgagttaattgtgtctgctcttcctcatactgtatgcagaccactatggaagatggatgcaacaggaatggcctgttggaagactggtgagcaataccagctccggagggcatacaagtttctgcaggggccacaggggagggttccctgtctggaattggaggctcagatggggcttcctccaggaagcatttagagatggagtgtgacttagctgtagttaccacaaagagggaacagcatttacagaagcctagaagtgagagagaggagtgagtccatgatggatttgggacccctgtggggagctatttctgcagatccacaggcccctcagagctctccacagaggaaatatggtcattgtttgtcagaagccctgccgaggcagcgtgaggcttatgaggaaatggggcatgagacagcaaggcgctagaagggtacttcctagcctcacctgcgcacctcacccctgtgtgcacagcacatggctcacccctcggggcttcggtgttctcatgaatgaaatgaggacttaatgaagtcctttcagttcctcagctctttggctctctgaaaatatttttaaagctgaggaaaaaaaaataaagtaatactgaaaacagatttcagtccttattaggttgcaaaatggaaacagagacagaacctggtattgagaaataattcaaagaagcatttaagaagagacatctttgatattgagtagataaagaatttatggcaattctagtctacactgggcttgagttaccaacaaacaagaaatgaatcaaaggagagacgtgaggaagaggagaaaacccccctgagaagcaagtgggcatttgaaaacaagtgacacaggtgacctcctgtccatggggtgagctactcggtaaatacagggccagtggctggcacaggaagatgtgccggagtgatggtggcagcaggagtgagtcagagagcctgagctctttggaggggctggcttgcctttggaggcagaggttgtgggcacgggaaggatgttgccccctgctctgtgtggaggcgctgaaggggtctggcccggaaggccatttgtagagctgagtgaatgccacctgggctgggcagaactggcatctcttgtgcggtggtgggcatgtgataggagacatgtacccaggacatgtacccagagttgcctggggaccacaggggctatgggtcagaaccactcggatgagtggggctgcagatgggcaggtctctgctcagcctattgagaagtgagattctgacagggaatctgagaaaggggggcaaatgggttttttctccttggcattataacatgagccagatgcattgaatcaggcatcagcattgtcacatcagtagcaacaataagcatctgttctatgccaagcattaggctatgcccattatctacattattcacagacctcacaacaacctgtctagggggcattgtttttaatccccattttgccccatattccagtgagcttcagaaacattgagccttcaaactagtgaattgcagagatgaggaaccacacccaagtgtaccaatttctctttcacgagagagacatagtctaagttgtgttttccaatcccaagcagttgcaccaatgctgtgctcatggtaatgtaaaacataagcaacattgagtattattgtttttcagtttttactttaataaatattaaaatgatacctttgtccccttttgcattttgttgataactagtgaaggtgaacaatgtgtctgccatctgcctcctgggtggattgtcttcttggctttgcccattgctaggcaactcatgtcacacgtgaagacaatacattccagtgtgtttgagtgacctgaccaaggtcacacagctggttatcagagaggcctaggccagaactcatgccagcgcctctcccatggctatcctgtctgcatcctccacaccccagccctgggctgcactcccatctcctcatcctggtgccacgacgggtcttatgagaagcccacccattcccaggggctatccagcaggaagacagaatgggacaggcggctctttgaccaaagcatcccaatgtgaaatccgtctacaaaaagccctggaatctcttctgatgaataataggtaaccactcaggcatagtttaaaatagtttggtttgttttgaaattttttaaaaatacaaagaagaaaaacagtggaggaggcagatggcatgttttaaaagagttcttgctggagattttaaaagccaatataaaaactaactaataaactgcccatcacaatctaaagatagatataccaaaaatttcactggggcacctggggacaagaacagctgttactatgaatctactgtttattaggcgctgactgtcaggtgtcatgctgagtttctgagtcttccacttattcctcacaaccacctgataagacagatactgttactgtcattatcaccattttacagataggcaaactgaggcttatttttacaagataaatggcaaagctagggcttgaaccttgggcctgactccagtgtttgtgctgttaattactgatgctaccagacaccctgagaaagcatctaagccaggggagtggcagcagccctctggccttcaagagagcaatcattgtaaaaacagattatcccagccactttgaataatagttcttgatccagaaaaaaagcacgcaaaagaccatttgtcaagatccttctcttcttttagattaacatcagtgctatgtttcagtttcagtaattgaggctcaagaaatttgctgtacaaaccaccatggcacgtgtgtacctatgtaagaaaactgcatgttctgcacatgtaccccagaacttaaagtataataaaaaaaaggaagaaagaaatttgctgtaggcaattctaagtgttgagctaaaatgaagcaaactcaagcatcttgcctccttctatccttacccacacggtgtgtgtgcatgcacatgcacacacagtgcaactcacacaccaaaacagctaagaataaaatgggttcgaataactcaagcaaagtcatttgaaattacagacttcaaggctagtaggcaccaggccaggacattctcatttcgggtctaccaacaaactatctcctttttaaagagaaatgtcattttgatttcagccatccttgcaggaggtttttcagtgtaaattcctcttagccttcctaagtaaaaatgaagaacagctgatccttgtcttgtccaatgtatgattttccctggaacttttatgagctgagtaggatgagcaagagaggaagtgttctttaagagagtcaatgtgcggccacyctcagctgcgtggtgttgcctatagcaactaagatttattttataaacacatatatggtccttactgtacagcaggcactgctcaaaacagtgtacaaatagtaacgtcctcttcacaaccctatgaaggggaaagtgaggcagaaaggagctaattaactggcccaaaatcacatcgctagagtggcaggtgggggatcagggctcaggtagcttgccttcggtgtgcattactcgtggttagtagtgttgccaatttcttctgacatagagttgattatcttcatgctgtttttctcacacagagattaagcctgaagttcatgtatcccatgaccctggggagaaaaagaaacctaactacaataagcaatgggaaatgagtcagagcctgtttattttgatgattgattttgtgagagtgatttgttgaatgaatgaaccaaatgaatgatggccttttgcggcttctgtttgccactttgatattccaggatttatttcttttgatcttctaagccatctaattgaaatacccacaaattcagatattacgatttatatttggccttcagtcccccatctgcatctggcacggtggactcaagtacagttcacctcttgtgcatttgacctctcactctaaaaataagggccagatgaatgttcatattccttatagaacagatgatggttttactagacgagtgtggtttatactttagaacagcagctgcacatatggaatgaaattatctgagtaacctattttcaaaccttgacacatacatttggcttaaaattcaacatgcgctttctcaaaaaggaagcaaatgtaaacagtcttctcatatattatcctgcacatctgaatcctatgttttatttattcgtttctcttttgagtctggaatataatcagttggaaatgaggaaggaagccccattcattcgcctctttgtgatgccatgaaartgatagcatgtttgagctgatggagggccttggaaataatcagaggagaccctttcattttatagaaggattctgaggcccagagaagtgcagtttgcctgggttcctccaatcaaaggtggkgaacatgggcttaaaaccaggttgcctgactctaggccaactgagttggacagtgttgaggtaaactctgaaaagctggtgttcctgcccaccacagctccccacctgacccctccagtctcagtcaacacccagacaccagggatcacctgtcagttatctcagaccagagatatctcttcaggcttcaggcctgtactcgctttgtgtattaggcacttatcaccactcacccaaacaatacattgactgatagcgcctccccatcgtcctgatcatctcccctaaacacacacacacacacaaaacacttttaaggcacagacccattgttctcaaaaagtagtgttgattaccttaatccttttctaaaatgctgccattgtccacttcactcactcccactcatgtatcccaatcatttagaatgatgttggcacactgaaagcactcaataaatatgtgttgaatgaatgaaaggctcctcatttcctactaaagaaattaatctccatttcttagcttggtagtcaaggccctttatcatctggcattaatcttttcccattttgctcgcttcctcccttctgtcctctgctaattaaacaaccaaatagctcttttttaaggtaaaaatttattgtttaccaataaatactcaacttattgagtgtttatgccaagccttttttcacctttttatgagtgttaactcgtttaattcacacaacaaacctataaggttggtactatcattattaccattttacaaataaggcaattgagccacaagttaagttacctctctatgatcacacttttaagatgaggcagagctgggattcaaactcaggaagtgtggcttcacatcccatgcatgtagccactatggcatggctagctttcctattggtttatttttagttataaacttcaacagtctggaagtacataaaaagtaacaatttttcacccacttcaaaaagaatttagataatatgtattcttccagatgcttttcttatgttaactagtatatttacataattttaaaaccaaaattatacatactacaacatgccttttaaatttactatatttttgagatatttccataaatattcctacacatatctcttacatatatcacagccacattatttttcattgttgcctagtatactcttgtatggatacacaccataatttattttttcagtccctgttgatgaacacttcagttattcccaagatttttcccttaggaacaatgctggagtgagcatctttatatatctatgtgtgtaatgctaaatatttctgtaattcagattcctaaaaaatgtgattgctgagtcttggggtatacacacttaaaactgtgatagatactgataaatggcccccaaaatgctgtcctcccacaaatagtgtcttgcagtttgccaatttatcctcccacaaatagtgtcttgcagtttgccatgattcccttttcctctgcacacaaatttgggaattgaatgcttccttcttaaccgttccagtcctctcctctctgggagctcatattctctgcttgtcatgcctctatgcctctctttttgcacagtgaatgtattttttcttcccctgctgccccataatatcaaatcctccttgttaactgactggtgctcgtgttgtctcttgtttctctctctctctctctctctctctctctctccccctcccctcccccccccaacacccttttctccttcccctctcccctctgcttccttggttatataaaaccatagtagtttctttgatacaatattcacatcaaggagtctcggaggctacctagagaagagtgagttctgactgttgctggcagtggcgacgctttatgtggtgccaattgggttgatgtttgtagcctcagtatttggctgtgttgttaaagatgaccccatttggtatccgttatttagggcacagcagtgagtgtgattaagaaaggaacaaagagttacaaaggaaagcaaaactggagaagagccttttaaatgatgacggagatgagaaaaaggaagataaaggcaagacgttgctgaactcctccttcatgccaccccccttgcttggtgctttacatacattattgcatttaatcccccagtgagaacagactaaacagattaggaatggtctgtctggaagacaggaggaggatgtgagcaaagtttctgaagtcataaatagttctagtgtaaaactacaaagataccccatgaagttacagcagagtgagtttaggacaagagaaaggtagtaagtagtacttccaaatggggctagtaaacagtggactctgtaaccaaaagtgtgaaaagatggacaatttaaatagcttttttttttaaggttttagacaactgcatggtaatacattgctgctggatttctaattggagttaggatgcttggagtctttagacattcacattgaggtcaaggagtctaaccgtatgtacagccctgtagtccatgaaggtatctgggggagcagaagagaggacattcagggcttctgtcatctctctttaaaccagaatctctctacttcttatctcttgaaagttctgggcttctacatgagatttcctttgtgagggacaaaaaaaagttgttatttatttattttttttaaagtctacaaacgattgcattagttgtttgactccactattccagacaagccgtgggctggatggactgtggatctaaccaacgggaggaaattttactcatggaccaaggctccaccattgcttctctcaattccatagcacaagctagagtctgacagccttgtagctcagccctgacctcagtgaggtgaggacttggtgaggtgagagaaggcaagtgcagcagcaagaactgctcctgtttctgaaagaacatcccagtccattggtaaggcctcccaaccccattccaccctatcacaagcaaggtgggagctcccctgcagccagtgccccaagtgccttgcctactgtgtgcctttgaaggaagagtcagggaggccaggagcctcagcctgagccctggctcacaggttctgtgctgtcaccgagctacttacttcacycctactcttgcctggtctttcccttgggctgtgagtcagaagacagtggttgaagtctctgcttactcattttgcagccataagattctctagcactcaacctctttctaacccatggtttcatctgtgtttctgtaacaacttctactaatcaggctgctaggaggactgactaagataatgcaaacaaaacacttttcagggtgcctgctgcatggcgaagcctcagtaaatggtagtattggtggttgtagttgggtcatttttataccccctccaccccctgcttcccctgctgatatcttggttcctagccctgtgacttggaagagacttgggcttctgctatgatacctgcttctgagccagtaatccccaaccctgacatctgcctgctgccttccagtcccatggcttgccccatcaatactgattttctgtccttgattatacctgcagtgacatcacaaagcacaatacatcatacacagtgatacccagtaacagccctctttgtatgttactgcatttaaaaaagaactttgtctcttaagagcacttcacatatgtcgtttcatatttgatagacttccttttctgcaattgaaatgtagaaatatcaatgacttgtcctaaggtgcaggcttgctagttgatatagacaagcagaaacccaggtcctctgattcccaacttctttttaccatttcctgccatcttttgagtttttgtatctagatatattggcctttgctttgatttatacagacttgtaggtttccctgtgaatctgggagcaggatgaaggtaagagtttaacttctgctttgcagttatactgtagtcagctgctaaaacataagaatactatctagatgttaatgaaaaaaatattatttttgacctatttttgtttcaaaatgttctggacttatctcaataaatagctgttaagatgtttatcaaatttattgcattccccaaaatctaaataaatacctgagataaaaagaaaatgtgacccacttgaggttaggagttcgagaccagcctggccaacatagtgaaacttcatctttactaaaaatacaaaaattcgccatacatggtggcacgttcctatagttccagctacttgggaggctgaggcaggagaatcgcttgaacctgggaggcagaggttgcagtgagccaagattgtgccactgtactccagcctgggtgacagagcgagactctgtctcaaaggagaaaatatggccaaaaaataaaattaaatacaataaagctaaacttccttaataaatggaaaatggcattaggcttataagaaaggtattctacataaaatattttgcctctgcaaccagcaaattctaccatattaaagacatagcagttttgtctctctgtgccaaaaatcacaagaacttttattcttgttctcatgatccactgcaatgttctctattcagaaagctctgggatgttttttttttttttcctggctcctttgatgttcctcagacaaagactcttgaagttgcagatttgttgtatgtttttagaccagtgcagagatggggttcagaggaacatttcacatgggctttgatgttagaatcctttggcaaatcaygtttgcctttcaaattgatatcaggaggatagaccctttcctttttttcttttttctttttttttttttttttttttttttgagatggagtctcgctctgtcrcccaggctggagtgcagtggtgcgatctctgctcactgcaaggtccacctcctgggttcatgccattctcctgcctcagcctcccgactagctgggactacaggcacctgccaccacgcccagctaattttttgtatttttagtagagacgaggtttcaccgtgttagccaggatggtctcgatctcctgacctcgtgatccgcctgcctcggcctcccaaagtgctgggattacagctgtgagccaccgtgcctggccaaggatagaccttttctaagggttgtcaaggaaataacctcatgtgcagaaaaagttttatgcacaaatatgtgtatcacaacagctttacaatagtgaaaacccagaaacaaattaatagtaataagagaatggttacttacactgttgtgaaatcatgaggaggaatctcacatagaattgaaagtgaggtctaaagaactttatagtaatatggagaaaaacttggttaatacattatgtagaaaagcagattataaatgttgtgtaatatgacatcacaactatggaaaactacacagtggtagtggtatcacaggtgatcttttgcttttctttattttccagtttttctgtaataagcaagaattttgaaaattggaatgggaaaagggtgttttactgaaaacagaagcatcatccttctctgttggtaattttcagcttgatttggtttgtagtgctgcagaaagtgcttttgatttctctagaacagtgtttctcaacctcagctagttgtgggagcagccctgtgcactggacaatgtttagcagcatcattggcctcaacgcacaagatgcctgtagcatgccctcagttgtgacaaacaaaaatgtctccacacattgccaaatgtccctggtgtgggtggtcgtgataaaataacgtctggttgagaactgctgttctagaatcatgcactgatacatcccaaatacccactccctgggagactcagcaagaggtggcagtgggtattcagttgtacacagcaatggagtatgtagaaatctagaaattcgttcactcwctcatgagacatttattttccagaaaggtgtttggcatcagaaaaatgtggcaataggaagcagggttccttccagctgcagggtgggattcagtgggaggaattcagccccttgcgggcagaggtggagtgaagaaagggcctggcaagcaacgaggctcactaggactgagacaccagcagttttggtcacaaaaggaggtggaagccaaattcccagcctgagatgggaatgaaagcagaaatgcagttgactagacattgtggagcctgcaccagagaactaaagctccttaaattcctcctgacagggaacaggattgtcctcagagcctagggcagccctcagcttgctggtggaaggaatggggacttggataaggagttggaagagtgggtggctagagagcccctgcaaggcactgcccactcagtagtgatacttactgtgaagggccgtgggtctagactgaggcatttacacttggttctggaagagaggaaagaagccaaaccagttttcctataggaaagatctctagaagtggatcaaagaatgtacactttttgaatttcgatgggtagtactcagttgcctttctaaatgccagtataatgatcaatggattggatattattttggcattttatagtgcttgaataataagtttattattttaaatgtttgtagtgccgccgaaggtttataaaggtttatggctgtcrcagttttgctttcatgacctgttgttgatcgtatctttgatttatgtgaggcctagacaggaacagaatccctaatcatgaaatttttcctatgggaaaatacatcttgctttatgacaatctactttatgacgtgctttccagaaataatgtgtggcaaaatgtagaggtcatctataaagtttctgtttgttttatctgttgtgaatttccatgatttttgtccccctttgatggctaatttattttccatcctgtattagagatayatatttaataaaatttaaaatattcttttttaaaaatgcatgaagcacaaggaaggtgaatgggtgattaacaagatagtgattcagattgaatattaaatgtatctcatttcatgaaacaaatgcattcaattaggttgaatgatatgaaattttgatttttctaggtcaaaaacagtcaaatatcagcaattttatatggctcagtgtaatagtaatgttggctataaagaaaatttttgtgaaatgaatattctgttttttattgctttcttaaaaattttgaggttcatttccctgaagacagagttgaaaactttggctgtgtatcatgctgggcatggctggaattcaacaaattattcttgctttgaatgattgtttccattggaacaagagttcccaacgaaccctggctgctcatagaatcactggggaaactttaaaagatataatccatggctccacacagataaatcagtacattggatatggtatgcagtggggcagggctcaggcctcagtatttttttgttccccacgtgactctaaggtgcagccagtttgagaaccactgcactagaatttcattttaaggagtctcaatggagctttggtataccttagaaaaacacaatgcctttgttcctcacctacttctctatcttgctttggaccaataaggtctaaagatgaaatgtgaaaaaaatatatttaactcgatcaaccccctgctttggttttcattcaacagaacatttattgggtacctactatgtgcctggtcctagggctggggactttgatgaaacagatgaatgctgagttaaagaagaattatgcctcttaaagaagccagggattatatgaaatgtcccaaacaggcaaatctgtagcgatggaaggtagattagtggtggttgcttagggctagtgaggatgggaaagtagggagtgactttaaatgggtatgagacttaacttggaggtgaaaaaaggacctaaaattgattgtggtgtaactatattaaaaactattgacttgtgtactttaaatgaatraattgtatggaatgtgaattatatctcaataaagctgctgttaaaaaaaaaaaaaagccaagggttccttttggcatgaggacttcacactgaataagtaaattaggaacagcagagaagaaactcagtactatacacccattcctttcaaaactaatagacaataaaatggggacaataactgagggcaaaataaagtaaatcctggttggagatgtttagttaccacctgtattccaaatagcacctgagtgttcagagggtggatgggctgggagccgtaggtgagaaaaagacaagaaccttcatagaatgtactgtatgccaggcactatgctaagtgctctttgtatgtattcattcattcaattatcacacagttatctccattttactattttgaaatggaagcacagagaagtaactgccctaaggtcatatagctagttaagcagtgacattaagactgccttaaagagtggaagtattctaatagcaatgtgacgatgcgggaatgggagtggcagtgggcagggaagcttgggcttgttgaggggatggatagctgtcacaatgtgttcaactagggtaataatggaggagggggtagaagggtggacagtgaggggttactgaggaactcccttgaccatgctaaggaaacaaaatgcagcagatgggcatcgttgaagataattgaatcaaaacaaggcttaagaaggccaagttcagttttctaaatgcacagatacatgcatgtctcaatgagtgtctctctgggtctgttccctgggtcttactatgacctgggctctggggagaaattactaaaagagaagtcacaatgacctagggaaattgaaaagcctccataggacctgccttagaaccttacattctttgaatggttgcaaagtcgcagccgaaggtgactagcccagaatgctcagaacatttggcatcaaacctggactagaaggtaaacctctagaggggaaggaaaagtctattgtcccctgacctcctcacttcccccaaagtggagcaaattgggctccccagcttttcttttccttctcagtgagacagatgagtatagacagtaattgtgcaggggcagaggaggagggagggacattggagactgtgtccacccaggatctcaggctaacagtctgatctctaagccaaatgctgcacttcagagccagcaacttttcatccacacgaatacattccccttgacctttccacgtttgctttgtgctctcagggctcagttcattcatgaagatttttccaagatctgctctgttctaacttccttttatgcttggatttttataccaagcctcatagcacctcccatgtaggtagcatttcctactattataatctccacattacccccaaataatcgagagttcacagtatagctgttcttttcttattttgttgtgccctagacctcatgataggttaatcctcttatgccctatgtttttttttgttgttgttcttgcacagttctttttttttttaatactttaagttctagggtacatgtgcacacatgtgcacaacgtgcagatttgttacatatgtatacatgtgccatgttggtgtgctgcacccattaactcatcatttacattaggtgtatctcctaatgctatccctccccccttcccccatcccacaacaggccccggtgtgtgatgtcccccttcctgtgtccaagtgttctcattgttcaattcccacctataagtgagaacatgcgatgtttggttttttgtccttgagatagtttgttcagaatgatggtttccagcttcatccatgtccctacaaaggacatgaactcatcattttttatggctgcatagtattccatggtgtatatatgccacattttcttaatccagtctatcattgttggacatttgggttggttccaggtctttgctattgtgaatagtgcggcaataaacatacgtgtgcatgtgtctttatagcagcatgatttataatcctttgggtatatacccagtaatgggatggctgggtcaaatggtatttctagttctagatccctgaggaattgccacactgtcttccacaatggttgaaccagtttacagtcccaccaacagttaaaagtgttcctatttctccacatcctctccagcacctgttgtttcctgactttttaatgatggccattctaactggtgtgagattgtatctcattgtggttttgatttgcatttctctgatggccagtgatgatcagcactttttcatgtgtctgttggctgcataaatgtcttcttctgagaagtgtctgttcatatccttcgcccacttgttgatgaggttgtttttttcttgtaaatttgtttgtgttcattgtaagttctggatattagccctttgtcagatgagtagattgtaaaaattttctcccattctacaggttgcctgttcactctgatggtagtttcttttgctggttcttgcacaattctaggcgccagtagccattcattccccattgaagtcagcctgttcccagtgactgtggcttcctcttgactcctggagcaccagctgcctgaacctctctcttctcacttattgtttcctgcctcgtgttaactttccctcttacctgcctgccttccagccatccttggtcatgcaagagacactcaatgcaacagggatgagtcactgattaatcagcaagcactttatagggccatgatgcaggcgataactgttctgatgacagacactggggagaacagcgggcatctccagggcttgctcatctctgacatgctgtccctgatccttcctcctgctccttcctctctccatccttttcttcaaaattctatctttctgtctttcggtgattctgtcgtcatcaccttcctcccctgccacaaatacccctgagtttcttaactactcacaatttagatctcatttatccttttatttgctatatctatagaacttggcttttcttgttttctgtgtcttgtgtctgaatataataatgatgtttaacattctgtgtgtgacctctgactgattttggaaatgggaaaaggatccatggcattggtaggaaaaggttgccaagtctgccttaagaatttttaggaatggcagggcatggtggctcatgcctgtaatcccaacactttgggaggctgaggcaggcagatcacctgagattaggagttcaagaccagcttggccaacatggtgaaaccccatctctactaaaaatacaaaaactagctgggcgtggtggcaggtgcctgtagtcccagctactcaggaggctgaggcaggagaattgcttgaacctgggaggcagaagttgcaataagctaaaatcgcaccactgcactccagtctgggcgaaagagtgagactctgtctcaaaaaaaaaaattttttttaagaatatttgcagggtaaaacataaaaaagctgatgatgaaacctgttggatgaactgatgaaaccccaaatttacccagccagtaatggccatgcccttcaccttctaaaagaagtgcatttgcttctccctggcctcatgttgaagaattggaaaggagcaatttggagagagtgcaataaaagaaaagacaaagagtttctgctattatccctgcatctctgacttcccacagtctgtttttcagctgttccctgtccactcccaggacctctgcctcctgtcttatagtgtatcatggtctctactggataacagataagcaaggttgagtcatctgatatggtcatccctggatgtggactttctcctccaatcatgagcacaacatatagagctcccatcctctctccttcactctcatcaagtgaatggctcagcaaggttgggactcttgtggtgagaccagaagatcttgagaagagtgtgaggaatgagcttcccagtgaataaaaggtgacccgacttttgggccatgagtgacagaaccctccagctgaatgtgcatttgctcctgaaaaggaaccccatccaaagtagctacagaagtgatttaaacagagatgtggccccagcaagtccttttcttccagctcagcatcacattgactgtcttctttgactcctaccagctctgctgggagtgagactcagtgacccttcccttccctatagcctacccagcccacagattcatgccaaacactcgttgcactgacttcatttgtgccgtctttgacattactggtaatgtccattatatgcagatgccaaagaccagctaacatcagttcaaggaatatttcaggagttccacctgtatacaatacaatataccatgaatcactagatcatggtgggtataaaagagagaaaatccttggaacacccataagcagttgatcccagtgggttggttaggctgtagttagtatatacactgctgttgacactgcctttaattatgtgtagtcacacctgcattgtgtcctttatgagctcttagaaaataatgaatgcacccaattgtttagagctcccacaaagtgaaggacaacattatttcaaattattgcaagaagcccagggtatctggagacagggaaagctcttaagtctactttttatacaatagagcttcataccattattctgtatataatcttttcaccaaaacactgtcgcctgattgtttcaacaaaagacctctttgttttgatagccaagaaaaaccttaagctcagtagagacatgagagcaagctttttaaattacaaaatgtaagtgctaaaaccatatttttggaatgtaaattggaaggttttttaaaaaaagttttgttaactttaaaagaagttacaatttttttaaacttaagtttttaacctaagtttttataagttttaaaattttcattaactttagcattttttttctcttttcttttttaatgatttccatggagttctttgacatgcagctcagggtgaccatatctttcttatctgactatagggtaggcccaggtaagctgaaaggtgataactttcccatactcctgagccctctgaaggtcaaatatattgtgttcaacactcaacctctcaggataatcctagccctgaacataggctgatacagtttggctctgtgtccccacccaaatctcaccttatagctcccataattcccatgtgttgtgggagggacccagtgggggatgattgaatcatgggggcaggtctttttcttgtgctgttctcatgatagtgaatgggtctcataagatctgatggttttaaaaatgggagtttctctgcacaagctctctctttgccgctgccatccatataagatgtgacttgctcctccttgccttccaccatgattgtgaggcctccccagtcatgtggaactataagtccaataaacctctttctttcgcaaattgcccaatcttgggtatgtctttatcagcaccgtgaaaacggactaatacgtatgctcttctacacacacatagctgagagtctctgtaacaggacagaggtagtctatctggggatagattgaaagtccctgactcatcctcatgaacttgagtgcagttttaatgccacgacccgtccatttttttgtagttccccaatattttggaacctccttgaaggcttacctttccactgctatcttacaaaagtggagagaaaggtgacatttcctataagatgttccatctcttttaagatctatacctccaactagacaggaaaagtcctaagtcctcgcccaccctgtgggatgcttctgaaagttgttacttaccttgtgagtacaaatgaagtatatcgtctctctcctgttccaggctggtaggtaatgtgtactttgtcctttctcattggtttttattaataaaaggaaaccaccaagctataggaaatcttagaagtcatcatctctattccattggtgccttaagagaagaggctgtgtcttgtttgaggttatatcttcaatacttaaaaaaatacctctggaaggcaatggatgtcctcaggcatatgagatataaccctccagctgtatgcatgtccatatagcttgcataggtagtttgcttaggaaatgtttatgaacagaaatggttctggcctagaattgcatccacttataaggactcaaaaggttcctgtttatctccccaaactcactgctcaatctcttagcttcacccataggaaaactattttgcatacactgttccctttgcttagaacatttccccctttcttacccttcctcaaccttgccctagctaactcttactgtctttaggttgtgtcttagatgttacctcctagaagaaccttccatggcctcctaagaccctcctctgtgtatctgaaacactgtatgcccacaccaatgtagaattttatgctgtaatacaattgcccattatcttgcttaccttccctgatgctcagtaactttcttaaggacaagaagctcttttactcattattttatctctagctactggcaaactattttgcacaaaatagacattcagtaaatatttgttgtctgaatgaatgaatgaacaaagtccaaacaaggaatatattcttaggcatagacggcttatctttcagaaattaaagtgcggctactttgtgtctgcattgaatgtcagtccaagcttctcagaggattcctctggataggcaccccagcgtgggtcctagctattgcttaggacctcccagggcctgcctttctctgggtgtagggcccaggattttccccactaggctgggctttcctactattctctacccttactcaactcctccatcctgtctgggagactcaacaattcctcttccaggctccatgtcctcctgccctgcctaaacttggtgacasctctagctcctgggaatctggtgatctctattcacccaccactacctatttcatttgctctgcctgaggtgtgttcactaacaggttgttgaatatggctctacccttggatgaaacttgaaggtctgtactggttgtcttaaacagctttcagtcttattggcaggcatgaggctctgcagctgctcaattaatcaggaccagaagccaacttatgttgggtcctgtctctgagagtaagtccatgttagctcaactactgagttcgtgatccttgggggatttggagaggaatgtccctagctcctctctggtggtcattcacttgggtcccattggaagagaaacctttaagaattaaatcactgcagttttccagtagaagaaatacagtgcatttaataaggataaataactgtctgctaataattagaggaggatctctgcttgcagaccctactaattcacactctgtcctcattctcatcccctccctttgcccctggaagtgatgctcaaaggatcaagatcaaaaggcagtggaaagaaatgaaggatgcaggagaaagatggacattgtgaataaagggaagagagagaggggtgatggggaaggtaggaagatcaggacagagcaaggaacaacaggatgagattcaaaagaaagcaacatggggaacatgcaagtggtgagggctaagaaatcttaataatgaagaaaccatggggactaagaggaagttgaagaaagctgctggagcaacctagagagacagaagagagcagagaagtgagtgaaaggaataaacctgggatgagagagaggatctgcactgtaactctgatattgaccaagaggattgataacctcccttttattaaatgccacatacatgccaagtgctgtgctgaggctttgcatttattatagcatagtgggcactagcccagaatggaatccagagttgagctgtttatggagctgtgcaccagaaaacacttagatgtctacacataagttcacatgcaggagactaggagagggttgttctctccacctccagtctcagcccaggagggcagaggttggccagccacagagcccagtccaggtacttcaacaaggggagctgagtggaagaacagaagcaaactatccctgagcataggaggggctccatcaccttcagaatgctaccaaatagctaggagggatgaaggcagatggtgatggcttttgggggtaggaagttacctgaggtcctcaggccagcaggcatggtcttggagctctaaagattcaggtatttatgctattatgaccatttgggtattcagggctggtgaaactagaaacagaactcacagatgtcttatccctttgaatgcttatttataacaactctgttatatctccattaaagaaacactagttacttcccccatgctactggatggtggcactaagtacgacatgatcagtgtgacgcaaagaccatactctttccactctaccctaaggcatctcattagagatggcatctctgctgtcccatctctgctatcccatttctggttgtcagagcaatatattctaggaggtcagcctcagcctcaggccatctttaggcagacaggaggttaagagaagggaaatgcagtgctggtccagaagcaatgaccaaggccctgggagccatgaagatagaggccacactggacatttccagctgggcagagagaggaaggttagaaaccaggaaaagatgagcaggagttcagccaatgaaggtttggggcacaggaagcaaaaagcctggtcttataggttggcattggtcccctccacctgttggggacacacagaagcctggagccacaggatgtcaggaactttctgtccctttcagcttcacacatgcacagcttagcgagaacattacccttgatcctctgagccagggatcacagtctacgggatttgtgaaaatttggttttgtcttgcagggaatttgtccccatgtaattcattaattgacccattgctccttagagctgcaaggagcctggtagttcaggccattaagtcccttctgtaggcctaattcatggcctgacatcacaatcctaaaaacataatccatttgtcctgatttgattttttcttttcgagaggctcccttggcagccaggttttctcattatgatatgattcatccatatggtaattaccattagaattagtatctcagacgtgattcatctttggaaatattaagctggaagcatcacttacagaaaggcctgttccatttacagccatggggaatgtctgcagagatgctccttcatccagctagcatttgttgagttttgccctgtgctggattctgaactaggggccttgaggcgtatagagatgaataggccctagactgtgccctcagtagcttccattctagaagggagatgatagggacgtaagtgcttgtcagatggatggtacagtcagagatgaaaggtaacatgttctccttaaagtctaggatacaggttttcaaactctagcaggaatcaaaatcacctgaagggcttgctaaaacacagattattgggtcccagcccagagtttttgattcagtaggcctgcgatggagcccaagaatttgcagttccaacaaactcctgggtgaggaggatgatgctggtctggggaccacactttgaggaccatagctctaagtcttcaattatttctccactgtgccctttctccattgcttgcagcatgctaagcagtgccctgtgctggggacaaaatgtttattaaagcttggtccctgttccagtggggaaatagtaggagagtaaacagtgatttctgtacttcacagaaagtgctactagagctttgcttaaggtgtcattggatcaccaaaaagaacatgattatttcttgccggaacccagggaaggccacatggaggaggtaaaattttaataawagggatgtggattggaagaagttgtatggaagggcatttgcagctgcgaaattcccaagttttcaaatgtcctggggcatcctctaacttcttctgagatgttcccctgaagtgataaaggttcagcttacttcccatagaagcctctggcacagttctggttaattcgcctggttttagcaaagtctttatgtttgtctttccggagttctgtttggtcagtgtcttgctcgtgcatggtctgaatactctcagtagaatggaattctctgcacaggcatttgaatggaatgtggaatcatgagcagagcaaacagcagcctgctaccaaaattctcctccccatccctgccatttaagtctccaagctgctgcaactaccccctccaacagcctcactgtttttgttgactcttcaggaaattcgacagttcttatatcattgcattttgtttacacacagacacccatcagacatgaaacttctagtatcttcaaccttttagaacactgcttgtagattccaaagttagaaaagaggctcatgagactagtaaaggggtttccaaaccatagcgcagagctcttacacttcatgctgtgagaggcccctgcgttgttaccacctattaactcacaggtgacaccgttaaaataaatgtcattgtttttctagctcagggcactttaagaaccacattatggggaggataagggtgctattagaagcacatatatagtcactaatgcgaaatggcagctgatactgaaggagaatagtaataagagagagggaacaggagaagctaatgtattagagaataatgatcatcaaaataatcatcaaaattaagtttaattataccctccatctgccactgaagaaggggctgggtatgatatagggtaaaatcccagcacgctgggacgctgaggcgggaggcttgcttgagctcaggagtttgagaccagygtgggcaacatagcaagaccacatctctacaaataatataaaattagcccagcatagtggtggtgcctgtagtcccagccactcaggaggctgaggtgggaagatcacttgagcccaagaggtcaaggctgcagtgagctatgattgtgccactgcactccagcctgggcaacagagtgagaccttgtctcagagaaaaaaaaaaaaaaaaagaaagaaagaaagaaaaagaaagcaaggaagtatggattatagaacagtaacactaaaagggaccttggagataataactggccagcctcttcgtgataaagataagaaaactggggcaaagagtaggttatgaggaagarggtttcagttatttgcccagtatcacacaattacacagtacagactgtgggtctctccagggcagagtcttttttctttttaaaatcattgttctccagcatctaccatagtcgatgtaactgcaactcaatatttgtttatttaaattgatttagcagagtcaatacattaatccgtatcttggtttcttttaaaccccatgatcctttcaaatgatcaatttcatgaaaaattagtagagagaatagatcagattaagtcctttgactctaagccmatcagcaaatgataatgaaatgttgttaaactgttggtggatttatcagaaatggccaagtttggttactagcaattaaatccacatttggctacagctattctgaatactttgtaaagattttatgccatttcatatgatttatatatctagttttcagcaaatacaggtgacagtagaatgtcgcctgtggttcagatgaatccaatgtagtcagggccaaaaaaccagaggattctagccaagtttttggtgaagacatagaattgagaaattcacttattcaatcaagaactgttcattgagaacttataatgccaaacactgttctagacactgcagatacagcagtgaaaaaaagaaaatctcatgaagctgacattctaatggaaggaacagacaacaaacaacaaacaaacaaaaagtgatggagggattgtgactacaattacccctctgttgaaagtgcttcctctgacatctgtaataggattttctgtttggtttggtagttaacagcactagcttagacatggagagtcttgatgttaagtcctagctgtgtgcacattagcgccttattttttttttttgagacagagtctcgctttgttccccaggctggagtgcagtggcgcgatcttggcttgctgcaagctccgcctcctgggttcatgccattctcctgcctcagcctccggagtagctgggactacagacacctagcgccttatttttaaatgctgataatagtagaacctcttcatagagctgttctgcggtttaattgaaatcacatctcactactcagggcctggttcattttaagcattcaacaaatgatgcaattattattattattgagtcaatggacctctaagtaacacactttcttcctgttgaaagatttcagaagatatgccatcagatcttagaacctcataatttttcataagtgatctcaaaaagatagcttctgaaacagagcaagtacaaaattgaccccacttgacaataccctttttgactttagtagaagtcaagtcaagaaaaagctctggctattccaaggagctttccttctgggtgagtgctgtggatgtggtgtgtctggttgcttcatgccttttagtgcatgcaagtctttgcctttgtctccatctgaattaccccagctcttttcagcctcagtatgcttgttttcttttgttttgggcctaaactccacatcctagtactggcttctataaggcatccctctttcatgagtcacaaggaactgcaaatgccttttaaagtgtttatgcaagtgttatctaagcattgcttgcttttctctaagtcattttactgtgtcaaatcattttgcccaaaccactccaggccatgtcatttcacagcacctaccataatgggaggagtgtaatcccatggaaggatccattcacagtttgcaacattgatctatagttctctatataaagcctacatctctaaaaacttagcagtgaccaaatataacaactttgactcctttcctttcctcccaatgacttcagcaagtcctgtagaaatatattttgataatatataatagcctacaattttttactaatttatttggtctacttgtttattgtctgccttccccatgaaaatgaagctcgtcttgctcactggtagaacaccagcagttgagcttagcacagtgtatgtgctcagtaaatataaatcacttgttgagtaaatgaatgctcacatagctgtctagcaagtgtggatgccatgttgtgatgtgttggattttgtttcaaaaaagatattggcctatgtagggcagtagtctgtctagttttcagaactttccatcaccatattaaccttgagtttctctcatttgtgactgtataatttaaaactataaatcttcacataaaggaagcatatttggtcattcattagacttaacttgactattttcaaaaggaattgagaatggccatgaaaggaattatcatgaataaaaacaataacaacagcattgtaaacatcacctaaacctcttaccaagatcacccctaacagtgtgatctttatcccactgttgggctttgagtgtgacaatggatagtgcaatggataaagctggaccacagagttagagaaatctgggtttctatcctggcatagcctcttactaggtgtgtaaggctgactgtatttctctacttctctaggcttactttcccatctacaaaatgaatcaactttatagattagtgtgtggattcaattgttatgtaattaaaatacttattatggttccaaacacatcatcattgtgttagttaacatctgctgtgtagcaaaggactcccaaaacgtaccgacttttcacaacaatcatttatttagcccatgattctgtgaattagttgggtagttctagtctggatcaactgatctctgctgggccctctcatgcatctgtggcagcagttggactggcaagtggatgatctaggatccaggatggtttcattatgtgtctggctgttggcaagttatcagccaaggtgacaggggtgactgggccatggtctttcatcctcccgcaatctagttcaggcttcttcacatggcagttgttgcagagttgccaaaagcaacaagagagagcaatctccaatgtacaggtatttttcaagactgcttgcatcatattggctaaatttccattagttaaggaaatcacagttccagcccagtgtcagtgaaggaaataattcgcggccatttttgtagcctgccacaatcctcatcatcactgtcatcataaaaactagtatttgttgagcatttactaagtgccagatgctgttctaatcatattacatttatcaaagcttgtaattctagccacaaccttatgaggcagatactattatatcctatattggcgaaaaggaaactgaggcacagaatggcaaagcaacttatccaaggtcacacagctgggaagcatgggagctggaattcaaaccaatgctccagagccatacttgtaatgaccgttctctactgtctcttcttcacactctacatgtgggcttttccatgattccttctttttcataagtgagtgatctaggaagagataataccttgactttttttttttttttttttgagactgagtctcactctgtcaccaggctggagtgcagtggtgcaatctcagcttactgcaaccttcgcctcctgggttcaagtgattctcgtgcctcagcctcccgagtagctgggattacaggcatgtgccaccacacccaactcatttttgtatttttagtagagacggggttttaccgtgttggtcaggctggtcttgatcttctgaccttgtgatccacccacttctgcctcccaaagtgctgggattacaggtgtgagccactgtgcctgatcaataccttgattttgacaggttccctgaacattgccatatctaccaccagtttgtccacacttcagcatttttccaacaaagcaccttgagtttctctcatcctggattggtgtgactgggatgcatcattccagatcttggtagtaatttttgatctctttctggttctttgtggtgagggtattggcaatcgtgatggaagttcagagcttcattcacagagcacttcatcttttatttcttcagacaagtttgggggcttggaaatgtggctgataacgatgttgaaatattacttaatatatacatagcatttatatatgtttattaatagtttcttggaggtgatttgcaataccttttgatatcagagactatggctttctctctatcctcagcaactagcacaggcaagagcacacagaggacacattggaggagctcagtacatgttgtaaatatctacatccgtatctgtattttattaagacagggtcaaaaacacatatactaatggtgaccagatattggccaggtgtggtcactaaagaatggtgggcactggcatccagtggagaactcatgccccatctaacagtagaagatctagccatttgataccatgtaggaatgctcagtgttaccagattgtttcattattcaggagatgctggaacttcagatgtatatgtaaagctttcctgaatttaaacagggtatgtcagatgaaacaggtctgttgactgaatctggcccatggtcaattgatttgtgacctccctacattaggcacttgttggcacctttctattgcattataactgtcctgaaggcccgaggtggaaggggagatgcagaataaggcggagatggaacaatgagatgacaagagatgaaagacttcaagaaggatggatgattgcctatttcagagattctgcagagggcaaagaaatgggaataagaaaaggctattagattaaagtaaattaattatttggcacagcactacgtctacaggctgtgttctttaaagaaatgatcaaataacatgggaaatagttaagcaaattaaaatactttgtttactctgactctcgtaattgtctttaatattctattatgcaatgtaaatctccaaaaggagaagagatttactgagattttttaaactttcatgatcaaggagtccttaggtcatacaatcccttgtagatagaatgttttgaggaaaacaccttggaaaagctggataagagactgaatgagtcactgggagtctatggaggcctgatgtggagactggaatgcacatggtagtgagcaaatgcacaatgagccagcgcagcagcttggcaagtaaagaaagtaggccaacctattaggaactaggaattgccagcttagtaatctttttaagacaaaaccattttagcattattcctttgctgaaaacaaaccagcgaaaacaaaaacaaaaacaaaacaaacaaaaaacaaaaaaaagcatcaaggggtgccctcctctgatgggtgaaatctccttgctttaacattccaggtctcctttatcaggccagctgacctttcttattccccagttgttccctggcctttctcattccccagttatttcctatgcttactccctgctctaaactccactggctgtccttattgcttgcatggtgagttgtctccccagctgctccagttagagaaatgcctgctttccaaggcacaggtcaaaccctgctttgcctattaagccttccttagccatcaagctaccagtcagttcttttccttacacaactggatcagttacttctgaaggacttgcatgggacttagtgtgttggagatggcctgtatgatttggagccaagagaataaaactatgtcttgagatctgcagctctctacccccatttgccctcacagtacacccaaatagggttaggataatattgcccagaaacacagaagagcaagggcataactccaatcacattgcatttcatagattgtggtctatagttatacaaccacctattattcattgagggtaaaggagtgtattctcttttatagacttgctcaacagtaaagagcatcatttctagacactaggctgagtatgttacatgtttatcatggtgaatcccagaatctccctaagaatagtgttattattcccattttacagaggagggagctgtcttgaaacattcaagtcagcttgttcacacttaatgaccagctctctatctggtgaaggtcgagtcaggtgtacctgacctcatgtacctgaccccaaacctgggctctttctgtcccagcacaccatctccatggccatgctggccactagaaatttaatgacagagaattaaaggtaagaatcacactgtgccttcaagtggcaaatatataccaccagacagaggaagacagataaaatctagttagggtctacacagtttgaatatcataggactcggtgcattctggggtatcataaggacctagcacagctcaagagaggccctcttgagtgagatttggaggatgcaacatcatgggggcacatgcctggcccgcagggcagtgagagtcttctactccctggccattcgtcagtgtcaccgaaggaggtgaccttcatttccaccctactctaagctcttggcttttctgtctcctttactagactgtgaactctgaggagagaaactattttatttatccagccctgtcatagtttctggtatataaacagtaactatttgttggtttgatgaatgaatgacaagtcagccaaggcaaggtgctcaaggtgacatgatagagacagcatgatagagacagcacctttattcccccatcagagagctggattacctcactgcatgttatgtgtctcctccgtttgtttatacactatccagaagtctctggcttctcagaatgcttgacaaattccaagtcctcccttcaataatgtcaaaccttataattttcaggcctcatcgaagattgtgaaatcctgcagcagcacaagaggtgtctgctgcccctcacactttccccacatcttccaacacactgccttgcacagagcagggtctatatacatgcacattgaatgactgcattgaaatagattggagacatggttaggaacctgtcctaacagtgcaatcttcttgagacaatgcttggtgaattcgggtgataaaaggagaagaaatcaggatagtgacagtgacatagatggggcaagaagagtgagcaggatctgtcaacttattggatatgggaggtgagggaggaggaagagaaaaaatgattcaaatactttgatctcagctgacagtttgaaggattatgcccaaaggggaaatagggaagttctctttccccatgaccctctcatcctcatttcagtttaagcatggagaaaagatttcccataaaagtcaggctgaaacactccatggagggagacagacctgggacagtcattcagtaatgtccaggaaaaccagaaggaaaggtttgccttcatctctctgcagaagagctttgctctgctgaggaggagaaatttgagctgaatgtatttctggttggtatgacttgtaagttctctgtttgatagcagagttgtttgaatgacctattttataactacacagagcttttccaaatagatggtgtctgtagaatgttcaggttaatgcatgagccgagtgctcagagtgtttgcacttggagcatctgagccttctttcttaataagtcatcttggcattttgtcaacaagttaatttgcttycctaagaaactagattaatacttcctgtactttgtgctattcacagatctacaatgcagtgagaagagaagaaacagaaaatacagttggatctctactccatttcctcaccaagctcccagcctccgagacagcccatggaaggataagcgttggtccatgcttaaagcaatgtgtccgagacactgtatgtgagtatcgcgccaccctccaaaggacttcaatatcgcagtacatcaccggtwctctcctagaagcaaccacgtctttgggagcaagaagtggccttctcagtacttttggaggatccactggacgaatgatgctgaaaggtaatgcctgaaatttcacttttaactttctatctttgactacagagaaggatctaagttaagatttatgtatctcctgatggaaaattaagttcacttttcagcaactttaagtaaaagtcgcttctttaagagaatataaaaaggtggtcccttattaaaatcccctaaggtgtcaacattccaaatagtaatcattaagattttgaggccgggtgcggtggctcacacctgtaatcccagcactttgggaggccaaggcgggcggatcacaaggtcaggagatcgagaccatcctggccaacacggtggaacaccatctctactaaaaatacaaaaagttagctgagggtggtggcgggcgcctgttgtcccagttactcgggaggctgaggcaggagaatggtgtgaacctgagaggtggagcttgcagtgagccgagctcacgccactgcactctagcctaggcaacagagtgagactccatctcaaaaaaaaaaaaaaaaaaagatttttgaaactttttttcaaatgaagtaaatggttaaaacgctatctttaattttttttwaaatgattcaggcaggtagtttctcctagtggtagtttatgacaaatgtcaattactatgacaagatgctaggaaacaaatatagtcaagcagtcatattgaaaacccactgtggttgggagcagagtgaaatatagatctccttcatacatagaattaataggtgtctattgaccagaaaagccaaaggccatcttccagctactcccatcttaaaggacaagataggcaggcatcccactgaaagatgaaagccaatggagagtggggtcccttggcatatgaacttcccagctacttcccatgagcagcagacaggcaggtcagaaatggcagtgcaccaaacaacctcagaaacttgtacactgcatagctgtcacaagctgcttggcagccttccctggcaggaagctgccaaccagacagggaccatgcaaagcagcattccactgcctgggggttgccagaactcaatctgacagcagctattgtccctccatagcaggtcctgagacccaaggccagcaggccaatgaccttcctccttgatcctcagccttctccattcctacccacacacacacccctagacaggcctaagaggaatactgtaacctccttgtgtactatgttgggtgccaagttggtttgttttctggagttgcccgaacttcaggggattggttataaatgaatgaagaataacagaaggtgtgggaacactartggcttcatgtttttcagccattcaacacattttttgagcccctattaggtgttaggtgctggaaaaggaacaaaacataattcctgccctcatggaatttatagtctctaggtggtaagctgttttccctacacacaagactcaaggtttctcccctctgatgtggcacctagagagtaccaagcctgcattcttcatcatactcttcccaggaagttgggctgagattggcatgtggaattggcattgttttaatgcttgtgatggtatgccagggccttatcccatgagttaatcaacatgtgtagactaaacccctcccatttggttttcaaagtctttttttttttttttctttttgagatgcagtcttactctgtcacccaggccggagtgcagtggcatgatcttggctcactgcagcctctgcctcccaagttcaagtttctcatgcctcagcctcccgagtagctgggaccacaggcacacgccacctcgtctggctaatttttgtatttttagtagagacggggttttgccatgttggccaggctggtctcgaactcctgacctcaggtgatccgcccatcttggcctctcaaaatgctggaattacaggtgtgagccactgcacatggccttaaagtttttatgtgcctcagttaaacatatttctttaacaatcagtggaataaaatggattaaaaacccagatgggtttctcaccacaaacaatgataagtatgtaaagcatatgttagttagctcaactgaaccattccacaaggtatacatatttcaaaacatcatgttttacatgacaaatgtatacagtttttattaactcattttgtgctcagtagtgtgtaggaagaaacggatctctaggctgcccaaccaaggcaggcacgcctctagtcttccacaggtctgtggagagaaataaggaagctgctggtgtgtgcatctatggccctgatcataatttgacttcaattgtatttgcacttccctgttcgaaatagaacctcatagatcaatatttctagctctgacactcaccagactgtcagctaatgtgttatctttaaattggcgttttatgcaagagttggaagtttctttaactttttgctttgaagctctttggtgatttctgagaaccctctagaaactcctgctgaataatacaattagctggttgccttctgctccaagcttatttctgtagttctgacttactatcttggaaacatttttcaatttcagcatcctctcccatttggttttcaaagtctttacgtgcctcagttaaacatattcctttaacatgcagtggaagaaaatgcattagaaaaccagatgggtttctcaccaccaaaaatgataagtatgtgaggtaaagcatatgttagttagctcagttgaaccattctacaatgtatacatattacaaaacatcatgttgtacattacaaatatatataatttgtatttgtcaacttaaaaaaattaagttaaaaaaaaagatgggtcttcaaagtcaaagagtgtttacagaatctgtaggatcagcatattggttagtgggtcttgaactctgatggccatrtactctgccagaggatcaggagtacatgcagctgctgtgatgtggttgtsagcttttttttcttctttagtatgtgtcctgtggcatagatttggccaacagcttttagctattggggaatatataatacactcttagtcttcagtttataaatgggttatattctacaagttcatttcccaggagcgatatagaacttagaacactttcctggataagcagtattaaatgttgtgatttggttcacagactctagtcctcaaaaacctctgtaacccataacacagttgtgatctgcacatttcccacgaaataaagaggaaaacactattgttggaatactgagcattagcctcaaagaaaaagcaatagaagtgagttagaagacatttcttgttgaggggcaataattttattaaagatgagtaaagagttaaacttttcagagatttcgaaaaggagttttagccatttctgagattttagatgttggcagctgtagctttttgttatggctaattacacttcaaaacttgtacctatatgaaggagtcagaaaattgccccagtaattttttcctaatgttttttaacgagatgyttataaatggtatgaagaaggatggaaggaggtagcacaagatttaaatttttccccagagataaagaaaaaggaataagttcaaaagaataacctcttccataagagaaaacatgtttgaagtgaattaaacggagttggtaaaggtagagaaaaaggaacagggaaaaacaaatgctgtatgatttcccttatatgaagtacttagggtrgtcaaaatcatagagaccttaagtagaaaggtggttaccggggatgaggaagggcaatgggaatggggagttagtgtttacgggctatagagtttctgttttgccagatgaagagttctggagcttactggtggtgatagttgcacagcaatatgaatttacttaataccactgaattgtacacttaaaaatgttgagatagtaaattttatgttgtatgtattttatcataagaagaaataattgggaaaaagggcatgttttgcaggtctttcatccccctccctagtctattaggatgtaagaaagaaccgaaacgctcctcttctggaagtggttatgattatgagatgggggtcgtggtcacctgtactaggcgaaaatagaaggaaatgtccaacaagttgatcgttattcacaagtcaagaactggtaactcgaggcttgattgtccagaattctgcagccttggggctttatggattgatacagaaggccaataatcagaacacaaacatgcctgcttttctgccttcagtgccaccaaaggtcatctgcctataaagctgaaggtttgccaaataaccagagacactttcttatgtgaagcattgatccacaaggatatgcccttatcataagtgtgtgctgtctcaaagtggaaaaatagagcgcctttacctttcagtcaggaacctccactagtttgatacattaagatccttctggccgggcgtggtggctcacgcctgtaatcccagcactttggtaggccgaggcgggcagatcatgaggtcaggagatcaagaccatcctggctaacatggtgaaaccccgtgtctactaaaaatacaaaaaaattagccgggtatggtggtgggtgcctgtagtcccagctactcgggaggctgaggcaggagaatggcgtgaacccgggaggcagagcttgcagtgagccaagatcacgccactgcactccagcctgggcgacagagcaagactccatctcaaaaaaaaagatccttccacttcctgtccctgtgcccttttccctctccccattaatcttgttagaatctcaggactaacaccttatagcagtggcagtcaaaagaattattgacttcgataattaggaagaaattttcaaagctatcacctgctttttcttttcttttaatgttttacctactgaaaattataaaaacaagataaagttaaaagggagagaaaaaattgagataactgatggtaatgtgaagtactaaaaatggcaaaattagaaaaataaagtgatgacaagaggatttttcatataaggcagctaagtgttttcaaatgtgcatattgtaccagccaacataataaattgagtgtgttaaactcaatttttccttctcaaattgttgctgagtaaagcacataaattaaaggattaagtgttacatataaccgagacaaaacatagttattcatatttaaattgtgtaatagagtggagggaagatggacctgctgaggccagcaagacatctgccatctttctgacagatggaggccagcaagatagtgcagacacagggtgccaggaggaaagtctgttactaccatgatgagaatgttggacaaagccacccaatgaagctttaccaattctgcatgattcataatttgctgctcaactacagtctccactgaaaaatgaaaatctattgccctcacaaagccagtgctgaggagatgaccaagtaccacagtgatgactacattaaatccttgcactccattcatcctgataacatgtctgagtacagccagcaggcacagagattcaacattggtgaggactgtccagtatttcatggcctctttgagtttcgtcagttgtctgtgggcggctctgtggcaagttctgtgaaacttaatgagtggcagacagacatcaccatgaaccagactgcaccatgcaaagaagtctgaggcatctggcttctgctaagtcaatgatacagtcttggccctcctggacctgctagagaatcaccagggggtgctgcatattgaccttgatattccacagtgcatattgtgcgtattgaccttccatgccacggtgatggcatggaagaggccttctatgccacagactgggtcatgactgtgtcctttcataaatgaggagagtacttcccaggaactggggacctatgggatattggggctggaaaaggcaagtattatgctattaaccacccactctgagatgggattgataatgaatcctgtgaggccattttcaagccagatatgtccgtagtaatggagatgttccagcctagtgctgtggtcatacagtgtgactcagactccatctggggatcagttaggttgcttcaatctgaacatcaaagggcatgtcaagtgtgtggaatttgttatgagcttcatcttgctgatgctgatgctaggaggaggtgttacatcattcgcaatgtcacctgctgctggacataggaaacagctgtggccctggacacagagatccataatgagctcccatataatgactacttcaaatactttggaccagatttcaagcttcatatcagtctttccaatataactaaccagatcactaatgatgcctggaaaagatcaaacagcaactgtctgggaacctgagaatgctgccccacacacctagggcccaaatgtgggctcttgctgaggatgtaacctaraggagagtgacaacaaggacgaagaccctgacaagtgcatctccatctgttcctctgacaaacaaactgcctgtgaggccgggcatcgtggctcatgcatgtaatcccagcactttgggaggccaaggcaggtggatcacctgagrtcaggagttcgaggccaacctggccaacatggtgaaaccacatctctactaaaaataacaaaagttagctgggcatagtggcacgtgcctgtaatcccagctactcaggaggctgaggcaggagaatcacttgaacccaggaggcagagattgcagtgagctgagattgggccactgcactccagcctgggtgacagagcgagactccatctcaaaaaacaaaaaaataaacaacaaattgcctgtgaggatgaattctccgactctgatgaagagggaaagggtggctgcaagaattcttccaacttcaaaaaagccaagtgggtctaaacaggatgaaagagagaaagacccagaagagaagaagtcacagcagagaagaccaaggagaagccagaggccaaaggggtccagaaggaggtcaagttggctgagcaggcctttccagctctggcttcttgctgggtcccctaacaacttagattttatattttctatttctctagactattagtaaatttttatttactaaacataaatatcttggggactagagtgaaagacagaaaccagggtcctgagtccagggcagctgtgctgggtgagctcttccaggagctgccttgcccccctttcctccccagttcttaactttgaaccataaagggagccagggctgggtgggagggatacttgtaggtagccatatagtagttttggaaaggtgtccttattagcattctagaaggggtggctggatctccaaggatcctctgttctttccaggttcctaaggtaatattagatgttttagattgsttctgttctcatacctccccattgtcctcaagtaagccaggaagctcacactgcctgccytctgtgttcctccaattctgcaggtgcagattggtagtctagtttccttttttggatactattttctttttgtgagactttgtaataaaatggtacatttctatttttaaaaataataatacattatgtattagaaaaaaaaactaaactgttcatttttaaccagtctgagtgtgtggtatgtgtgtctgtagactatatttagctatattaaagttatttatcayatgtcagctataaatagaatattgatatgaaaacaaaaataccttacagatacaatatttttgtttgaaargagggaatattttatttcagatagaaaagtctaccagcactttgagaggtcgaggcgagcacatcacttgaggtcagaagtttgagaccagcctggctaacatgatgaaacctgttactactgaaaatacaaaaaaaaaaaaaagttaaccaggcgtggtggcatacacctgcagtcccagctacttaggaggctgaggcatgagaactgcttgaacccaggaggaggaggttgcagtgagccgagaacacaccactgtactccckcctgggcaacacagtgagactcccatcaagttttcaacttattttctttcactacaataagcttgtatattctatttgtatctttctctaaagttaatagctttgaataaaaaacaagaagttatagtaggaatacacatacacatttgaactacatgattataactcgtaaatactttagtttgtaaaggctggcttagttgacttcctcaaaatcaaaacgattaccctttacatgcctactaggcaaggaaggcatgtgcatagctctaattccaagatttgtttatttaaagaaatatcctgacttgttagtattgtgaccttgaaattattttcttggtatttaaaagtatgctttaawgtaatattgggtgtgtttctctaccagttaatcaactaaaaagtattcattagctgcccactgtggcctagtgctatggcacctaagaatggagaagatcacatctggaagtcttcaacttgtaagataatatttctcattccagagaaaatgtaatattaggtttcaggtctactgaaggagcccttaccacctaaagagaattcataaagtgctaggctgctacattaaaggtggtatgagtaggtcatagggccaggaagcttggtaggcacaggacaaaaacctgttttaggaccacaggtggtcaagtatcatccaggagtgtgacactacacctgggtgtaacctaagaatatgactccataccagttgtgaccaaggaatgtgactccgtcaccaggtgtgacctgaacatagcactccattcctaggtgtgaatacacccattttgagctgggagactgattccatttaattctcttatgtgccctaattttgctccaagaaactagcttatgaaaggaacaaattatggcctaattctccataaagttttgacaccaaaaagagagagagggagagggagagggaggagaaggagaagggaaggtgaagggaaggcgaagggaaggtgaagggaaggctaagggaaggtgaagggaaggckaagggaaggtgaagggaaggctaagggaaggyaaagggaaggctaagggaaggcaaagggaaggagaaaggaaggcagaagggaggaaagaaagaaggaaggaaagaagaaagggagggagggaggaaagaaagaaggaagggagggagagaaggaagggagggagggaggggaaggaaagaaggaagatcgggtaattgaaagttggttaaatcctaatcaatgcagtcagaaagatgactggtgaggatagcaacaccagacagacactttgggtttacatatctgagctggttataaaaatgtcaagtcctaattacagagactcagaatggaccatattgcagaaatttatttgcaaaatagttatttgaaacactgcatccaaaaaaacaaccattagattccaaaacttccctccaaaacttactgaatatttaagtaaaacaatagttcttaaaaatgccagagaatagctgcagactctgcagaagtggttacctccaagaaaggcctttaaatgtgagcctcattgtgttttggatttgagccttgacttcaacattgggtcatcctattcaggtgattgtacctctaggctttagtttctgcatctacaaaatgggaataaaagcaacaacttcggagagttgttttgaggaataagtgtgacaatgtatataaagaacttaggccaggtggctcakgcctgtaatctctgtactctgggaggcaaagccaagaagatcacgttaggccaggagttcaagacgagtgtaggcaacatggcgtgatgctgtctcaaaaaaaaaaaaaaaaaaagccagccagatgtggtggtgtgtgcctgtggtcccacctattcagaaggctgaggctgtagaatcactgtagcccaggaatttgaagctgcagtgcgctatgatcctgccactgcactctgtccgcctaggtgatggagcgagactctctctctacaaaaactttaaaaattaaaaataaaaacagcttggcatagtatctggtacctaatgtatgttcaaccaatcttatgatgatgatggtcatgctggggctgatgatggtgatgatgatggtagtaatgaggattgccaccaccatcttgaaatgccagcattccactgttcttaattcaaagactctgctgttagctcagttgtagatgtacaagaaaagacaagtaccctccaggtttccctagctgtgggcctagagcactagcaactcctgggacacctaaggggaggtatctagtggctggaggccacacctgtgtaactcctttagcgagattttccttagttcccatgcattaggccactgattaattcaatcatttgaccaatatttgttgaacatctactatgtgccaaggatataacagcaaacaaaatacagtctttactttcgagggatttacccacaaatggaggaaatggacaaataaacgtgcaaattttaagatagtataaatgttataattgaaataagcacaggatatagggccccagagggaagtccctataccatcttcattgacatctgaggtttctacaaccatttaagtacctgaagaaatctaaacaggtatttaaccagggaaaacaagccctgacccatattatgaaacttctgttgtttttacttaattctctgctgatatcatctctattttattccctccagagtagaaagatgctaagcatttactcctggtattgggagccttgtctaaaaatctatgactgggacaaaatttagtgttccagttaaaatttgtatattttaatgaagatgacttactcattacaataaaattaaaggatttttttcaatacatgacacttctacttttgagtgtttytaaattgtttattgtttttaaagagtaagcctcattttaatgagctatgaaaattcttgctcttgggaacatttatagaacataataaaatgcttataatctgtttataataacatgtgggtcagtagcaaatacttaagaggataaaaaagagaatatctcaccatagtctgagtcataatttaaacttctactggaattgagtcttcaaaccaagaaatagtgaataaattattacagttaaagtaacaaaaagatatttttaayggtgtttagattttggtaattgaattctaattacagatattatactatcatcaggaaagtctaacaagttttgtcaactggaaatatatatttggtattttgtctttttaacttcatatttcattgtgacaacaaacttaaaaaaatattttctataatgttaatgtcacaagtgattccttgaacaaatgtatgctcaaacaccactaaggatctacctttgaattttacagtcaccagaaacaccctgtgtgacagtagcgggyattttgcccctgtttatactcagagacacattttggcatcaataagcagactcatctaaaatccatttcaaatagatgttgttgtggatgatctgggaacatggagggtaagagagagtataacaagtttcagagaccctakcaactcacaagatctaggctgatacactaccaagtctagacccaaaatccttaactagggttgaccagcttgtaggagcaaagccagtatttgatcctaagcctctctgattcccaaagccatgttcttaactactaggaaacactccagtattatctcccactcagggatcccgtgtactgacttataccagtgtgtgtgtgtgtctctgtgtgtgtgtgtgcatacatggagtataacactaaatcttagatttgaatggaggttcatttgactacagaattgatcattttcccacatacctgctgcccccttgccctagagacctccagtgattttgaggatgtctgtggaaatgatatccttccattctttgatatagacacctatgagggtagtgggagtcttcccactgatggttacatgttcataacacagtcaatcaaatgggaaaagaagcagctcctgttagctgatgggccaagtaaaacacatttcactctgcaaaagaagccattgattggacacaggcagagaagtggtcaaatcaatggtaactagagaagaggggctgaaagagtgtctgggcagaagcaatcatatgtgcaaaggcccagtggcagcagggagtatgccaagtttgaagtctgggcggagagtggtgagctggagggtttcttatgccaataaagtctggagaagtcggaataacaagcactaacaggtattgggcactcactgtgagctgggcactgtgacaagtgtttttaaagtgttacctaatttaagcctcatatttttgcctatgaaaaatagagagaggcaaaacagagagaggcaaaacaaactgccagataacataggctcttgttaagggctgtagaagcaatgggaagccatcagagggttttaagcagaagtagtgacacaataagacttacatttcaaaaggatgattctcatcaaaataaagtagggatgcccccatgggcaccaccccttccagccctcattgtaccccaaattaaaatatttacatttgaaatggtcatggatattgaacttgaaaataaatgactattctgaaataaagactgagatggtgttagttgaaatgctctttaattgtttcgaggagttgggaaaaggagtaatggctactaacccagctctctctacttcctgggaactgtatttcaagacgttggacttagaaggaagcttgtggtgtagactacaaaggggaattaaaaacctgttccctccaggcccaggtggactgttaatgctccccctaccccatgccatactcactgatgactatgagttgtagcagtgttttacttatactgcaggaacacaaattccttcttcatgggccaaatccaagccacgtgtgtttttctttgaccgttgcagtactttaaaaattgggaatcttgcattaaaatgttctggcttctctggcaaccctgggccactattctcccttggcccgtgggctgacagtgatccatactaacccccacaagatgagacacaccagctctttaccacacacctggccccacctccaggtggtgtcctgttcagctctagcctcatttcctttacctgcttggtcctgcaggcatctccattttggaccctggagttgtattctgagattcacacaagctttggggcacttcagttcaaggatttaggaggctgaactgggagttgggacaaaaaggagaagggctgtaaayacagacaggtcatctgtgaacaaccttctggttgggttcttcctgggagatacaggaagcgttccaagcagggaaagcaagtgagatagtgccagggtgagaatgtgtgcagcaactgtgagacaatgaagaaatgatgcagtggacatagtgagaggtaaggtccatttggtagctgtggttacagtttggagaatgaggtgaaaatttgaacctaaarcattagagagccattgcagacccttaagcaggttgaattttgaatagtggcacattaggaccaatagcctggaggcaccctctataggaaggagagtggcacttacaaacctgaatgcttttccctggattaggaattgggtgcactgaaaatagagggccagaagccagcatgggcccacttagttttcattggcatgagacactggttacagtaaaaggactagtcttgaaaatttagcatcaccgggagaaaaatgaaatgcaataaaaattagagtcagttaagaatggaggaatttttactatgacacagcaccattgtaaaaaatctcccgcctcgtgccaaggggtccgtgctgctaaactcctcccctgagtyagtgcatttgagtgctctcagtgcagtcggcacagccagagcagctgggagcaaggccttctccaggcttacataaagcataggtcttgaccaaatgtgraaaacctttagggacatgaaaaccattagggatccgtagccctgacttgaaccaagcagaataaacaaacccctgcccaaattggaactcactggacgcctttcagagttatccaaggggaaaggctggaggcctcaagggtcttcgagtgggttaatgtcttctttcggctgcctagctcaagatggggctttatctgtgctttcctttgttcttttctcaaatgtcttaatgcctcagtggcaaatccacaaatggattgtgttttgaacctgtaatgtgtaccatactatattttccctgctaatggtatagtaaagcccgttagaccttttgttacaaaagattcaggaactgggctggaaaggttccaggtagcattcacattttccatggacagggtcttggtaagttcccaaccttatttctattttcaatatcctttgtcactctttccagcctcacgatctagttttctacacgcataatgtagagaaacgctgtgtctctctcccccaacagttaagtggcatcattttcactcttttaatcccagtttttttttcaagttgaggaggcagggccgggcatggtggcttatgcctgtaataccagcactttgggaggccgaggcacgcagatcacctgaggtcaggagtgcgagactagcctggccaacatggggaaactctgtctctactaaaactacaaaaatcagccaggtatggtggtaggcacctgtaatcccagctactcrggaggctgaggcaggagaatcacttgaacccaggagatggaggttgcagtgagccaagatggcgccactgcactccagcctaggcaacagagggagaccttgccttgaaagaaagaaagagagagaaagagagagagagagaaagagagaaagagagaggagagaaaggaagaaagaaagaaagaaggggaggcagattagagaattatgaatgttcattcatccagtaaatagtcaattgagtgcctgccgtggactagatgctatgctaggcactatattgtgacagcggagggggctggattgaagaagaatgaaacaataccctagttccctgatattcacaatctgttaaagatggagatgggcatagagatgggaaaccaaagcacagagcagctaagaaccaagccctagatggtcacaaatccatagctcacagaagtgtgatctgaactatcatggagctcttaccctgcctctagtctacctgtaggaaatataatagaatgtagcacaatataggaaacatttgcagaatgcctgccacccctgttctagctagggatgaaaacaatgaaataaagcactgttcttaattctaggagtatgatttagattaacaaagagacagacatgaaccagtgtttacattgcagcatgatacacaaaaggcaaaaattggtgattaagaatgtggagtttgatgacagatagacctaagtcccagatcaaccatatagaaactgcatgatctggggcaagttacttaactcttctcttctaagtttcatcatcttacctgtaaaataggacaatgcagacacttgcctcaggtcattataatgggttaaaaagtaaattaatgaatataaagtgattagaacactgtccaaaaaaagtggagatggagcgaagaaggcactcagaaatggcaagaacaaaggcttagmtgcaggatatgtctcaggatgggggctggagggktcatgtttggcaggagcagggaacatacagggggccttgagaaatggagctggaatggatgtcctggtttgcaggtgcattgggccctaggtcagggcaaatcttgggaagataggcatccaggacagcagctactgccagctcttgctttcaaggttcatttcttccattcacacctggcccttatcactcttccaaggtgtatcggccacaatcagttctcacctgccctagaaggtctctctggtcttcctccctagttcagttggatcatgcacgggcaaataaatcctttttctccttctctagctcaaccatgagaaagttggaattttttaatgcaaaattttcctttccaagaaaaagagagaaaggatggaagaaagagagggtagaaaaagggactataggaagtggaaggaaagggaaaaggaaggaaaggctatacagacacacagaaacacagaaacagatatgttcagcaaagcgtagacgtcatacctcatttatcaaaagtgggtcacagatcagccttgccaatggattccacttgtaggacctccagtgcttattctcttccttgcttctgccttgaatgtctggacttggagagattaaactagttgtctgagaagagttggctgccatggctattccagaactttctcacctctcacacagcaccccggatctttaatccccttggccctgttcattccactctaccttgacactggttacagtaaagggactagtcttgaagatttagcatcactgggagaaaaatgaaatgtaatgaaaattagagtcagttaagaatggaggcatttttactatgacacagcaccattgtaagaaatctacccccgtgtgccaaggggttccatgctgctaaactcctcagtcagtgcatttgagtgctcttggcacagtcggcatagccagagcagcccagaaggtggcttcaaaagcttggtgtggtcagttcacagaggctacttgaatcagtctttgagccttgactgatctgagccaatcaagttcacagaaaactgacttctaacccaaatgccatttctcaatttctgagagctacgtgcagctcagttgctgcaagtaataaaaacaacagcaataataactgccttttattgaatcaggcactacatgtcataaactgttctaagtgttttaccaacatcaaccctcttgcaactaaaagtgtggtcccagaaccatcagaatctcaagcctcacctgagactttgggtcagaaactgcattttttaaaataaaattcccagataaaaacctgggttctagttctggctatacaaccttaatcttttctcctctgccttctgtctttgagtctcttggtctcattcagtttcaaggtcaactttaaaatctcccaattcccttccatagagaaagtgtttgattctctttggcgcccagagtccatattcaacaatgataaaacccactcagattgaccagaaggaagttctggttgatgattcttccttcagagacagcaggggctgggcagtcgggtcccttcaggtgaagggattacagagtaattagatatgattcaccakctgtctcaaagtagtatcttcttgtattttttatatttatatctgtaactgtagacagaaaggaaattgccctgaaagaaataactggccagtaagtaattaggactccaatggagtgaatgagccatgtgtcttatgtgtataaatgacctatttacccatgttgctaactttcatgtgcttataaacaagtagatgttaacacactcccgatgtatatgacaacctccgtggaggtcatatggaaacatgcgggccttccactacggcccygccgctgtgctgagtgttgtatgcatgtcttctgtacttctcaaaacaacctggcaaggtagaattataatcctcatttcaaagatgggaaaactgtgacttagaggctaagttgatgcccctacaaatttcaattatttaagaaggagactaaggagagagaagatagctggtgacttcagaccctttgttgttctgaaccccaaactttcctgcctcagtctataagcccaaggccctgtggttaggcttagtaggttcrattattttagcaggctgtttgaagaagatgtagtgatcccaatccacttccactcagaggcacaccaaagtatttgttccagccacataggatactttacctttgaggagtttagggaaattcatttctgctatcttatctgtgaagagtttagggaaattgatattctgctgtatcatctcctatcttccatggtgttttgcagtccttctagctgggagttcacaggaggttgaccagatggcctgctgttctgagtgattaattagagggttaagcatctagggagtatctaagcaaggatttgaacttgagtacatcccacttcagagcccatgcctctgagcactctcctttatatgatatgaagccctggggaggcctctggttggaggaagcatctgcagtgagtgaaggtgcccaggactctcaggcctgcagccctgatttgcacagtgagagctggcagcagtctagtgggcatgggggttcacagataccaggttctggcagtctgagctgtccatggtcagctgtgggggccaacacctccttcgtctgtactgctcagtctctccagagagaggccagcagctgttcttccatgtcctgttttataccaaatcagaaagaaactgacctcaggaaggaaatttgaggtctcccccagacctgtataactcatgtgcattttctttacatgtctcattgggctggcctccatcctcccacctcccactgccatcatggaaatcatctctcacaaggccaaatagcccatctaatcctctagactttggcctgtagtgggttccataaggactccccttggtctttcacagcataggacaatcaggagcttgttgcaaatattcacttgggtggaagtcaagggaaagcaatgagaatatacatgaagggaacaattctcaagacaactggtgggcaaatggacgcaaacttagcccaagacatgaaagaataacaaatacctccaagattttggtcctggggaaatgaaggttgtgctataaaaagaacgtgaaaagttagatccagtttggatatcttgactttgagatgctgggacattcaaatagactgccaacagaagcattaggattttatcggggtgagaggtcaaaaccagagtcacacatttataagccatctgcttaactgcgatggttacagcttgaggtgagctttcttaggatgagagaggggtgtgcaaaggactgagaactgtaagttcaggctgaaaggctgcaagggggccagaaatgagcaccatggctggagagttaagaagaaagccacagtaaggtagtgtcctgagccaagactcaaagaaggtccttggggttgggcttaaagttgtagtttcccaagccccctccacaaaacaactctatggtgattttaatgcacccagtgataatatcccaaaatgaatcactagacactttggcatagtcatttttttcctattagaagtgggtttgactggctagccatataaagaagaatggaactggaccccctacctctcaccatatacagaaattaactcaagatggattaaagacttaaatgtaagacctcaaactataaaagtcctagaagaaaacctaggaaaaactctctggatgttggcctaggcaaaaaatttatgactaagtcctcaaaccaaatgcaacagaaacaaaaacagacaaataggacttaattaaactaaagagctcctggacagcagaagtgggtttgactttgtcaataaagattttctacttaaatcgtcaaacgtagcttaaaaaattattaactgcatagttaaatataaaacagttcctatacgaccttgtttattgctagattagatacatcgcataggtggaatccacatagtaagtatacaatgagtactaaatgtgtaatagcatttggtcaacaagtggaacgctgcaaatctatgaccttctaggttttggtcccatttcagttgaaaagggaaaatgaacaattatgagttccctcataaattaaactctggtacccaaactacaacaaatggttaaaagcctgggctttggagtcacctgcatgtgattcagaattctgtcctcattagttaactacctgtgaatatttggacaagttacttaacatctctgagtttcctcatctataaaatggaatgctaattgtacgtcagccacggagttgctgatagaactgaataagatacctaaataaaatttttcaagtaatatgcttagatagctaagcagcacattctgtaaatgttagcaagtgattttatcagtatcattattactgcttccttttataggggaaaaaattccaagtccatatgtgtttttctcattaacttaagtgactttgcctacccaaagtctggtacaggttatttctgcaatagtatgttcaaaatcagaaatatcatgtactgtttttaagtcatagagctattttaattgatactcgtatcatcaaaggttgaaaatgtgataataacaaacaacaataaaaggtgcatgttcaacattactttcaaaatatatatagattttctttctttaaaacaaacataatttttaaaaatatcagattgtttatgatatgaagtcatggttacagtcacattgcagtttaccatctgttcttgtccaaaatacaggtccaagttagagccagaattgcaaaacgacagtaaatgtctgttggtctcgtacaaagctcttctcagttagaccatacttaaacatgtaatatattcatataaaaatgaatgtagagttaaacatgaaaatcaatcaatgcaatatatcatatgaatagaacaatagacgaaaaccacatgggcatctcaayagacatagaaaaaggatttcacaaaatccaacatctttttatgaaaaaaaacactcaacaaaataggaatagaaaggaacttccccaacctgataaagtgtatctatgcaaaacccacagctgacatcacacakgctgatgaaagactaaaaactttccgcctaagatcaagaaccaaaaaagatgtactgtcagttctagccagggcagttaggcaacaaaaataaataaaaggcatccagataggaaaagaagaagtaagactatttctattatcagatgatctactcaaagatagacaatcctaaggaatccactaaaacactattagaattaataaatgagttcagcaaggttgcagtgtacaagatctgttgtatttctacaaaccagccattaacaatccaaaaatgaaatcaagaaaaaaatccatttatagtagtatgaaaacgaagcaaatacttaggaataaatttaacaaaaaaagtgcaagacttatatattgaaaactgcaagatactgttgaaagaaattgttaaagacctaaacgaatggaaagacatcctgtattcatgaaatggaagatttagcattgttcaaatggcaatatctttgcaaagcaatctgtagattaagtacaatctctatagaattcaacctgtcttttttgcagaaatgaatagggaacccagaatagccaaaataatttttttaaagatttcttatttcaaaacttactacagagctatagtaaccaaaatgttgtgatacaggcataaagacagacataaagaccaatggaatagaacacagagcccaaaaataaaccctaacatatatggtcaaataattttcaacaaagatgccaaaaccattcaatggggaaggaacaagccttccagtaaatggtgctggggaaactggatatccatatgccaaacaatgaagttggacccttaccttccaccctgtataaaagttaactcaaaatgaatcaaagacctrcacagaagacctagaactataaaactcatagaaaatatagaggaaaagcttcacgacattgggtctggcaatgatttcttggatatataccaaaggtacaggtaacaaacaaaaaaatagataaattggaattaaaaactttcctgcatcaaaggacactatcaacagagtgaaaaggcaacctacagaatgggagaaaatatttgcaaatcacatatataataagagattaatagccagaatatatagagaactaaaattcaacaacagagaacccaacaacacaattcaaaaatgggcaaaggacttgaatcgatgtttctctaaagaaaatgtgcaaatggccaataagcatgtgaaaagatgcacaacatcattagtcgttaggaatattaacatcaaaaccataaagtacaggacrggcatggtgactcacgcctgtaatctcaacactttaggaggccaaggtggaaagattgcttgaggccaggagttcaagcccagcctagtcaacgtggcaagacccctgtctctattttaaatatatatatatacatatatatatatatatttatttaaaactataaggtaccacttcacccactaggatagataattgggggaaaaaaagtaagaaagaaaactagtgttgacaaggatgtggggaaattgaagccctaagcattgctgttgggaacttaaattggtacaacccctgtaggaaacaattggaatgtcctccagatgctaaacataggagttaccatatgatccaacaatccactgctagttatatacccaagagaagtgaaaacatacattcacacaaaaattttatccaaatgctcgtaacaacattagtcataacagccaaaaaatgtaaacaaaccaaatgtccatcaactgatgaataaacaaaatgtggtrtatacatacaatggaatattattcagttattaaaaagaaatgaaatatttatacatattacaacattgataaaccttgaaatcattatgctaagtgaaagaagccagacacaaaaggtcacatattctatgatcccattatatgaaatgtccagcatgggcaaatccttagggacagaaggtagactagtggttgtcagggcctgggtgagagggactgggggagtggagtgatggccaacatatacagggttacatgttttaggaggtgatgtacatgttctgaaattgattatggtgatagttacacaactctgtgaatatactaaaaaccatgaattgtacacttttttttttgttcttgttttttaaaaaatacagaatgcttcacaaatgtatatgtcatccttgcgcaggggccatgctaatcttctttgtatcattccaattttagtatatatgctgctgaagtgagcacaaattgtatattttaaactgtacactttagaaagttaaaaaaaaaagagagagagagagagacagggtctcactctgttgcccaggctggagtgcagtggcgcaatcatagctcactgcagtctcaaactcctgggctcaggtgcccctcccacctcagcctctcaaagtgctggaattatagatgtgagctactgtgcccagcctagaaaataaatgttacggtatgtgaattatatctcagtttaaaaaaagaatggacataaatagcttagcaatgttttagcatgaaagaatttaactctgagaatgttctgacatcttgatggggtgtgataataatgccacagtggaagggatgtgaatattaacagaaaaaaaaactgttttcctctacactcacaacacttctgacaccaaatgtgtggggttttccataccaagaatgtattctccgtctctcctgacaccaactgggcgtcttataacacaattctgacattttccacctggagctagcatcagacaccacgggttaagtaggggctcagtgccacaggattgctcccacttcagacaccaatcacaagtcctgggcctttggtatttctgaccaaattggctacaaactgggggtcttcatgactgtcttctgaggttcgatcatttgcactaatgggctcacagaactcagggaaacactttacttactttaccagtttatgataaaggatgcaaatgaacagccagatgaagaggtgcatagagcaacgtgtggggaaggaagtgtggaggttccataccctctctgggtgaccaccttcccagcacctccttgtgttcattcacccagaagctctgtgtacgccatagttgaggaatttttattgaggcttcatcacctcagcatgattaatttagtcagtcttcagttcctttcccctccctagagsatggtgggtggggcttaaacttccaagcttgtaatcatgccttggtttttctggtgcccagccctcgtcttgaagctatccaggaacccaccaaaagttacctcattagaacaaaagacactcctatcactaggaaactccaagagatttaggaccatatattagaaaaaaacatgctcctagagttttaggagccctatgtcaggaactgggagcagagaccaaatatatatattttttattatgtcacacatattcttttcatagagagaagagctgacgagttaagaacagcctttttttggtgttttttggggggcgaggtcttttttaaattgggggattcattagtacagtgtgtggcaggatgatacagacattttatatgagtaagtgaggtatcacttgggatcttaaaaaatattttctttttattatggtgggcaccacaccaaagggtgcaagttgcaggttataaaaacaaagcaaaagtttccatagcctgaaatggttggaaatatgactgagtctcctcgtcgagcttctaagatgaaaggccccagaattccctcttcctcttgcaaatgttgaattaatgatgataataagatggctgactattgagggctgaatgtgtagtaaacattacatgctttttcttgttttaatttccccatcatcactgtgacatacccatagttgtttagaacatacccaaggtcatgaagcaagtcaacaactgagctgggctgcgatcacacatacatgtgagtcccaagatcccactctacttctactctgggggagctgcccccaggagcttacagcacctgagatcctaaccacaccagtaagggaggcagtagagtatggaggcagtgccctggactgggagtcaaggtccctgagttctggtccacctttgccactaatcagctctgtgaccttgggcaagaggcttggacaagaagttcagaggcatggttttctgatgtgtaaagtgtggaaaattcatcccagctatccctgtagttccttccaactcaggcattcagcccaagtcctgcctcattcaccctctgatttgtacattgagactaaaaggaagaaaaccttcgagtcagtgtaggctggtgatttcaagatgctggactttggtgttgggctgatgtggcactggttccattatttatctcagtgtgatgttcagcaagttctttaattgtgtccccatctgctaatgggaataataacagcgtggggtgctgtgctgtctacatagagtggttgtgaggattgagtgagatctcggaagagagctttaatgcaattcctggcacattgtaagtactgagatgttatattattatatgttaaataatattataatttatttatgatgatgattgttgattgttataaaacagagacacagaatcctttcagaataattagtgtaggttagctcacccaggtcagactttggagctcagattgcctgcttatgctgagttttgaaaccattccatatctagaaggttagccatacctcaggactatgctgctgggtaagagggcatcagattgtcaccaaaaacactccagagttcccctcttgtaaactttgagtcagtaatgccatcttcccctatatgagacaacacactattataacttactgtgtgaattttgactcaastattcctttttacccaatgtaatcagaaatagatgagtgatcagtgacagatactgataaaacagttaattaatttgccataaaaagaacagatgagaaaatgctgctccctggaaatttcccaatgtgggtagggaatttttctctttcaatgttatttaacataataagcacagataaagttatatttacaagattgtttatcacggtgttattataatggtaaaaagttgtaaatataagagccatcgaaaatctaatattcaaagaatagcttcagagtcgggggaaaagtgcactatagagtttttttaagttagaaaaaaatgtgttctctgatcctaattttgtgaatattgtgtgtgtttatagaaaaatatgaaatgtaacracaaaaacattagcagagattacctctgggtatgagattattattttaaattttcttcttctttttctttttttttttttttttttgagacggagtttcgctcttgttgcccaggctggagtgcaatggcgcaatctcagctcacctcaacctccgcctccygggttcgagcgattctcccgcctcagcctcccacaaattttcttctttatacttctttatattttccacgttttcacagtgagcatgtttctttggaactggagcaaaagttgttttttttattaatggagattctgtcaacttttttctttttgctctaaggctcttctgtctggtagattgtttcatctgaatatgtcttaacactcagtctgaatatattgggttttttttctcttttaagtactgacttagaagtaatatgcttcattgattttgtgagctcatctttttcatgtaatgttcaggacaagccagacacatttgttgcaagacggattttgttactttgaaaaccaataacagataataagataaaatcaccaattaaccaaactttttctaaacccatcacttccctgttgaaagcaattttcagctcttcctgagattcatgtatttaagtcagctctgaatcttctataagaagaaatcaatattcttctctctctctctcttattttatataattagaattgtaccactaaaggactattaaatgtgcaattgagaatctaatacttaaaacaagtctacaaagttaattcaaagcaaaggaaaatggatagagtagatagaataagtttttcctactttcttctctaattgtaactttttttaaatatgctttaagttttagggtacatgtgcacaacatgcaggtttgttacatatgtatatatgtgccatgttggtgtgctgcacccattatctcgtcatttaacattaggtatatctcctaatgctatccctccctccttccccctccccacaacaggccccgatgtgtgatgttccctttcctgtgtccatgtgttttcattgttcaattcccacctatgagtgagaacgtgcggtgtttggttttctgtccttgggatagtttgctgagaatgatggtttccagcttcatccatgtccctaaaaagaacatgaactcatcattttttatggctgcatagtattccatggtgtatatatgccacattttcttaatctggtctatcattgttggacatttggcttggttccaagtctttgctattgtgaatagtgccacaataaacatacgtgtacatgtgtctttatagcagcatgatttataatcctctgggtatatacccaggaatgggatggctgggtcaaatggtatttctagttctagatccctgaggaatcgccacactaacttccacaatggttgaactagtttacagtcccaccaacagtgtaaaagtgttcctatttctccacatcctctccagcacctgttgtttcctgactttttaatgattgccattctaactggtatgagatggtatctcattgtggttttgatttgcatttctctgatggccagtgatgatgagcattttttcatgtgtctgttggctgcataaatgtcttcttttgagaagtgtctgttcatatactttgcccactttttgatggggttgtttctttttttcttgtaaatttgtttgagttcattgtagattctggatattagccctttgtcagatgagtagattgcaaaaattttctcccattctgcaggttgcctgttcactctgatggtagtttcttttgctgtgcagaagctctttagtttagttagatcccatttgtcaattttgtcttttattgccattgcttttggtgttttagacatgaagtccttgcccatgcctatgtcctgaatggtattgcctaggttttcttctagggtttttatggttttaggtctttaatccatcttgaattaattttcgtataaggtgtaaggaaggcatccagtttcagttttctccatatgggtagccagttttcccagcaccatttattaaatagrgaatcctttccccatttcttgtttttgtcaggtttgtcaaagatcagatagttgtagctaagcagcattatttctgagggctctgttctgttccactggtctatatctctgttttggtaccagtaccatgctgttttggttactgtagccttgtagtatagtttgaagtcaggtagtgtgatgcctccagctttgttcttttggcttaggattgacttggcaatgtgggctcttttttggttccatatgaactttaaaagtagttttttccaattctgtgaagaaagtttggttccatatgaacttaaaagtagttttttccaattctgtgaagaaagttattggtagcttgatggggatggccttgaatctatgaattaccttgggcagtatggccattttcacgatattgattcttcctatccatgagtatggaatgttcttccatttgttagtgtcctcttttatttcactgagcagtggtttgtagtgctccttgaaaaggtccttcacatcccttgtaagttggattgctaggtatttaattctctttgtagcaattgtgaatgggagttcactcatgatttggctctctgtctgttattggtgtataagaatacttgtaatttttgcacgttgattttgtatcctgagattttgctgaagttgcttatcagcttaaggagattttgggctcagacaatggggttttctagatacacaatcatgtcatctgcaaacagggacaatttgacttcttctttycctaactgaataccctttatttccttctcctgtctgattaccctggccagaacttccaacactattttgaatatgagtggtgagagagggcatccctgtcttgtgccagttttcaaagggaatgcttccagtttttgcccattcagtatgatattggctgtgggtttgtcatagatagctcttattattttgagatacgtcccatcaatacctaatttattgagagtttttagcatgaagggctgttgaattttgtcaaaggccttttctgcatctattgagataatcatgtggtttttgtcattggttctgtttatatgctggattacgtttattgatttgcatatgttgaaccrgccttgcatcccagggatgaagcccacttggtcatggtggataagctttttgatgtactgctggattcggtttgccagtattttattgaggatttttgcatcaatgttcatcagggatattggtctaaaattctgtttttttgttgtgtctctgccaggctttggtatcaggatgatgctggtctcataaaatgagttagggaggattccctcttttcctattgattggaatagtttcagaagaaatggtaccagctcctccttgtacctctggtagaatttggctgtgaatccatctggtcctggactttttttggttggtaacctattaattattgcctcaatttcagagcctgttattggtctattcagagatttaacttcttcctggtttagtcttgggagggtgtatgtgtggaggaatttatccatttcttctagattttctagtttatttgcatagaggtgtttatagtattctctgatggtagtttgtatttctgtgggatcggtgtgatatcccctttatcattttttattgcgtctatttgattcttctctcttttcttttttattagtcttgctagcagtctatcaattttgttgatcttttcaaaaaaccagctcctggattcattgattttttgaagggttttttgtgtctctatttccttcagttctgctctgatcttagctatttcttgccttctgctagcttttgaatgtgttcgctcttgtttctctagttcttttaattgtgatgttagtgtgtcaattttagatctttcctgctttctcttgtgggcatttagtgctatatatttccctctacacactgctttaaatgtgtcccagagattctggtatgttgtgtctttgttctcattggtttcaaggaacatctttatttctgccttcatttcattatgtacccagtagtcattcaggagcaggttgttcagtttccatgtagttgagtggttttgagtgagtttcttaatcctgagttctagtttgattgcaccgtggtctgagagacagtttgttataatttctgttcttttacatttgctgaggagagctttacttccaactatgtggtcaattttggaataggtgtggtgtggtgctgaaaagaatgtatattctgttgatttggggtggagagttttgtagatgtctattaggtccgcttsgtgcagagctgagttcagttcctggatatccttgttaaccttctgtctcatcgatctgtctaatgttgacagtggggtgttaaagtctcccattattattgtgtgggagtctaagtctctttgttggtctctaaggacttgctttatgaatctgggtgctcctgtattgggtgcacatgtatttaggatagttagctcttcttgctgaattgatccctttaccattatgtaatggccttctttgtctcctttgatctttgttggtctaaagtctgttttatcagagactaggattgcaacccctgcctttttttgttttccatttgcttggtagatcttcctccatccctttattttgagcctatgtgtgtctctgcacatgagatgggtttcctgaatacagcacactgatgggtcttgactctttatccaatttgccagtctgtgtcttttaattggagcatttagcccatttacatttaaggttaatattgttatgtgtgaatttgatcctgtcattatgatgttagctggttattttgctcgttacttgatgcggtttcttcctagccgtgatggtctttacaatttggcatgtttttgcggtggctggtaccggttgttcctttacatgtttagtgcttccttcaggagctcttttagggtaggcctggtggtgacaaaatctcttagcatttgcttatctgtattttatttctccttcacttatgaagcttagtttggctggatatgaaattctgggttgaaaattcttttctttaaaaatgttgaatattggcccccactcccttctggcttgtagagtttctgccgagagatcagctgtttgtctgatgggtttccctttgtgggtaacccgacctttctctctggctgcccttaacattttttccttcatttcaactttggtgaatctgaccattatgtgtcttggagttgctcttctcgaggagtatctttgtggcattctctgtatttcctgaatctgaatgttggcctgccttgctagattggggaagttctgctggataatatcctgcagagtgttttccagcttggttccattctccccatcactttcaggtacaccagtcagatgtagatttggtcttttcacatagtcccatatttcttggaggctttgttcatttctttttattcttttttctctgaaattctcttctcgcttgatttcattcatttgatcttccatcactgattccctttcttccagttgatcaaatcagctactgaggcttgtgcattcatcacgtagttctcgtgccatagttttcagctggacttctgtgcattggttattctagttagctattcgtctaatcttttttcaaggtttttaacttctttgccctgggtttgaacttcctcctttagctcagagtagtttgattgtctgaagccttcttctctcaactcgtcaaagtcattctccatccagctttgttccgttgctggtgaggagctgcattcctttggaggaggagaggcactctgaattttagaattttcagttttgttgttctgtttttttcccatctttgtgtttttatctacctttggtctttgatgatgtgacgtacagatggggttttgatgtggatgtcctttctgtttgttagttttccttctaagagtcaggaccctcagctgcaggtctgttggagtttgctggaggtccactctggaccctgtttgcctgggtatcagcaccagaggctgcagaacagtggatattggtgaacagcaaatgttgctgcctgatctttcctctggaagttttgtctcagaggagtacccggccgtgtgaggtgtcagtctgcccctactatggggatgcctcccagttaggctactcgggggtcagggacccacttgaggaggcagtctgtctgttctcagatctccagctgcgtgctgggagaaccactactctcttcaaagctgttagacagggacatttaagtccgcagaggtttcttctgccttttgtttgccctgcccccagaggtggagtgtacacaggcaggcaggcctccttgagctgcagtggactccacccagttcgagcttcccggctgctttgtttacctactcaagcctcagcaatggcgggcgcccctcccccagcctcgctgccgccttgcagtttgatctcagactgctgtgctagcaatgagcgaggctctgtgggcgtaggaccctccgagccaggcgtgggatacaatctcctggtgtgccatttgctcagttggaaatgcagaaatcattcatcttctgtgtcactcacactgggagctgtagactggagctgttcctattcggctgtcttggctccacccccctctaattttagctttaagtaacttacaaaaaaacagtattaccatatatattggaaaaaaatctgaacaggccaaaaaaagctgaaccaggtttttgagcatgagaagattgagattttgttgccttgaattttttggatatcgttttgatctttttttttttgagacggtgtcttgctctgttgcccaggttggaatgcagtggtgccatctcagctcattgcaacctccgcctcctgggttcaagtgattcttgtgcctcagtctcccgagtagctgggattacaggtgcccaccacccacctggctactttttgtatttttagtagagacgggatttcaccacgttggcaaggctggtctccaactcctgacatcagttgatccaccctcctcgcctcccaaagtgctgggattgcaggtgtgagccaccatgcctggctcattttgatctattttcaaaagtactgttatatgtgcattacaaaaaagttgagcaaaacagaactgtgtaagttatacactattatttgtttggtgttcactggacagatatgcaacatatacctatatttacaaaattattttttacctcaataggataatattccattgttctcaacttgcttttttgtcctaaattttttgtgaaataaattcagtttcagtacatatacatttacctcacttggtctatatttttgcaagagtttctgttggataatatcctagaagtaagatttctagtacaaagaatacacgtttaaaattttgttttgsctctcaagaaagcttgtgcccatttcaccacccctcacatggaatgagaatgaaagataaagtttctgaaacataggtacatggagattctgcygggttttgataagatataatttaaaatcatgatcagaaggttgctcagctggcttggggaggagatgccttctaaagtcagaatcctgtaaggtattcctgcctaactcttcaactccattctctacccagaagagaaaaaaggtgtgtgtgtgtgtgtgtgtgtgtgtgtgtgtagaaatatgtctcctctgcaaaggatccctcaaaatgctgagtgtaacagagggcagatttttggagtcagagctgcaattaaatttcagccctgtctctcaatagcagcttgtctttaagcaaaatgtttaacatttctgacctgttttttatcgtctatagcaaggggataatcacaccaccttacagggttcactgtgagaattaaatgtgttacttaacacaaaaggctaataaatggtgaggactaagagctcaattaatggcttccattgagacatgagaaagggtgattatgaccaagctacgggcaccttggagggtaaagttttgcccacttttgcagaaaaatatgagacaatcactaacagtctagttaagatatgctatgtgggccaggcatggtggctcacacctgtaatcctagcactttgggaggcaaaggcaggtggatcacctgagggcaggagttcaagaccagcctggccaacatggcgaaaccctgtgtctactaaaaaatacaaatattagctgggcatggtgacacacgcctgtaatcccagctacttgggaggctgaggccggagaatcgcttgaacccgggaggcggcggttcgtgccactgcactccagcctggatgacatagcaagacttcatctcaaaaaaaaaaggtatgctatgtaacactacacctttcccacctacatccaggaaccctctttgattttaaccataacaattttatcaccttctcatatgcatcattactcatttactatgcttattgtttatgtcctttcctagggtgttccatatgaacaaaactttattcttgttcactaaatttcaacatcagggtagctgaaaacaaagcctggcacatagtaggcactctttttttttaattttattattattatactttaagttttaggggtacatgtgcacaacgtgcaggtttgttacatatgtatacatgtgccatgttggtgtgctgcacccattaacttgtcatttagcattaggtgtatctcctaatgctatccctcccccctccccccaccccacaacagtccccggtgtgttctcattgttcagttcccacctatgagtgagaacatgtggtgtttggttttttgtccttgcgatagtttgctgagaatgatggtttccagcttcatccatgtccctaatcctgtagctgggattacaggcacccactgccgtgcctggctaattttttgtatttttagtagagacagggtttcatcatgtttgccaggctggctttgaactcctggcctcaagtgatccgccagcctcggcctcccaaagtgctggaattacaagagtgagccactgcgcccgacctagaatgactattaactgaagaatatgggactgagagcaaacaatgaggtggataattttattcaccagaaactttctaaaaagagaagagccacagtgtccagtgggttttatgaactttgcttcatggatcatgaggaaggaccaggggtcctagagctactcggttttaaatccatcttccagtggcccatgttgttagagagcaaggcccagaggtgagttacagctgagcactagggcaatgtgtcctatgaagaggaaagaggacataatagggagagctcagcaaggatgagggaaagtgggaagtgtttttaacagctgctaaaagtatggaacttagaagacaaagaattatgccccaagaagacttctgggatgttttttgtggtacacaatatgaaatccctgggtattccagctttaaggaaacctacatgaaaggttgacattgtttcaaagcttctagcattcaatttgtgttcctttgagtgtgatgtcatgcttatactgagatacatgcttatrctgggaccgccagatttattagggttacactgaccaggtttctttttattctttaatttatttgggcctctcttattgctgtttcccaccagtcactagacttgttattcattgtaacagcatgtgattcatatctcaaatgtattgcagtttcccatatgacatcttatcttacattatttgcatattgtattacattatctcttctcttatatattagagaagtgactggagttatttttatttcctctgcagagtgctatagttcgagatcatgtcttagagttggttacttctgagaagagttcttatatttggctaattccactgtacatatattatcagtatctagaaatttcrgttggcctctttcatcaagccacattctgattcaattttcaggaaacttagkcagtttctaaactattcagaaagctggagggggaggccatctagggtagatttaagcatcaacctgattttaatttttttttaatatgagcttagatagaaccaaatataatttaatagtctcyattttttgttacagaagatttttggtaatttggtccaaaagatgtattaaaatgcttagagtcaaccaggaccaacctggtttccatttttctgtcccatgtcctcattggtttagtaatttggccagagagcatggcctgattttttgatcagaagatatagtcaccatactcatggaggaaggaatcagggactgtgggttacctggtatagaaggacatagtgaaggaaaagatagagaggtttggagtttaaaggataagggatgtcgtttttgttagtttttaaggaaaaaggaaactgaacatttgggtatgcaaagaagtcagtagaaagtgagggattaaaggtggagataaccactgaagcaagttctggaggagacaaaggtagatttaatcacaaacctgggtgggccttggagaggaggaaacacatgccattctcagggaagcagaagatggaagaaatataaggtatctgaattgaaggagtttctgacatgacctacactgtctcagcatagttaagaaacagtcgaatgactgtgaggaaagcaaacgcaggtttgggaatgtgagaagaatagaaaagaggatagtgagttgtttaggaaaaaataaataagtttgtgtcaactttgagtcaccctgagggcctagctgaagttagataataggaattagcacccgccccatcactaagtagcataattgtcagtgtcatcatacagcagcccagaagccaaggaatggatggtttgagtctgcccagcactggggattgggacatgcctgtgatggaaagtcaagctgtcttcttagggaatctctggctggtgagtgccatctaaaatgcttatcgtagcaccagacgaaggccaaggaactagaagtttgctgaggacagagaaattttgttagacagaataaaagggaagaaagaagtcaaattcagggatgatgacttcagagtttaataatacagacatgaagcagtttggagtgataattccaaagttttctgcaatggagatttagaaaagagtcagagaatactgaggtctgaatgtgaaggaagtcatccttacgaactttgctgttacccagtgtccaggctggatgacaggtatttccaggaagagaatgagtgacatgaatatgtgacatttccccaactcaggtgaccacaaaactgtttttcttgtaaatgccagtattccagagatcattctttggaaaactctgttctagggctcatcagagactttccgtttgttgaatgaatgaattacaggtaagaagttaagaggcagcctgggacagtgtcaaaataaagagaaggcaagtatgtggctctaattacagaaatcattttgagcctaggcatcccctactctggtacttccatctcatgaactgccaccttctctcctgcatccctctgtcaccttcttgctaccagttgtgggccaggcagttaagatttatttatttagatacatctccttattacctattcctttcttatgtttgtagatggttctgttcttgcaaactcccaaatagatatcagtgaaatcaaagccactctttgagggtgacaggttggcagagaataccatgacattttgaaaccttttgtccagagagtccttgggtccccaggtgtcctgcctatttacacataatatgcatatacatattcttcaccacacagccttctttcctcttccatttaagttggctatgcttatacctaccctcatttcatgtcattctgatggtagttagcaaaggaggataaggaagcaaatggtattttacaaagtatcatagtaaactggttggggaattatgtgctagattaatgctgctgctgaaaatggaaaaccaaccctaccaccaccaccaccgccactccacccccacctcattaggtgactagaagacaaataggacagatatcagaaaggtctttgtaaaaagaaaaatagtacagaactcttcactaagcagaggatttggttaaagaacatacaagatttggaatggctctcaagtaaatatctgttgcaggggacaccagatttgatgtaaccacgacttctgttgctttgttttagaacgccagccaggcccctctgtggccaattccaatgccctcccttcaagttcagctgggatcagcaaggagctgatcgatctgcagcctctcatccagttcccagaggaagtcgccagcatcctgatggagcaagagcagactatttacckcagggtcttgccagtcgactacctttgcttcttaacacgggacttgggcactcctgaatgccagagctccttgccctgcctcaaagcatccatctcagcgtcgattcttaccactcagaatggagagcacaatgcccttgaagatctggtgatgaggtttaatgaggtaagaagccactttttgatgtcttggtatttgactcacccgtaagtgattttcaagcatacctccccttctaggtttgtctgttcctgatgtgttcatttcattctgtcttgccacttccatgatggctgtttttctttccaggcaaagagacagacatcacattgcaatccttcctctcactgtaccccaacttgcccttaagcctaattgatctcaactccattctattgcattacccagtccaccaatcctagtccctttgggcacccagaatgccaatctccaaccccttcctctcccctaccaacccctcattcccaaaggtgcttttaaaaccacatgtctcaattttgagttttgacagcatgatccctgaccacattcgtataaccaaccccctgacccccttccattattaggactccctcagcagaaacacctaggtcaccagagaaggcaggaaacgtggggcaattcattgaggggcagtgaatcacctcggttctctctctgcatcccctgaagatcctcagccccagaatatcaatccaaagcctctgagaccacattagaagccagttctgaagaagacaggtgtgactggagtctgggaatacttaggacaaagccattgcgtgggggtctagggactcactgggagatcaagagccactggctgacatccctgtggccctgggatagggaggagcgtcaggaaagagcagggagtctccatgcagtactggggttgggcggactgcactcttgggcttaaaaggcactttctcttagtaatgtaacccacacccagagttttctattctacattttatgttttagatttaatttcttttgttttgtgtattcaatcacaaaattttaattggtatgtttgttggttgttagttggctgaacacagagtagttgcctattttggtcatttagtaaactctacctaaatgctaacaggatattcctattctgagtcatatatatctctgattgtctgaggatctgtcatcctgtgttacataaacactttctggcaaggtgcggtggctcatgcctgtaatcccagtgctttaggagggtgagacaggaggatcgcttgaggccaggagttcaagaccagactgggcaaaatagcaagaccttgtcagtacaaatttaaaaattagctgggcatggtggtgcacacctgcagtcccagctactgtggaggctgagaccctctaaggatcccttagcccagaagtttagaggcttcagtgagctaggatcacgtcattatactccagcctgggtgacagagtgagacaccatctttagaaaaaaacacaaaacactttctaactgtagctcactttgcagcctccatagcttgccaatcaaaatcctgatgatggttgtaaatgtcagtgaccatgataaggcccatgaatacaacgagtgttagaggctgagctcaagcggttctgtatccagacatgtcctgaacaccagtctatctggcactgttgtgctaaccattttatatgtaccacttacttgctccttacaacaaccttgggagacagatattgtcattagccctatcttatcaatgagaaactgaagtatgtggagatgaagttattttcccaagattacacaagtggtaggtggcaattttggtttaagcccacaaagtcaggccctgggctttgaataactataggatgctgcttcccacctgcagcaggattgcactggggggtggtgcctgctaaaactgcagattcctggtcccacccccaaactgagtaagacagaatctctgggagtccacatgagagcttgcaaatgtcactgccccaaagttgtttttaaaaataaaactcctgatgttcttgattttccttactgataaaaatgggatggaaaaatgaaagttccagtaaactgagtgattttattagtggatttcactgtatttcatgaattattttaaacttccagatctacccactctcacatccttaggaccctatcttgtctttatttttaaatttcgacctgaacttaaaagtgaattgccaaaacttttaaaatctaattttaaaytaaacttggatttcttccattcacttccataaccttgggaatcaaagacgaatcagtgatttcactaattcagagttagagatgatatgacctacagctgggtagaggcaggctttggactatctctgaaaatagtttagctaagcaacttcagaacgtaaacaagatttctgggaaaacacttaaactacttaagagaacagtctgtttcaagtattctcaagcatctattttcatacaaattatgggtatgctgattaaaaatcagtcttacatagtcagatcccaaatgatctctactggacacgactggaatagctaaattctagttcttttgtataccttaaagtagaaaagttccattacatcaaaagagaattttcaaattcagatttttcacctattttgagtgaccttgccttgaaattagcatggctttayatactgtaaagaaaaggaagaaatggagtttgcatttatttaatagatgctctggactggacattttcacatttcttaaaatctcattcagttcttatgacagttgtcatcaaccctgtcttgcagatgaggaaagtgaagcttaggcaacaaaataaataatgacagtgttggattatggcccatagagtaaaataaatattttttaatccataccgatataaatacatcagtgtggtggggttggggagtagggacagcacttacttatagaaaaatttcaattaataaatgtagaaagaatgagaaaaatagaaaatcatcattagaatactacagtaataactgttgcaggcaagaactactgatgaattctaaaattattgggcaaaagtaagtttgatgagaaataggacatttgcaaatagtctcaaagcatctctccacaaggtatttattaatacaaaggggaaaatagaacagtggagaaacccggtagacactggcttgaccaagtgatcaaggctaacatgattagtaatgagacatatcaacatatgcctcctgatatgatgccctgagaaaggcaggacttcatctctatagtgttcttgccaaaaacacaccacataaatctagcaatgaaaaaaaatatcaggcaactctaaattgaaggacattctactcttcaaaagcatcaaggtcataaaaggtaagaaaaaattgaggaactgttaaaggctagaggagaccaggagacatgacgactaaatgcagtgtgggatcctagtggaccatggactagaaaaagacattaatggaaaaactggagaaactctgaggctcatagtttagttagtatgattgtatcaatgttaatttcctggttttgacaattgtgctatgattatgaaagatgctaacattagaggaagctgagtgaagggtgtacaagaactctcygtactgtcttttgcaacttttctgtaaatctaaaattacttcaaaataaaaaaaaattgtaagcagtgagctcagagagattgagtcacttgtctaagtagctgagtggatatcagaatccagatctttcttcaaagtctatctcttctcacccagctgcttctctcttgttaaattatcaggttcaagtctgtagtaaaacctgacttgctaattgagaatttcattagccttgggtctcctttccctcttccctccctctctttctatttcttttcaaaatctcctgtgtgtctatcttttttctacttctctttctgatttttatccagtttcccattatctaggttcctgccattactccytcattcattcattcattcactcaagagatttatttatttcaattttttagttttaatttttgtgggtacatagtaggtgtatatatttatgggatagagaggatattttggtacaggcatacaatgtgttattacatcagagtaaatagggtatccatcatctcaagtactgatccgttgtattaaaaacaatccaattacactccttttgttacttttaaatgtacaattaaattattattgactatatcactcttttgtgctatcaaatactagatcttacatttttttctgactattgtatgtacccattaactgtccccacttcctccctcactcccctctactacctttctcaccctgtagtaaccatccttctactttctgtctccatgagttcaattgttttaatttttagctcccacaaataagtgagaacacacagaggttatctttctgtgccttgcttatttcacttaacataatgaccttcaattcaattcatgttgttgcaaattacaagatcttattcttttttatggctgaattatatatatgtgctacattttcttatctattcatcttgttgatggacacttaggttgcttccaaatcttggctattgtgaatagtgctgaaataaacatgggagtgcagatatctcttcaatagattggttttctttctttggggtatatacctagaagtggggttgcgagatcactgaagacatacttattggctgggcatagcagctcatacctataatcctagcaatttgggagcctgaggcaggcagatggcctgagcccaggagtttgagaccagcctggggaacatagcaaaacctcatctccacaaaaagtacaaaaaattagccaggcatggtggtgcatgcctgtggtctcagctacttgggaggctgaggtgggaggattgcctgatcctgggaggtcgaggctgcagtgagccaagatcgtactactgcacttcagcctgagcaacagagtaagtccctgtctcaaaaaacagacacattgagcacctactgttctctcgtcttctctttttttccattggcatgtcaaacatattttttaaaaataagaaattagcagtatatggtgaaaattgatgttataagcccatactttgattctgccaaaattggatacacaaaataaatgcactttcctcagtggaaagatgtatattccttggaatgttatagtatcttaaagacaagaaagagaatattagctccattgccggtgctagtcacttggggtggggggaagtgaatgcatttactcgtgcatccattcagttaatccaggacttcttagaagcagtgtactgtggtagatatgcactaaggaaagtaaatagcagtctgccagaagctatgagacatggacacaaatatctaccaaaaaaggcagaaagtaagtgcagtgagagtggcaccaacagagaaggctggggtgtccaggtgggtgacaagagctcattctgctgagccctcgagtctggggctgggtcttgagagatgggaggaatagagggggaagttcatggaaatggaaggcagtccagacaagaagacaatcagacagtttttgtcatgagcaagactcatggtttagggaggcagcttgttccagattgcccccagaaccacgcttatgagctagaagtttctatattctaacaactctctacacaatgacttaactgtaatgtgagaaaaaggaagaarattcctaatactttttgggcagttttgcataatgtttattcttaggaaagcatggttaaaatgcaactcaaagtacgaccatgaaattactgaaaaggttcagcttacattaatgaaggcctggagataaatcatttaaaatcagtttggattgtggcttggaagcagtgtttcctccccattcccccttctcatgccctattagactgtgatgcacacactagagaaacttcttaaaggcagtctctctttatccttgaaaagaaacagaagcacaaggaggggtcagtcctcaggcagagctagtcaagatttgtgttgaacgtaggcttcatcctgctttgcttagtttgagagacaggtcttcccgaactttcttaatctggacacctctctgtagtcatattcctgatctgaagctcttagaagccagtgttctttctctctcctttcaggtggagcagcctcacttcttgaccacccacgaaatctctcactttgacagtctcaaatcatattgttcttttttcctatccttcatcttcctgcatctagcttatacctctagcccacattccttatgaccttacttttaaaaaattcctcctaaaataaattcccaagccctttatcttttctagaggaaatgcagaggcatttttatagacaattttaccaaaaagattacatactttagtgcatgcaggtgaaaagagaggagaggcaaatcgagattgcagggcatccttcctcccttcactacctctcccctctttcctgagaagcactttggtggaacgtggagtgagggggaggatcttggcatcacagttctgagttgctagttctcaaacttcatgtctccttaatatgtcctttgctcttgttgtgttgttcaccaatgatgattttgggggttggaacccttcattgcatctatagctggtccttgggatcgatcacacaagcaaatttttgacttcataacctgtcaccacccacaccacttccaggcactcttttgtgtaacagacagttgatatctctggctrgaaagtgattttcaaggggccataagcaggttcacttttttctatgtcctaagagggcagtttttgcttgttgggtggttcttggcaacaccattcagcagggcttctctttcagaccagctggtctgagggtaggtcatgagtcctagattgagacccccagttctattgagaccccagcagcttctacaaggcctccatgtggctctgccctgggtgtcttttcccctccccaattctgtgtggtcaacctgagcattcatcagctagcttccctgagccatgcaatcttgggcagcccaaagtgacaatcagttgttgcttgttccttctgtccagtaggtttcaccagatgtcagttcaacagtttaaaggccatcctctctgtaaagaatgccaagatgcagcttaacttcctggtaaagagtagtaagaataaataaaccatctggtcaaagaagagccgtttgagctttcagccagaattccttatatacttcatagcaatgatgatcgctttggcagattccagcatctaaaagcctgtctggtcatagctatggaaagaccatttcagcacagtaagcagaaagcatagcatattataaygatgtgaggcagtgtcatgtccaaataggttctttcacttgaaatgttttagaaaaaatattggtttttgaatttgtatattgaaccatgtttagaaacgtctcaatcaaagttttccccctcttttataaaagcagacagcagagcaaatcatctgttcagggctgctttacaaacttccttcctcaaatctgaacactcacaggataaactgctgataaaaaccccctcagggtaagggaaatttcagctcactttggaaaatcaaatttttccttgacaaagcacatctcccctctcagagcagataytgtattctttccctggaacatttcacagcacattccaggagtaacagatattttactccagaaatttcttgactaaaaaaaatacagtaggcaaataaactacagaaactcagctgtgcagggcggcatcctaagtgcaaggttagctgtagatggcacttccatcctgaagctgattgacagcaaatcatgtctcatggttcctggcagtcagcacccacacagggctttcctcacccagagtaacacgtagggctgagaaataagaggggcatggaggcttgacatcattcaggtgcagctctggagtcaggctgcctgggttctgatccaccattcccagctgtgcaacctcaagccagatacctaacccttcatctttatcttatttttattttagtttagttttttttttttttttttttgagacagggtctctgttgcccaggctggagtacagtggctgatctttgctcagtgcagcctcagcctctcaggctcaagcgatcctcccacctcagcctcccaaatagttgggactacaggtgcacaccacctcgcctggctaatttttgtatttttagtagagatgggatttcactgtgttgtccaggctggcctcaaactcctgagctccagagatccacctgccttggcctcccaatgtgctgggatttcagacgtacgtcaccacacccggcctaatctctcatctttaaatggggctaataatatatctaccccaaatgctttatatgagtattcagagaaatgacatgtttaargcacttatcagggaccaaagacacagtagtggtttgatgttagttcccmaaaaaaaaaaaaaccactaacataacagcattattagaataactaatgataataaattccgttttttattattatgatcacccccacttaacaggtgagaaaactgagacacagagagactaaatgaatgacctgtggtttcagagstgacagttgaacccagttgttctggcttccagagccagcattcttggctcatctgcttgatacttttgaatcaaaagctgagggaccttctttccaccactcggttctcttactctaaatgaaaccattttcctcgcaataggattcagaatttttttatgatttcaatatgtgtaaaaatgttgacctgtttgttgattttaacctatgtgctgacttcctgatattgtaaatgcagcatctcctttgaactaggagattgtggcccttgaaatagggaggacaacagcatctcaatgtctgagaatattagagcatgggggataatttatcatttccacagcaccaggcagaaggcagatttcagatttttggcttttcaagttcccttcttggctctgaggtttcctttggtgtgaaatgcctgagaaagattgcccccaaaatctaaaggagtttatttatattcctctcttgaccacatcatttctactacatttttccacctctctgtctgttcattcctattttacatgaaacccacacccttagcggtgatggtgctatgatttgaatgtgtttactccaaaactcaggtgttgccactgtggtgggattaagagttgggacctctaagaggtgattaggctgtgagggctcctccatcgtcaatgggattaaggcccttgtaaaagagacttcatgcagcattcagcttacttgccctttcaccttctgccatgtgaggacacagtgtccccttcagaggatgcagctgtcaccagacaactgaaattgttagcaccttgtggagctcccaggctcagaactatgagaaaataaatttccactctttatacattacacagtggtattctcttatagcagcacaaaatggactaagacagatagctttgaaattcaaaatcttaagtcctacctgtgctcccagttggggcagcaggaggaggcagtgggaaggggctgccttgcaccttgtcagacaggactggcacgcatgcactcattcttcaaccatctaatgtgacttccttgaacagtagttctcactgatcagcggaatgaagacaatgggaatcagaatatttttaaaatgtgcacgtatccgtagcccacccccaagagattctgcctccgtggatgcaaggtggggcccaggcatttataattttgaaaagctccatgggccgggtgcggtggctcacgcctgtaatcccagcactttgggaggccaacatgggtggatcacaaggtcaggagatcgagaccatcctggccaaaatggtgaaaccccgtctctactaaaaaatacaaaaaaaaattagccgggcgtggtggcaggcgcctgtagtcccagctactcgggaggctgaggcaggagaatggcgtgaacccaggaggcggagcttgcagtgagccgagatcacaccactgcactccagcctgggtgacagagcaagactctgtctcaaaaaaataaaataaaataaaataaaataaaaagataaaaagctccatgaaggccaggcatagtggctcactcctacaatcctagtagtttaggcatctgaggcaggagggttgcttgagtccaggagttcaagacaaaccagaagttcaagaccaacatagcaagatcctgtatctacaaaaaattaaaaaattgacagggcatggtggtgcatacctgtagttccagctactggggaggctgaggtgggaggaacatttgggcccaggaattgaggctgcagtgaggtaggatcatgccactatactccagtctgaatgatagagtgagaccctttctctaaaatttaaaataacaaaaaggaaaaaacataacttcacgagataacgctgatgctaccaacacaccaatagttgagaatcactgctctagaacatcagtcacagcagtactcaaagagaacaaagctgtatcccaaagcaaataggaggaaaatgtcttccttccttttctttctgttttttttttttttcattttttgctcatagtactgccatggaggacttcattttgaaacaggaggaaaatggtttctatctttggggtcatccattagtgcagatacttgagaattgttccaygtacatttaaataaatgtaatgggttgttttccctgccttcatttcttttttattttattttattttttgagacagagtctgactgtcacccaggctggagtgcaatggtatgatctcggctcactacaacctccgcctcccaggttcaagcaattctcgtgcctcagcctcccgagtagctggatcacagatgtgcaccaccacccttggataatttttttttttttttttagtaragatggggtttcaccatgttggccaggctggcctcaaactcctggccttaagcaatccacctgccttggcctcccaaagtgctgggattataagcctgagctaccatgcctggccccatcttcatttcttttctttcttctttccttcattccttccttttcttctttcctttctttctgtatttttttcattgtttgctcatagtactacaaaatggaggatgtgattttgaaacctttaatatttagactattttattactataataggctatcttaattcttagttctccttcttaaagctcacattgtgtctctagaatttaactggcccagaaagttaactgtcaaagccattgacttattggagacatgtttaattctgttttaaagcaggtatcagttaacacctctgtcctgagactggtagaaacaataatggatscggtggaaatcagcaaatagatgaataggaattttgacctatgtgagcagtgttattactattaaaaataataaacatgacccagagaagcactgcagcagttcctcaaggcctttgccatcagatcacttaaatgactctgaacactgtgggaaagatcaggtcagctttggtcagagattaggattttgagcctcttttcaggacggcattagctgaccctattaggatgtttaattctgctctttgaaaaaccacttttagagatttttactgcacatgtgagagccaaggaggaatgtatttatgctttactgaggatctgcatttgcccaaaagatttaaacattcataaatccaactgccttctcaatgcctcaccttggctttttttgttcaacaagatttcagtaccaacttttgtactaaatgctgttttgtgcatggggaatatggcacagaacaacacagacaaagctcctgccccactgagcttacattctagtcatgtctaaaagacatctcaaatatggccaaaatagaattaacttctccctccacaccattcacataccatccaggaccttcccccctcacccagtgctgctgccctccccatctcacttagcagcttcagtgtcaactgaagtgttcaggccatcaaccagagtttgattgatttactctttcctcaaaccctgacatctaaactgtactaggctattcttgcattgctatagagagatacctgaggctgggtaatgtatgaagaaaagaggtttaattggctcatgcttctacaggctttacaggaaatgtggtgctggcatccacttctggtgaggcctcggagcttttactcatggcgggaggtgaaacaggaggaggcacgtcatggggcaagaatgagagcaagagagagaaaagggggatgtcccagactcttaaaacaaccagatcttgagtgaactaaatgagtgagaacttactcatcaccaaggggatggcactaagctattcataagggatccaccccatgatccagcacctcccacgaggccccaacattggggatcacatttcaacatgagatttgaacagggcaaacatccaaaccatagcataaactatcagcaagtttcatttgcattacttgcaaaataccccctgaattggcctattccttagtatttcatctgctaagctaggttgaaaccagccatcattgcacttatctccagcactgctttcatgctgacaaatgctataatccattctccacccaacaatcggggtgatcatttataagcataaaggtaactcccctgctaagtgtcccttcaacggcccccctttgcgtttgaaataaaatccaagataacaagaccctgcatggttttgctcctgcctacttctccaacttaactttatttatttatttatttagaaatggagttttgcycttgttgcccaggctggagtgcaatggcacgacggtcagctcactgcaacctccacctcctgggttgaagtgattgtcctgcctcagccwctctagtcgctgggattacaggcacctgccaccatgcccagstaatttttgtatttttcgtagagacaggctttcactatgttggccaggctggttttgaactcctgtccttaggtgatctgcctgcctcagcctcccaaagtgctgggattataggcacgagccaccacgcccggccctccaacctaactttatacactcacccctctctctggctctgttttagccacacaacctttcattctgttccctggacatgccaagttagttttctgtacatagcctctgcagttgttgttgcctctgcaaaagaccttctttctcagaccatatcacagctactgccttcccttggtcatgtcttagctcaagagccagggaacttgacttgcttatttttttttttctatctccttaggctagaaacttttctaacttgttcattgctatatctctggtttttatgcatggtaccatctatatagtagatgtgtaatagtattttatgaataatgctaattagtgtaaataattatcctattaggtactgttagaaatacaaagaaaagcaagacatgggtcattttgttcgaggaatttacaatctagttcaaggcatacaagacataaaataatgaataaatatacacaaaaggggataaagcaatgccaggcatgaactattgtgtaagagatcatggttagagaagtgccatgagttagtagaaagaggaaagagtataattccatcattaagtttgggcatacggccacagtggctcacgcctgtaataaccagcattttaagaggctgaggtggatcacctgagatcaggagtttgagaccaccctggctaatagggtgaaaccctgtctctactaaaagtacaaaaaattagccaggcatggtagtgtgtgcctgtaatcccagctacttgggagtctgaggcaggagaatcacttgaacccaggaggcagaggttgcagtgagctgagtttgtgccactgcactctagcctgggccacaagagtgaaactccacctaaaaagaaaaaaaaatgtctgggcatgaacatggggttctgccacttactgtgggaccctgggcaagtgagtgatttaaaaaacagaatttagcttcatatttctcatctatgaagtgggataatttaattaatttcacatggttatggggacacttaaacaagataacatatataaaatcaagtacaggataggttctcaataaatggtaactagtgtgatttgtgcagaatgagagataaagactgtgcatgccatgagatttgaagagggagatcacacaggcacatctccattgaggatgaccaaaggcttcagagctttggagattgggaaggcttttgtcaggcacagctctgaactttcacactgatgaagttttggaggtaatgtggactcatgtcattcaccaaatgtaagaatcccttccttgcagcttcttgcccagcttttgctaaaaacttttgaagacggacttcgctccatttcaacaaactcattgtgaggatgcggctcgatttgttttaacagtcttccttaaaacaggcggaattctttctccttacaaattccacttgtcagtccccaggaggaatagtaaaaattatatcttcctttggtttggttctcttgaggctggacattccccatatcttcagaacttacrtcatctggcaaaaggtaaaaatggggcttcctcatctgttctgaacagtgagtctcttccttctctcaattgggtaattctccgctcttaattcctgctaaattaattgcttttctctattagctctaattattagcctggttgatgatcaactaaaactgctagacttttatcatataaacagccatcaagctcatcatttctctgcataggttgtttcatttattattttctcacatgggcayagtattttatatttaagtctactacattttaattttggggcattcaggcctatcaaaataattttgaatcttaattcagctctgtattgaattaactaacactctagattttttcatattcagatttgataaatatgtgccatgtatatttgttcaaattgttggtaaaaatgtcaaatctaataggaattaatagaaagccttatggcatgtcactagagactattcatcgggttggcctaacagaacattttttcaactggatgtgaatctccttaactctacaatcatccaacaaatgtttctccattttgtgtctcctctgtgaaacctcttcctaaaaccaagatacatarttgatatgcaagtcaaattatcttatcaaaagggaaaaaaacttaatttgacaattagctacttgaggacatctaatttctctcgcattcgttgatatgatgataatgatggagagagtgatgatgaagctgctgtgaatcctgtgccttgcactgggcactgagccaaacactttacaaccctaatctcatttagcttttacacaaccctgaaaggtgggagccatggctttattttacaaataacaaaactgagagagaggctacagataaattaagacatggggctaaaaaaatgataataattaataagtaatgaaaggctacagaatttgcccaatatcacataggttgaaagtggctaagccaagatgaaacatatatgtgtgtgtgtgtgtgtgtgtgtgtgtgtgtgtgykcgtgcacacacattactgcatctagttgcaatataaatacttgtaataggaaatatcatgaataaagaaacatgggcattaaattctggtttgttggaagggagtttaggggtaaccaagtgagggcagggcagtatctcccaacatgatatgggatgtcagtattcattccgtgtaaaaacagtgccccatcatctaacacataagccacatgctaggaaagcaatgataagtaagttgtttgtttcactgcaggacttctcatggacttatgctgaggtacatggtgactccctcagaatgagtatttcataaaaatacttgggtactggatacccgatggctcggtacccattacagagtgtgcttttggaaactgtagtagaggaggtgggtctgggccttaatgcctcagcctccccaagcagcttggccacagattcctcaagggccagggaaggagcagggaaagaatgaggactcagccgcaggtcaaagcagtacagatgctgtgggtgatgagtctggatccctcctgccctggcacatggacttacaaggtgaaatcttaatcccacgattcagattccataagcctcacgcgaacacaagtttcattccttttcatcacacctcatactttgaaagttagacagacactaaagttgtatgtaaatcattagggtggaaaacatgccggactggccctagacaaaaatccagccaagaagtttgttgacatttccagcccctacaaccccctcttcttttctccatctcactgccctggtccctaggtacgcacagctaccatggaacccacttgcccccttccctaggtactcacagctaccatgaggtcccagttcccttaaatcacatcctcccaccccccagcaccataattcatgttatagtggtcttgttataagtcattttgtaatttgtaaaatattctcctcaatgaaaagtaaaatttgtcttgtatttgtgatagttctctatttgggtcaatcaagtgtacaaatgcaacaaatattccctataagtagagagaataaaaaacctgtatatttatagtcctttaataattcctaagaagttctctgttgctgtataaaatatgttttcttaatttttagctatggaaaccaacaaccaatcttagggaaaaaatttgaagtatacttaaatttaaaccatttgtcaactaatgtgcacatttacaccacagctttacacttaagcagagcctttcacatacattatgacattaacccttacacggcctctctgtgtggctcttggactccggcctatccttctgactccacgtcctgggctcctactgtccatcactgctgactttcactcctgcagcctgcatagcttggtttggtttgttcgtttgtttgttttgttttgttttgttttgctttttagatggagcttcgctcttgttgtccaggctggagcgcaatggcacaatcttggctcactgcgacctccacctcctgggttcaaacagttctcctgccccagcctcccaagtagctgggtctacaggcatgtgccaccactcccggctaattttttgaatttaatagagatggcgtttcaccatgttggtcaggctggtctcaaactcctgacctcaggtgatccacctgccttggcctcccaaagtgccaggattacaggcatgagccaccatgcccagccctgtatagcattttgatagacattcctagagtagtttttcttaagaattgttctacagaaccctggtttctcaatatgctcagtaggagaaagtaaaaaaaaaaaaaaaaaaaaaaaaatttgtggtccagtgaatttcaaatacccttttgcagctctttccacttgtgtattgatagtcgccatgcatgttagtatactgaaggctgaagaagtccagtcataaagacacttttaactcaccagcatttctcaaatatacttaacctggaactttattttcctaatctttctccaattttccaaaacacaccactcttgaaactactaaagactatatatagacatagatatataatattaatatagtccatatttaatatatattatataatatatagtacacatacatataatatagatattaaatatatataaaggaaaaaagattcacctgtgaaatatttaaattacctggcagttgacatacattctagtatcccttccctcctctccccacaagatgaggaccccaggcaagtgagggctggacagttctaaggtggatcaaataaatgaataaaaagatatagatgccaggaagatgtctcaagtgagagacccagcttgctcaaacatattctgggcaggatcatgcatgatggactgaagacctgggtgcaggaagatccatcaggagagagttgcagtaaacaacagaagatgacaaggggcctgatttaggatgacagtgagaatataagggaaaartggctcccagatgcctagaagaaagagtcccagtaattcagtgactgttcacatagggaggctgaaggagagggaggggtcaagactgaattcaggctttccaagcgtggctttcggaataagtggagcacccatgacatcattttgggttacaaagaccagccaaagaggtcaagagcatgtgctttaattcatacactcaaaggttcaaatcctaaccctgttacttattagcagtgtatttggccaaattacttccctgagcctatttctgcaattataaaaggggactaagagtagtttcttcatagattcttgtaaaggtttagaaagaatgtatccaagccgagtgcagtggctcatgcctataatcccaatgggtggaytgcttgagctcacaagttcgagaccagcctgggcaacatggtgaaaccccatctataaaaaaatacagaagttacaggcgtggtagtgcccccctgtgatcccagctactcaggaggctgaggtgggaggatggcttgtgcccaggaggcagaggttgcagtgagccaagatggcgctactgtactccagtctggctgatagagcccaacgttgtctcaaaattaaattaattaattacgtttttttaaaaagataatgaatcctggctgggcactgtggctcatgcctgtaatttcagtgctttgggagactgaggcaaaaggattgcttcaggctagcagtttaagaccagcctgggaaaaacagcaagaccttgtctctacaaatttaaaaactaactgggcattgtggcacacgcctgtagtaccagctactggggaggctgagacaggaagatcacttgagcccagtaataagaggctgcaatgagctaggattgttccactgtactccagcctggctgccagagtgacaccctaactcaaaaaacaacaacaacaacgaaagataatgaatccttagctcaggatagtgcctggcacatagtaggtgttcaacaagtgctaattgctatctccattgtgactattatcatcatcatcgtcatcatcttgtgaagaaatatctagtttggtacatgttggttctaggatgagagtaaagtatgatctttaaatggatgcctactaggcagtgcaaggcgggagcatggagctcgtgtgctagattggtgatgcagatacagttttggaataattgttatagaagggatgagcgagccatgagaatctgtcttctaagacataaagtgggagagagatcacaggcttcaaggatcaagctttggtaacaccccctgacatggcagatcataaaaggatccagtgagaaggatcatgtgggcatcacaagagaatcaggcaagtgtgggtgatgagaaattaagggrccccagcctcatagggtgactaaaagaaaaaagaaaaaccaatggggaaaaattttaaagatgattatcatattaccctgagccagggaagctgagaagtacattaacagagcattcagaatggcacaatggcaaacattgtggaatggcataacattactctcctctccctaaagtgggcacacttgaattgacatttgcaggagaatttcactagagcagagaggaccccccctgccccaaacagaaaaaccatgttgtacaacagtagttaaagaaayttgggctggacgggcacaggsgctcatgtctgtgatcccagcactttgggaggccaaggcaggaggatcacttgtgtccaggagtttgagacgagcctgggcgacatagcgagacccggtctctacaaataataaaaaattacccaggtgtggggtacgtgcctgtagtcccagctattcagggagcctgaggtgggaggatcacttgagtgcgggaggttgagtctgcagtgagctgagttcgtgccactgcattccagcctggggaacagagtgagaccctttctcagaaaaaaaaagtgggggataaggaaaaaaagaaacttggacttcctacacaggagacttccaagatggtcaagacaggtacatttcaatattttaagggttgccataaagatgaagttgagttatttgttgtgtctttagtaggcagagctaggtccagttatttcatctcagccttagaaaaggctgcctgttgaagtagtgagtttcttataactggagaaatttcacacagagcctggctgcccagctgcaaagctgggaagaaacccctggttttagctgagaggatgacctacatcaaaccaaatccttcccatctcctgtttttgcacatcctgtgagctaataatgttttttacatttttaacaatttttaaaaatttaattgtaaattgacataattatatatatatggagtgcaaagtgatgttatgatagatgtgaacgatgaggaatgattaaatcaagctaattaacatatccgtcacctcaaatgcttatcacttttatggtgagaactttttaaagtgtattttgtttttataatttcaacttttattttaaattcagtggatgtatgtgcaggtttgtttcatgggtrtgctgtatgacacttgaggtttggggtacaaatgatcctgtcacccaggtagtgagcatagtacccaataggtagtttttcagcctttgcccacctccctctcttccccctctagtagtttccaatgtctactgttgccatctttatgtccatgtgtacccagtgtttagctcccacttttaagtgagaacatgcagtatttggttttctgttcctgcattaattcacttaggacaatagcctttagctgcatctatgttgctgcagaggacatgatttcattcttttttatggctgtgtagtattccatggtatatacgtatatccaatccaccattgatgggcacctagcttgattccatgttttcctattgtaaatagtgctgcaattaacatgcaagtgcatgtgtctttttggtagaacgatttctttttctttgggtatatacccagcaatgagattgctgggtcgaatagtagttctattttaagttctttgagaagtctctaaactacttttcacagtggctgaactaatttacattctcaccaacaatgcagtgttcccttttctccatagcctcacaagcatctcatttttaacaattttaaaaatcagtctacggccatcccatctggaacgcacccgctctcatctgatcttggaaaaactaaaaggatactattttgcgataggtgaaaattatatgaagctcaaatttcagtgtccataaatacaattttattatagcacagctatgctcatttatgtgttggctacagctgcttttgtgctacagtgtcagggctgagtagttgcaacaaagatcaaatggctcacaaaggctaaaatacttatcatctggccctttacagaaaaagtttgccaactcctgattaagatcttccaatggccttttttgaactggaaggttctgtgaggaagaaaagttttagcctgagatttggataggaggtcatggatcacttggagaccgccaacacaatagcctgcagggatgggaaactagggtgcagtggtgagaaaatgtaggtaatggattaggtaatgcctattggagaagactcacagcaaacaaaggtgaaagcctggatggtgaaagccaccatcctcagaccagcacagtatggggagatattttgggggataggatgacatgtagaagtttgtggcagaagggatatataaaagcttttcttgtgtttgatgaacacagtggtgtacttagtatctgctttattttacagcatggtttaatatatctcttgtcatatctctcagcaagaggggattttctgaatgttcttgtttatacaatgtgcagaaaatttttgcacagagagtcatgcttttgttggcaaaagaaagtgagcacttgctgattttytggcaatcctaacaaaaatactgaggtgtatttatactctgggggccaaaacgaatttcaaaatgacagtgcttagctctgtaaccatcccagctttcctcttctgcctccacggggtttaacaactttgtcaaatcccttcctctgaaatccacttctgcaagtaagttgaaacaaattcgctctactgtcatataaacaccaggcgggcttccctgctgggtgctcaatagcttggtcaccaaccaatggatgagataagcaggctaaagtcacagaaagtgtagaatgaaattgtctttttttaaagcatttttttattacattttacagtgtgatttctttattaacatctcttaacagttaaaagatgtttacttcacactgttttaaagtataatgatattcaagtgggatttcaaactagatgcagaaacttagttactgttcttattccaaacaaggcaagatgcctattagggagtcagatacaagtgactttttgttatctgtgccaatgagagaaccagatatcctgctaataaaaatccacccagaaccaaatttcttaatttgcctagtttctgccatccttttcgtggggaattacacaacaactattaacaaatggttacattcattcatttgcttttcacattcattttttgtccctatggtaatactaagagacagccctctgttcttaattttttagttgctcttcactgctgaccaagaggtgtccaggcattttaaccacattcaaggcttgtctctgcaatgtagctgtcctgttttctccccattaatcacttcatgccccttttacatctgtctacccggatgactcactgttggattgtacaggaagaggcaaagactctgcacaattccagagggcactgttcacttagtgcacaagacagtagccctgggtaagagccctggctcagatttgaattcagatccaaggctcaccacttactttcagtgtgactccaggcaagtttcctaactattgtattcttcagtctcttcatctgtaaagtggtgcttataacattgatctaatatgtagggatgttgcaagaattaaaagagaatttgaggaaatgtgtttaccaaggtgattgaccctgaatcaagcactcaataactaatgatgatgataataattctagacagctaatagcttgtaatgatttacttttagaacagataagaaaattttccttgcttccaatactatcatattttaaactccatttagaggctaccaagaagtttgggggaaacaggggccaccattttgaactccttgatgattacaaaggtggtagatagtggtgctgatattagggttggttctactgtctttatctggattcatagaatataggaactttatctaaagtaaagttttctcaacactctttrgcccagaatgttaaagaaaaaaacgttgtatccacatttaatatgatttgaaacttcaaaatagatttgctagcatgaataaaaccatttataacgctgaatatatacttcagaaacatagcatgttctcccctcctctagctaccctgctctaaccctgtccaagactgtcatcatctcctcccaagctgagagtcactgccttagagagaaagggcaatgggctggtccggatttctaatagggctcttccagttctaggagtttgtgatttggggactaagtgcctaaaccctggagagccaagccttctccaaacaagaaagaagtccctgtgtaaagagacatgagaaatgaaatagaagcagaagtttggatctaggaatgtcaccctaagaattaggggctccttttttttttaagaggaatgatatgacacaactcatgttgtaggaggataacacttcacttggtgatttcctttctctgggatgttgaaactaatagaaaaagatcatgacattcatgtaactccctgaagattttgaagacttctttcttagaaatccttaagaaagcaatacatacccacctgcttgcaatagttttaggactattagatgatgctaatcattatctctaatagttaaataactctggatatgaaatcctgacttttgggaatttctttgatatctgtactatacatctaaaaaaggtcagggaaactttgaacaggattatgagtctaggccttttgttctgtctctagccagctgtgtcatattgatcaaatcttttagcccctctgaacatcagtttctgccccataagataaagaattaggccagatgatatctaatgcttcttagaatttagactctagagtttgaactctcagagtttgaatcccagccacattgtttatatgatctacaagttactaagtctttctaagccttcctttgccagcctgtcaaatgaggataataattccttctagttagggttgttgtgatcaataaaagtcacctattgctattataatcttctgatacttaatgtataaggtgcattgtaagtaatactgaatccaaactaacctatatacactacctccttgctatacaccttcactctgggctcagrggcttgccttctatagggtgagggttacagtgagagttttgctgttgctctatcctatrtattatagcataaagtgttctcttcttcgttcctttgagataatgatttcttgtctgatccaccctcagcctggttgtcacagctgggtagtgcccccagagaagaagcagctgtagccccaggagaagctccgaggggaagagccttttaaagtggaaaaggaggatctataagctacctttcaggtgcaagacttagagagagggccaggcatggtggcttatgcctataattccagcactttgggaagccaagtcaggaggatcacttgcagccaggagttcaaaaccagcctgggctttgctgacccatctctaaaataaataaataaataaaatttaaaaataaaaaaagactttgagagagaggaccccactcaggtataatgaggtgggactcaccagcccagaacacccaatccccaccccttctagaagtgttgctagaagtagagaaagcactctactttctatacaacatatctttttggtttgcctgttgctttctgtttgatatttgtaacagctttattgagatacaatttatatactgtataatacatacatttaaagtatacaggtcagtggcttttttcatatatttacggacttgtataatcatcaccataaatcaattttaggatatgatgatcaccccaaaaagaaaccacatacccactagcagtcactccccattcctccctaactgcagctcctggaaaatagtgatctcatttctgtcccaatggatttgcctattctggatattttgtataaattgaatcacacaataagtggccttttttgtctggcrtctttcacttaagatagtgttttcaaggttcatcagcattgtagcatgaatcagtacttcatttcttttatggctgaataatatttcattatgtgcgtataccacatattgtttattggtaaaaataatgatggccatttgaattatgtatactttttggccattacaaatagtgctgctatgaaattcaagaaaaatgtwtgagcatatgtttttatttatcttgagtatgtacctaggagtggaattgctgggtcatacaactcaatgtttagcattttgaggaattgccaaactgctccaaagtgtctgcaccatttgacattcccaccaacartgtatgagggttctgatttatccacattcctatcaacacttgctagtcctacaacacatacctacagccatcctagtaggtatgaagtgatacctcatggttttgatttcattttcctaaatagctaatgatgttgagtatcttttcacctgcttatatttgtatatcttctttggataaatctctgttcaaatattttctggcaatatttctgacaatgaagcrtgacattaagatataatctcattcttggctgggtgcagtggctcacgcctgtaatcccagcactttgggaggccaaggcaagtggatcacctgaggtcaggagttcaagaccagcctggccaacctggtgaaaccccatctctactaaaaatacaaaaattagctgggcatggtggcgggagcctgtcattccagctacgtgggaggctaaggcaggagaatcacctgaacctgggaggcggaggttgcagtgagccaagattgcaccattgcactccagcctgggtgacagagcaagactctgtctcaaaaaaaaaaaaaaaaaaaaaaaaaaawtttaagaacatgaaagagctgatgatgaaacctgttggatgaactgatgaaccaccccccaccaaaaaaaaaaaagatataatctcattctttatagattggctgttgtcattctaagtctttgactatgaatgtatatgctaggtgggggaagtaagagcccacttccaagtatgaacaagaagagagggatcagcacttagggttcccactctggtctgggattatatgtataaacaggatagagagaaaatcagttttttcctgaatatgtgttcattctcaacagaagtctggactggaaggtagaagatctaggctcaattcctgcttctacttggcaaatatgaataagttgcttagtaggtaattagcttctttgaacctttcttttcatcctccccttttcagttatcttctttccttttttaaattgaactataatttacatacaatagaatttgccttttggcatgcagtttgaattttgacaatgcatacagttgcgtaatgaccaccacgatcaggatagagaatatcattacaaagggatgatactgatcycaaaagttttcatcccaaaagttccttttgcctcctttgtagtcattcctcccctatctcaaacctctgggatctgatttctctttttatccttttgcctttgacagaatgtagcagaaatagaatcttacagtaggtagtcttttgagcctggctttcttcatttagaatgatggattagaaatccctcagccaggcatggtgatgcacacctgttaatcccagcattttgggaggccaaggtgggagtatcacttgagctcaagagtgtgagaccaacctgggcaaatcctcatgtaaaacctcctgtctacaaaaaacacaaaaattatctgggcatggtggcacgcacctgtagtcccagctacttgggaggctgaggtaggaggatcgcttgagcccaggaggttgaggctgcagtgagctgaagtcacaccactacactccagcctgggtgacagtgagaccctgtctcaaaaaaacaagaaaaaagaaatccctcagtgttactgtatgtgtcaataatttgttctgagtagcatgtcattatatgaatctaccatagtttatttatccatttaccagttgaaggacatttattttcagcttttatgccattattaattggccactaaaagcattctcaaataggtgaatgtaggttttttcttgggtagatactaaattattttacgaagcgttatgcgaagtggctgtatcatttggcattcacagcaacaatgtgtgaacattccagttgctccatatccacaccagcccttgtcaaaaatctcagtttcttcatttgtaaatgggacagaagtccctaccctaccactcactcaggattgttgtaaagatagaaacagaagtgaggtggtatagcagaagtgctttgtgaaccataaagtgctatacccaagtaagaaatgctgccacttagtttgatagagatcatgctcacttcaatgcaaaacttgtttcccacatgagctagatgtttcattttttcccctacatcttggcaaaataagttataacaagtcttagacrgcaaaaaggtttgtcttagatgcattgtggagtttgttttggctccagtttttgaacttttcacagaaatgaataaatgaccragatgtaaatcattaagcgtgagtcagttttgtcaagaaaaatgaccctgtgkgatggaagtcagcaggaatggagtcagcatgacagacaatgtgacgtgctgtggaagaaataaaggcagccctaaccaggcagtgtccccagggtaaggygctgaggatgactgcacagcagcaaagagggctaatatgctccactatggtgagtctgggagagttggtgagaaaactgacaaagcactaatttcaacttttttcaaatttgaaaatcacttttttccatgttagaaacaaaaagctgtaagaaacaagccaaacgttacctcyttaacatcagaatggactaattcttagtgtgttacaaagatggttacatatagaaatatctatagatacacatatatamacaagttagtataacatacatatattcccttgctctgtcatctgagagggcatagaaacaactgacatcccagtagcaacaaggacaccttgtgctcagatcttggtttctaaaaccattctccaattaaaaggaaccagggctgcttggagaaatggctgattgtaggactaaggcagaaaatatacaggctgagcctggagcatctggtagtgccaagcagtaaggaggtgcttcaacggaaacacaagtgatggggtgtgtcaaagagataagataactgaaagagctcccaasagccaaagctggagcaacttgcaagacaaagtaaaggaaaaatatattataacmaaaagtataaaataaatattcttgactctatgctgacatgattgaataaataaatgggggagaataaatgaaagagaatagacaaatctgtgcaaaagaactccaaataactcatgaatactccaccctctagaaggtggagcctaactccctactygttaaagtatgagctatgcatattgacttccttccaggaagtacagtagggaaagggagtaaaaatgagtaactttacagtaaggaaagctgagaaatatgacctcagccaggtgatcaaggtcaacatcaacagggacacattctgttgatagtgtgtgccctggatataatgtgatgggaattgcatttgacctccgtggtcttcctcccacaaaaccttaaaccagtctaaccatgagaaaaatagtcaccaaatcccaagttaaggggattctgcaaaatacatgaccagtaattctcaaaaatgtcaaggtcattaaaaataaggcaagtgtaagaaactgttatagccaagaggagcctaaagaggcatgatgactgaaggtgatgtgggatcctggaacagaaaaaggacattaggtaaaaactgagacataaccaataaagttaatttagttcatagtcatgcatcaataatattttattaattgtgacaaatgtatcatgctaacctaagacattaataaacggggacttgggtgccaggattatgggaattctctgtactattcttgctatttttctataaatctaaaaatattccrgttgctccacatccacaccagcccttgtcaaaaagctcagtttcttcatttgtaaatgggacagcagtccctaccctaccactcactcaggattgttgtaaagatagaaatagaagtgaggtggtatagcagaagtgctttgtgaactataaagtgctatacccaagtaagaaatgctgccacttaggttgcagcatttgccccactaaaaaatattctctgaggaatttcagtttaatcttgatgaagtttttaatttttttgagcggagtcttgctctgtcacccaggctggagtgcagtggcatgatctcggctcactgcaagctccgcctcctgggttcacgccattctcccgcctcagcctcctgagtagctgggaycacaggcgcctgccaccaagcccggctrattttttttggtattttttagtagagacggggtttcactgtgttagccaggatggtctcgatctcctgacctcgtgatccacctgcctcagcctcccaaagtgctgggattacaggcgtgagccaccacgcccaggctaacatgttattgtaaaggttgtatgacaatgaattatgtgagtcccaagggaaacatttagtacagtttttttaattgctgttcattgagatacccagtgaaaaagatgaccatattttgggggcatttcctttctaagacttaaataaatatggaaaatgaattggtaaaaaaataaaaatctagcagataatcattcaaaatatgaggcacaaatcagaggccactctttctgccaagttaaagacaaaatccagcttggttttaggggtttttgtgtgtgtatggttgttattttgttttgcctttcaaataaacaaataagagcaagggtacaaatagcatcaatttacaggtgttacagaacaacatttgtttaatgtgactgccacgtgtagaatatgtccacatgataaatgtctggactatctagctccatcagtcaagacgttttacacaaaagaaaattcccgtattccttttatcaactttatttattcctggctgcaattacccttccctctaccccacccccaccaagataatagtgatgcctttaaaggatatgtagcagtttgttctttcattgctttctagtgagcttcctgtaacagaaagtttctggcaagatgtttttacattcagacccagatcattgtctatgacaaaacggagacaaaactgagccaagaactttaccaccaccccccatagaagctgacgctaccccgactcctaattcacaaggctcagggctgccaaccacatttgtcagggtttcttctccttgagctctgcctaggatatttcccccattattactctctagaggcgcgttatcacgttgtttgctcagttggccatttttgtcttgatgacagtgtaaggaaaccttggccccttggctacaaggtgtgtccgtgcggcagaggtagacaatgaccaaatacagagtttgttcattgatttgattcatcctgacctaagtgtggctcatcacagtttcattctgaaaactgacatctctgcagctacttsaacctcaggggattaagtctgtcctctgctaaaagtaccagtacctgttcagtgccttctgcaactagtgtgtcctctcgggtttttctttgtgattctttcctggttggttattttaattggttacataaaatagttattgtctggcttcaatagtcgctctaacctgacttaggtgataatagctacaattagttgaacacttctgcaagccagsatggtgctatgtgcttcacgcatatgtgaagcctttttaaatatcctgcatgctccttaggtcattctcaatttacaggatttggaaaacttagaacttagaaaacatgtctgagctctggtaagtaggagaactagaattcagggaagtctctgtgcctccaaagcacctatacacagtggtgctgcagatggatcatggctctgtcacactctgctcccaactgtgaccccctcctccatgacacttatgaacccctatcagatcaccctgaatatttatccaagttagcattcctggacccatctttacatttgctacatatttccatgcaaggaagcataaaggtccaaacaggaacttttacttcatattcatgttttaagcagaaattattcgtttaaaatctggttgatcagacttgctttgagattataaactaccattttgtaaactttgaaatgtagagttcttcagcttgcattaaactcaatgtttttctctttttgatgacctcacacttctcaacaaaaatgtaatactcaggaacaccttcattcccaaagatatttcatccatgtccccataattatatctgaattcctgaatggattagataggttgctggagttgagcctacataagcagaaataaaaagaggtgagaacatctctctcttcttcctggactctgctgccaaccttgtgcattgatgatgatgaagagaagagcaaacaggccacagacctggcttcccttcccaagaggaggacataaaggaaagcatgctgagtgaatatccacaacctrtgaaggcagaagaaatattagtctctaatttgaaacagcatcaagtaatggaaagggcaggaaccctcaggtttartctgaaagtttcttctaactagttgtttgtggctgatagcaaaggcaacctcttggggccttattttccttacctataaattgtaaaatatcagcattggactctttgttaacacatttatttatgtctcttcgtatttgcaaaaaataaaaaaaaaattgggggaagatttttttaaatggtagaataaaaaaactagaatagtgccagagagaatgcctaggcaaaggaaacagatgcttccattgatgaaaaagttgggcagaggttcctggcagcctaggcaaaaagggtgatatgatagattatatcattctcattatctgaaaaagaaaaggagttggaggagcagataaaagaagaggaaggagagaaagaaggcaaaaaagcatcagcacatcaaatcatcagaaactccaagctaccttctagaactctgggaggaattagaaaatgatgtgtcctggcaaggcgtggtggctcacgcctgtaatcctagcactttgggaggctgaggcgggtgaatcacgaggtcaggagttcaagatcatcctggccaagatggtgaaactgcgtctytactaaaaatacaaaaaattagccaggcgtggtggcaggcgcctgtaatcccagctactcgggaaactgaggcagagaattgcttgaacccaggtggcggaggttacagtgagccaagatcacgccactgyacttcagcctgggtgacagagtgaaactctgtcccgaaagaaagaaagaaagatacacaggaagaaagaaaggaaggaagaaaagaaggaaggaaggaaggaaagaagaagggagggaggaaggaaggaaggaaggaaggaaggaaggaaggaaggaagsaaaataatgtgtgctgtagaaaatgatggtgtcttcaagagcagttttgagggcagaaacattggcaaaagcaatctccttttgaccatattttatattgattgttaataaaaagacataattcaaaacatgactctctataaagatatgatatggggagctaaagtaatccagttcaggtatgttgctcactgacagtcttacttggcgtaaggataaagcttagaaaatctaaggaatgaatacctggtatgacttttaagatgtttttcttgaatatcaattgccttagccaagcttttgacaagtatgacatgctacagacagttgaaaattgagattccttacacgtcctttaatatgcaaaagtaatcttggtttatgaaagttctcccttccaccacctttccattccccaggggactctcacctgtctacctgcagagagggccaagaaattttattattatggtaataatagtgggggaagaagagagagggaggggatttcatttcctactgtagagaatgttatgatattggatctttgctttacaagcacgtattactttcaatattaaagattaaaccaaagactggtggaggtggggaggaagagagaatggaaataaagtacagttgcatgtgaataaaagaaagttatgcacatgaagccatggggcagccctgtcacttagacattgctctacaaatattcattgaatgactaaataaatagaacatggaaaagaggaccagctggcaagagtcggaagccagaagttgccaactggccacctcaactaggaaacaaatggactgtgccttctttaaaacactttgctttgttcatggcaatatcctaatgccctttccaggatgagcagccccaaaatgcatctgcagatctctaaacggttcatctgttcatctgtcaactagaattatgtgtcagaggcaggctgccaaaaaccactgttttgatccaggataattggaagtgaactcttcctcctgtcgtcagttggccagcacttttggtcgcttcttgaggcctctcctggaatatccttcatttgctctttcagtcattcttttagaaatattgactgagtgcccactgtgtgccatgcactgttctaggctctacggatccagcaaygaaaaaacaaataaaactccctacccacatggagcttccattgcagttagatggagacagattagagaaataagataaatataccctatgataagcgccagggagaaaaataaagcaaggcagagggatgggaagtgttggggaggggtagttcttgcaacctcaagtcgagtgatgagggaaagccttactgagaagctggtatttgagtaaagaagggagggttgagggaatgagctacctggacatgcaaagcaagaacattccaggtagagggaaccataagtgccagtgccctgtgtaaagcgtgcctggcatattcaagcaacaggaagagggtcagtgtggctgaggtgggggtaagctgtgcaggacatgaaaggaagtggcaagagaggaggtcagaggacccaatctgtagagctttgtaggtcattgtaagtgctttcaattttacccagaatggtacaggaagtcattgaaagttgtgatcaaattgcatgtgtccttttctgacttgtttctgtcattcagcccagttgatatgcrtagccatggttgattcttttccattgctctatcttattctactgggtacagcttggccctgtgggtggtttgggccatacatcaaccgtggacagtggacaaatctatgtggccaaacatttgaaactgctgttagcaaatagcaaagtagttggtaaagcctgtcttctcttgtttagagcttgaggggttggaacaggccagtggtgttgacatgctgctctgaggagccctagggaatattccttgaacctcactttttccccagcctctctttattccagaccaactcttaatcagtgttgtattgaaagtgtccccataaagcctccaggcccccagatttgaaaccatttaaataagagacctctaaagttctttacaactttaaagtacagctgtcacatacatgcacacacgtacatacaatatgtttaaaatgttttgatgtttattttttcattggtaaatgctttaataaaaggtcaaatttactttcactttcataattataaatgtattaaccattgtatgtagctcaaatgtaagatactagtgaaccatttacaaagaacaagcagctttcccatcttccattccctcttccctttgtttctcagcatggagggcagccctggctcgtgtggggagggtgtgggagcttcacagaagcacatcagtgacacgtcaggagcgtgcccccagcatgcaaggatgcagaatggagaaggggacacacagctgggagacagaagggaaagccgaaatggttgggacattggttactgtgagcagatactaaattgatgagtaaataagcaaatatatttaggataactatacaaaagccaggtttctcacggttggaaatgatacttacaaacacaaaaaggaaaaaggctggaaagaactttgaggtgttaaatttgaaatgtaggtttcattatgaatgtaggcttttataatctatatacacaaataaatgagggaatagttatacgtgtgtgtgtgtgtgtgtgtgtgtgtgtgtgtgtgtatagactttttttttcaagctctgtctgtctaggaaacctcaaagcaatggcactccagaggcaatgagcacatgaagcacacagatattggattctaaataccattctttactaaaaagaaaccagggcttcttggagaaaatggctgatgccatggctggggaagggaaaattaaagataaatctgaaacatcttgttatgccagaaacaaaggaaatgttccagtgatgatggaaacatattaaaaggaccaggtgccactttgggatcatttgagcttcaaaataaataaagcgagtaatggattccaatatagtgaaaaaaaattataatccatttgactacgccaatttaaatgaatatgtgaacaaataaatggaagacaagggattgttatttcttactgaagaatgaaactaataaatataaaaataatgaaggaaatataaatcaccatttggtagctgtcatagaggtgactgattccggtggtatttatcaatgaaggcaggtaatagagggtatatgaagagtaggatattggtgcattcctagaatagtgcctcacaaatactaataaattaccagagagaaaatggtaactgtgtggcggagacacctggcagacaccarcctgaccaggtgatcaagattgacatcaccagtgatgcaaaagttccacatcctgtaccctctgcggtgatgcaccaagcagagcccagcttcattctgagtatttcttccaggacagcatcacctaagtctggcaatgaaacctcagagagacccaggctgagggccatcctacagaatgtaaggcctgtaatctttgaaattacataaagacatgaaagacagggaacagtagaggaactattccagattggaagagacagaagaraacaaaatgcaaagtgtggtcccccgaccagcacatcagtgtcatctgggaatttgctgaaactgcagaatcttctgctcctacccccacccactgaatcataatctgcattttaataagatccccatgaacatttaaggttgtaaatagccagggccctagatcagtgattcccaaacacaaggctttattagaatcacttaggaaaactttatgtaaggacagattcctactcccctccccagatctactgaattagacactaaactgtggagtctacaataggatattctgaagaaactctcccagctggttctgaaaccaaggtacatctaagaatcactgggctgtaaatagtgttgacatatgcataagtgaccaaagtgggtctcattgcacgtgggcctcaaaacacaggttggagaaccaaactaatcgtcgccacaattcctgctccaggcaccaagacatgaccccaaacttcagtccaggggtggaatgtaaataaatattgctgattcacatttcagaagttttctagaacatttaagtggatttgaaaaatactctttaaaggattgtttgtacaaacatcatactctttccattccttgtttggcatagagtttaatcagatttaaaatggtgagagttctgtgtaaggttgtatgtttcttttcttccagggcatgtaaaacaggacatctgggttttatcattaaaatactaaaacatgtccagtatttttaggaaatttaggcctgagtttatgtgctacaggtgttgagtatatttgacagaaggctggagtctagtaacttagagttaaaaggaaaaatatatgtgtgcctgccaattttgtttcagataatacttgatgaaaacatttaagttttgatttttccagcactttgaaaaataggagaaaatagaaataaatcttttagtccattttaaaggcaaatagttttcagatattctttgttttatattatatactgagctttcatcaactcatagcaaaacttsctttgcagatctcaatttgcctatagtacctcatgggcataaaaatatcctttacaaatttctgacctcttccagaaaagatataaaagcatagaattccaagcatgaggctggttataatgtaggtatgttctatgaatgaatataagaaataatgctatccaacacagagactggggagggactaagtggtggaacagcaagggatatgtaataagacacttcaaaaattgtaatttccaaattcaaagaaacaccacaattcaatgcaggtgcctcacaaaatcaaatgccatatctagaaatcattgactatatgcctattaatattagtaaaattggctaacctttcaactgtgggcttaagtatgtaaaggcactttcatattatgtcctttagtcccacagttctgtaagggaggtgttgctcgtaggcctgctttcaactgaagggcatagaagagagattaaataattgactcagtatcacacaattggtgatactagagctgagacttaaagccagcacctctgacttcacacctggcctaccctacgcatctagtacagaatatttgtccagtcaacagaccaaaaaaatgatcttttttttggctttggtttcgtttggtgtttttttgtttgttgtttgtttgttattggtataagwtgtcacgttttaatatttgaatggtgtttttttttttttacttttcagtttctatcatctatgccgtaagcacttcccaagtaaatatttcttgaaagagatttcttgagccagatgtacaacatgtctttactcctctgaggttaaaactcaccctttctctacaaaaaaagcaaggctggtatttggcccccattccttctgaggatctttgtgacccctaaattatcagacccctaggctcccaaacaggtctgtcacttttacaggaactgtcaacacacccccgaaattttttaactgaccaccctgaagaaaacaagcaggctttaacttgagcttgctcaccaaaatcactcaagtccttccagctgyatggccccagtctccaaaataaatccccttcctctgctggtctgaggctcacttcagcctccccacgtcctaggctttgaactcctgtgacttttaaccttggctttgtgcctgttgagctgttaatcagggtctccagcccataatcagcagctggtgagcagctgctccctcctttcctaaaacagatcctagccagaattttccctgaagggctcttcctgccagcttcctctcttctaggaagcagaggaagttytcttcctttggcttctccctctctggccattcctaatgaagacaaatagcaatggcaccattatttctcctgttttccttgttggggcctcccttctagaattcttccccaaatctctattctcctctgccctttcccttctgtagcccagtctgcagggcacagctggtggtaccttctggctgaagctagaggggaaaagttcaaggccagcatatctgaaattctccagacaagtctgccgccactgccacctcttggactccgttcagcctgctgagagctgtgtcgtgggaggccctaggctggacacccttgttttcatggcctggactcttctcccttttgttccttggcttttgcctaactaggacccactgcccccatcttttaggccatctgaggttagtgctctagcaattgctgctgctcccagctctcctcgtcctccttatccaccacttcttcacccagtaagcctgcctatgaaggcctacagagggagggcaggtggcagtgtatcagactgtcttcacagagatgacaaatgcagcaagttatgactgtaggtgtcctgaggtgacatctgggctctagcctcagcattaccactcactaactgggtgacctttgcaagtcacctaacatctctgattctctgtttcttcatctatcaaataagagaaatggactaaataatgtctaaagtcttttccaattcaaacattctacagtccattgatttattcgttgttacattatgtagtagaaccgcatagctaaaagttggtctgctttctggattattccttcatgacagccttggctatgaaataacagttggccttcatctcctcactttggagtctaaagaaaaatcttccttcatgtcttggttttagagttcctccaatgacakattgattctggatttatgacaccaattataaaatcctatgctgctgtttctgtttctacctcctataacccacccaccccaagcggtttctagagaaggaggggtgtatttttggtttggccaggtgcaggtagaggacctactgaactactggtggagacaagcccctgctatgtcctcttcaagctaaaagagctcagagagacccctgtcaatattgcagcattattctaaatgttaattaatgttcctttgaaaaaaaaattacatggtcaaaagaacttgagaaatactgaatattagctgcttcttaaaggtttatcgtgcatattagcatattaaagcctccaaaaatcctgcccctaaaaaccttttgtttatttatttaggagactgagtctccctctgtcacccaggctggagtgcaagtgcagtggcgtgatctcggctcactgcaacctctgcctcccaggttcaaacgattctcctgcctcagcctcccaagtagctggaattacatgtgcatgccaccacacctggctaatttttgtgtttttctttttttgagacagagtctggctctgttgcccaggccggagtgcagtggtgccatctcagctcactgcaagctccgcctcccgggttcacgccattctcctgcctcagcctccagagtagctgggactacaggcatccaccactacgcccagctgattttttgtatttttagtagagacagggtttcaccgtgttagccaggatggtcttgatctcctgaccttgtgatccaccctccttggcctcccaaagtgctgggattacaggcatgagccaccacgcccagccaatttttgtatttttaatagagatggggtttcaccctgttggtcagtctggtctcaaactcctgaactcaagtgatccacccacctcagcctcccaaaatgcttatcctagaatttcctgaagtcatatggctccagacactttcttcacaaaatatttaatacttaatatctgggtagaacatgtgccctgaaacacagtttgggaaacattaccacaaaacattgctgatctgtttctgtctggggtctttggagcagaaagggataacaacactttccagaatatttattgagcatctactttgtgcagaacatgtgggaataattcaaaattggcagatcaatctgctcatcaagatttcaaaatcaaatgctgcagagggttgccgcatatgaataagcaggccagtcaacaaacaagacaaattaagtactaagtgcagcttggaagtgctgcagccaggctgctgggcccttgtttgactccccgaattgaattccatactctcagctgtcagtctcaagttcctttgctttgctccaccagtgcggttaccactccccagttacaggatctcatttcaggacattcactgtttatatcttaggtagttggtgggacacatccagcatttttatcctgtgctgaacaccctagaatttttgcctttcatgtacagctctgttagtttttactcagaattaggatctgttctttgcctggaaaagatgatgaacttttcaaaaagcaagaaagatgatgaaacagccaatgtcatgtgatgtggtttaatcccagcccatcaaatgttgtaaccacagtccagtgtacctgatgtttcctggacaaaggccctgggttctcagggtggctgccctttttgaacctgtctatgactcacagctatttttccaggacttccccacctaccaagccatgtccctgtgtccctacctcctcagagagccctgacccagacctcttcctcttctgcttcccacccttcactgccractttccttggatgttccattgatatgttctttctgaacatttttcttgccccttttcctctgcctctcctttctggcttctttgaaagaaatgaaggatcattcttttggagaatctaatccttggaaagtccctctctgctaaacagtgaagggaagctggccctgtaataaaaaggccaacattgtttccacaagtgctacatcttgaagaaggagctgcttattattttttaattatcagtattagttgacatttattgagcacatactactcctctccaagcaccggagcccttcatatttatcgtcccttttattagtttatgaatataaagagactttatatttatcatcgcttttattagtcaccacactccttatgataccgggcattttattatccccatcttatgagygaggaaataagagtctcagggtaggtaggaaacttgctcaaggtcacagaaatagtgaaaggcagagccaagaaatgaacctacattcctttggctccacatcctgtgtttttctgtttcccagcacaagtgacatgagtgagaggtgcttgacaacatcttgttttgagttatgcataaaacattgcagccaactccatgttggtgctgcccttcccagaagactgtccaagtgccttacttgcccagggcatctggggactgcagtacgggcagtaaggcacgatcatttaccctagagctcacagccccagagctgcctacttgatcttcaccctgaggagagtgattacatacactctcttccccactggaacagagaagctgaggagattagaattccagttttcatcagatttattcccttacgagtttcattcacagatgctcacccaacatayatgtactggacagactgctgatttaattatcttcttcttaatggtctgttctatctaccagtgtccagtggggccaggatgaattgatcttggtgggatgccaatatcctttgtttgttcacacagatttgttttcagtggaatgtacgccaacacaggcacaccattttattcccttccgctctgtccttcctgctccatcattattgttggctggttgtcggtctccttctacttgctcaccattcacattctaattggtgaaaatttgcatttcacygcaagtgaaaaagtgacttgcgggcttacttttgcttaccagtgacaggtgcacacctgcccgaggaccaagagtgaatcacagcatggtctccaaacatcgtgaccctgctcagtggccctggatgacaaccttcacctgtccccttttcctaagtagtgtggcctgtggccagaggcttccccatccagggtacttgcgtaagctatgttcttgtccttcactcagagaacctcagaatgggtccagcccattccagtgcagatgagaaacccaccacactctcaccctctgctgcccaatcatctcagggaaaatggagtcttccagtcatggaccaaactgcccataggtcttctatgtcatggctcccctggttgccttccccagcaacactagccttctgagcctcttgggtgaagatcaagcaggcagctctggggctgtgagctctagggtaaatgatcctgccttacttcctgtactggagtccccagataccctgggcaagtaaggtgcttggacagtcttctgggaagggcagcaccaacatggagttggctgcaatgtattatgcataactcaaaacaagatgttgtcaaacacctctcacttatgtcacttgtgctgggaaacagatgagtaaaacaatgcctgcatccaaggagctccatctgcagtggcaaagtccagggggatagtggtcaccgtgcagtataaaaagtgcagcaggaaggttatattagcacagaggacccattaattatctgagggctcagggacggcctcctggagaacatgacatctgggctacttggaagctaattggatgtgggaatggaaagtgaaggagttaaggactggaaacaggatgggctttgggtcctccaggtaagaatgtccagttcattcttggatatacaagataagagctagacatttggagccagcagcagagagaggatgggtaaaggaaagttagtgaaggaaaacatatatggagaggatgtagcataagaagagattcgagaagggccgagacagagcaaggcatggtagcacacacctgtagtcccaactactggagaggctgttgtgagagaatcagctgaacccaggagttcaaggcttcagtgagctatgatcatgccactgcactccagcctgggtgacaatgagacccgaactcaaataaaataaaataaaataggccaagacagagccacaagaaacacagcattcaaaaaccaatacatgccagcagagtacatgggctctggggccggcctgcctgggttggaatcccaccttcaccactttaattagctttatgatcttaggcaagtgattgcttcaatttcatttctaaaatgcaaatgataaggacatatacctcataggcttgttgtaggattaaatgaattaatacctgttaagtagactctgtaaaagcatttggtgtcactgttatttcactgatgtcggaaaagggcaaacccagccaatgatagagtcagcactgcccagttgagatctcctcggtgaggagaggtaaaggagcactccttataggaagcagatcagagctgaggagggacacgtcaggcttgggatgccaccacctcctggcagggtagggactgtgtttgtcttgctcatcatgtgctctagtgcccactggagtgcgagctctagagggtagacactcaggaatgatttgctgaacaagtatatatttgttgaagttccctgacttagctggagtgaaggggctgcagggagcaggcagtccagaggtggcagcagcttggggtgaggtttactagggggtataccctgactttctggcctctgcctgggatacctagctgtctgggtgagtgagcttcagggatggaatctctcacaggccttctcccacacattcttctctaattcagaaggaccctgtcctactctgcatgtcataggaaacttaaaattttagatacatgacagaataggaacatttgtaagcaactggtaagcaccaatgccacattctctgtgacttctcagaatgctaaaattctgtttctaaagggaatgcgactcggctgcatcattctgattctggagctaagctccgcacagtgtttgctgaggcatttctttgcccagtagatcagggtggctgtgtggggagcaaagctttaaaaatttaaaggcctgtgcttttacattaccatgctctactatcttccattttctcttttatgaagattagactcaacagtaaattagcaaacagtctaatttactgttgagtctaatcttcataaaagagaaaatggaaggcagtagcatggtaatgtaaaagcacaggcttttgatttggctcattcctactttgcaggtgtgtaaccttgggcaagstagtttactcactctgaatctcacctttctcatctgtaaaatggcagcagtattagtaccagccttgtagagctgaaaggataggataagcagcgtccctctcacaaacctaccatttacatggagagtgttgttattgtaattatgattatgaaaattatgcaaagaggaaaagaaattgatttataaatggtcccacaataggatcaggatagttcggagctaacagctcagttatatcaagacattttatgtaaactgttagtgatggattttaatctcatcatattaaagtgggatgaaataagtaggaccctattctagggccatcaattaatacaattacaaaaggggagactctgcatgagatgaggcttacttctgaacagcatttaataattggcttcacaaggaatgatccattcaattcaattaactatggtgagagagaagaggataacacattctgcatagctgttggcaattccccaaattccatttaactagacatggtatttgcaaatctcagtgaaaatattctccctagttgattttaaaacagtaaataactctagtgaacttagaacccaatttctgagtacagtatttagggatttatagttgaagaatttgagaataatcaactgtctcttgcaaactgtgggcaagccattctgcaaacaatagaaagatacccagaataacatgttctctaccctcaaggaggtgacaatttagagaaaatggacatatacacaactggtttaattgcaagacagagtatgcttcttactttttttttttttagttttgcttacattttatttttacttatacacaagggtaagatattatagaaattggtgtcactrtaagtctaaaagagcactttcagtaaatataaaataaaatttcataatgatgcatcttagcacaaatgaagcaaatgatgtctacaaatccatatccattggtgttgctggctttaacacacttttcttttaatgttttgggataacatgaattattacactttctgtgtgatacagttatacttaacacattctaaaataattaatggagttctagaataagaacactaggtttttatagtatgtatattacattgttagttttaaaaatattataaccagatgacatcttagtgattattcaatttatgttacaggtaagttaggtaaagcccagataggttaagtgaattccgtatgatttccagctagagttaggcttggaattcaagaatcttgggttctttctcttaggtctgcatgttttctgctataccatccttaggaaactctgttatctccttacccacaatttcatgtgtagataaaataaaatgaagatcataaatagtattataatgacataaaccaatacttctgtcagcttagaattgggacttgtctacaattctgttctagtgaacagaaaatggatacggatttgtagcttcttacttttcttatacttgctttaactgctcccaccctcatgcctagcatagttccaggcaaattcacaggcatgcagtaactgtttgtggaaaaaataggcattactacagagatataaataaagtgctttgggagggcaactgggaccaagaagtggtagaagaaccagatttctaaagatgacagcatataartggtaaagtaattatccaattattatatcaatcatacttttatatataattataaaataataattttatatataattataaaaaatctgactataaaaattttaattataattatattattatataattaaatataattaaaatataattaattatagttatatataaataattattaattgttaattttatgtataattataaaaataattatccaattattatatcaataataccactatttaattacttgcttatgttattttcccccatgagatgccaagctatcaatgggcagataccatgtctgtcttgtttactagcgcccagcacagtgcatactatatagtggatactcactaagtatttattagaagagggaggatcacctcaagtcaagatatatttgtcaaggttcttttttcagttatgagttaacagcaactcaattcaaatctgttcaaacaaaataagaaattggtgtatgtatatggagtcatcagagggcttcagggatggctggatttaggaacccaccaatgtttttaaaaatctatcttcatcttttcttggtgttggcttccttcttaggcaggctttccttatattatagcaaagacagctctcaacagctccaggctcatatctttacagtttatgattccaacaaaaaggttgtctcttttcctgatagcttcagtaaaagactcaagaagggctttagttggctggtgtaggtcatatgacaatctttgaacaaatcactgaggtcaggcttgcaggaaggagtatggtcagccttatgtaatctgtatagattaagatgttagacagccaaaacaaaaccccctacacaaggaatcagattgaaatgagcctaagaatagacaaagaatagaaaatgatacacatagtacaattggattgttatctggataagtggcrggtaacagtaaaaaattaatactggagacgtaaatttagagcaaatagtgccatccttgaaagccaaaaagagatttagagtttgttctgaagacaaatgtgatgtagtttgggggtaaggggagataatctgagctgtgtttgaggctctgaaaaagctacctttgggtacttgccttttcccctctgtgtctctcctaagcaaagagtcatcagtggaaccatgccaagcacagcaaggagttcaagagactcttctgcacccacttcatgtcaaggaggatgcctgggtgtgggaaacatgctggctgctgtatcctcagaactgagatcctggcatgaatgaaccatggcccgtgctttaaggagcttatgattagaagaacttggtctaggacaacattttatacatacatacatacatacacacacacatacacacacacacacatacacacacacacatacatatatgtagccaagcacagtggcatgcacctgtagtaccagctacttgggaggctgaggcaggagtttgtggccatcctgggcaacatagagagactccatttctaaaaagaaataaaagcttaaaaactaaacattttatatatatatatatatatatatatatatatatatgattgggctattgtaatagaaacatgctcttttattcctagcaatgagccagggaagccttgagagaagaggtaacatttgagttatccttctcttaagagaagactgtactcggggcacaaacccttctcagggcagtcacagattcttcttggtccagcctgttagttaggaagtgggatttagagattccagtcttcaggatttctgtgttctgtcacctgaaattcagcatctctacaacagtacttgcagcagcagagcagtcacagtagtgaacatctatcccttaactgcacactaagcatcatgctgagatctttagatacactctccaacttcaccctcacaacaattttaggaggtaaacagtatgcccattttactgaaaagggaattagggctcagagcagttagatggcttgcctcaggggcacgcacaggaaacggtggggctgggagtgcacacaggtctacctacctccagcgccgggctccgccactacaccgtgctgcctccctccagcttccccttgttccaaatgggttacagtctcaatctcaggtacagttaactggtgaggccagagaggtgatttacaattttgcgctggtactacagaaatgacgcctgatctgactcaaggccctggggtgcagaaaaaggtcactaagcccctgggtgagttctcaaactccagcgcatataagaatcaccagggagtttatctgaaaatgcaaattattgatctctggccttaagagagcctgatttctcagtctgaggccttggaatctacatttgaacaaacacctaaacaccacccccagtgcttctgatgtcagtgctccacatttgagaagcactgcctctgcaagggtgtgtgtgtgtgtatgtgcctgtgcatgcacacatgtgcatgttgtgtgtgtgtacatgcccacatgtgctagtcaagatgtttcagtaaagctccatggaggataggtatggatgtgcactacacataaactacttgaaagtagctttgtcatagccgggttcagtggctcacgcctggaatcccagcactttgggaggccgaggtgggtggatcacctgaggtcaggagtttgagaccagcctgaccaacatggagaaaccccatctttctaaaaatacaaaattagccaggtgtggtggcgcatgcctgtaattccagctacttgggaggctgaggcaggagaatcacttgaacccaggaggcggagattgcagtgagccaaaatcgtgccattgcactccagctgggcaacaagagggaagttctgtctaaaaaaaaagaagaagaagaagaagaagaaggaaagtagctctgtctagactttcattatattttgtagactttaccatttgaattcaacctttgcagttagaatgaccagatacccattacaaatgatcatctctttgaaaacttctgcttggcattttcaagaaacttttyggcagaaagtcatttgtctcctttttctggacctgggaacagcactgggaagtgttcaggccttttcccaaatataatccctgagcgtttggaagctgagaatcctccctgcccacggcctcctgggactctggatggcctgcctgtctgccagagacactgagcaactccatgctggaaatgtgggaaagatggtctctgtcctggaggtctaagggtctgctgggggagacagaacaggcccatgtgaaagagtcaggcacacaaatataacaaaaataaaccagaggcagatccatgcagtggtgagaatacaagtgaaactttgaactcaaggtcctacattaagtcraagagaagtaggaagaaatggaatgaaaggtgctaggtgaaccatgagaaaagcctccctagaggaggtaagcttcattcattcattcattcattcattcattcatatgttcactccttcgctgactcttgtttaaacttaccgagggcagatcctgacaggtcaccgacactgctgcttacccgtgagcatagcagatccrgcatctgccttaatgaggatcacagcactaaatgtgcgctagggtcagggtgatgtgggggcaccacagagcatgcagtgtgtggacacactccaggtgggaagtcaaggaagttctgctcaagaaaatgatgtttttatcagactcctgaaggcagcctcaccctttcctttagggggccagggcgygagtacaagggaggccccagcatgttggccttcccascttctcttcccatcctggcttgtgtgccagagtatgtatacctcaggcctcaagttcaaaccctgtccacacatcacccccacccccactgccctctggcctggctttaggcctaggggttacaatctaccctctgaaggactgatccagataaacagyccttgcagaccagcagtgggcttggtgctgtttggacagggaatttgggaagcgtgggtttacaagggataaattatctagaagtgagtgtgcrgcctatggacaggcacgtcccctccaccccatagacttcttactctatggagagggcacagctggaygacagccagtgtggagccttctgaaacctggggtccagggcaggatcctgatggcatggtctcagggcagtgctgcctaaaggatgagtagggttcaatgaataaaatgccaggccgtgtgtggtggatcaactgtaatgccaatgctatggaagcggaagcgggaggatcacttgaggccagaagttcaagatcagcctgggcaacatagtgatactccatctctacaaaaaaaaaaaaaaaaaaattgaatctggggtgatggggaagccttcctgcagaaggaacaaccagttcaagattcctgagatgttaaaaagcctactttacctccctaaaaggagggatataggggagaggtgaggtgattggagaatggacaggggcctggtgggccaaagtaaagatttggctttgcagaggacacaagcragacatggtggaccagggaaaggtcattttgaatgatgcaagaaaattccttccaaaatgagcatgtgtgacaccaataaggtatttgatgtgaggagagggagtaaactgttctrtttggctaagcccaagagtactgagaaaagcaaaaggaaggaaaaaaagatattttgggaggggcagttgtggaggagttgtgggcatggtccagggggttatgatgtcagggtaagcccagaascttctgggagaggtgcttaaagaattgggctgggggccagattctctcctcattctgtgcttactattgaaataagcaaaataatctgctaccattaacacctttctgctctagtagcactccctatgcctaaaccatagtactttatatttatatgatttttttgtttttctgtgtgattgcacagaaattctttctggattggcaacacatcccattttccacttagtaaatgtgaccaccttttatgctttggtcaacattttgacatttgtcactgaatcttcatttcctttttgtgtcatttattattttataactagyggtggccctctcaccatttaatgcttataaaattatgaatacatcagaccataataagaattgtccgtgaggcttgtaaacagatgttggggtgtgtgtgcgtgtgtgtgtgtgtgtgtggtgtgtctgtgtgtgtgtttatgataacagtgcttacataatctcaacaaccagggccctggggactcacactcggcaatggaacagttggtttaaattaggtttccatgtgaaatatggtatcgctgtttttttcctagcattgtgggaaagtatatggaaaatgatttgactgataggaaataaatctggatgagtgatcaggattgtgacacaaaccaagtggtggtctccacctgccctgtgaagcagacctctccagggggaggtgagttaaccctttccagccactggactagtaagtcaatgcatggtatcagaacagcctgaaagaatgacaactttccagagaccctgatttgccatcaatttcaactagaaaggagctaaagccatagagacaatatagccagaggcctcaacaactaatgagttgggtggctttgagaaactgtttttttacttttcaggatctcatttttatttgtgagaagtgtttgaatttccaactcaaagagtcagtagggttatgatgctaagtgtttgctgatggtttcccattttaggatagggctcatcaaaagccagtcagactaaaggaagaattagatggatgcaccaatgactcagtctctgttagcaaaataatttcttgctctagtgagccagggtttcacaaaggtgacttttaaccaaggaatcaagtgagaggacaggcatggagactgtgagcaaggggttactcatagctgcaggagacgggtcagcactaggaatcccagacagttcctgggatgatgtggaccagggtttgtcccaagggtctgattccagacctgttctcctgatgccacctgagggcccagtgaagtccagtacagatggagggcagaggcacatgctgggagcccactaggctcaggactgagcttgagggtggcaggtagcccagcacgttttgcttcagtctgtttcagaagggaagaggaagattattaattactccagtgcctctggctcataccagagaatagacctgttttatcactaaaactccctgttgctctgattttcctgtttgtttctatgtagggataggaaagaggtgtgagcaaccattcattttgtttttttcatctctttagtcatattttggactcttctcagtattttctccttttattcctgctctgccttcacatatgcagctcaaaactgagtgcttaggaggacctacccagagccaagtctgaaaaaactcacctttcggctgggtgcggtggctcacgcccgtaatcccagcactttgggaggccgaggtgggtggatcacttgaggtcaggagttcaagaccagcctggccaacatggtgaaacccatctctactaaaaatacaaaaattagccgggcgaggtggcaggccttgtaatcccagttactcgaggttgcagtgagccaagatcataccattgcactccagcctgggcaacgaagcaagattctgtctaaaaaaggaagaaagaaagaaagaaactgtcaactttcaccagatgaaagagcactgggctgggagtcctacttttgacatcaacaagaattgtgaccttgaaaagtcacttctcccatgagccatagattctcgatctggaaaaatggggttgcactgccctctgtggttgctgccagcactcaatgccattaattcttatcattttatccacttacaggcagtatgccattgaccttgagctcttatttcctgcagttgtcatgggtcaccataaactctgtgttccggcctctctaacttagtccagagaaaagtgttgctgtccaggcttcagcactgatgctgaaccaagcggagcttgtagggccatgtgaggtcaagaccaagactttggtctgttgacaaccaagcttatcaacccagatgctagtcaggatagagaaggtaacttaggtggacaccagcatctaagcaccaaagtaaaggtggcagcaaaataatcatagagcagaagcagatgatttagaggctgcatatcataaggggagggtgtagacatggattatttttaaatattgtcctccagtctgtgtagcaggaaaaacraatcacattagaataactttaagcccagaactgaagaacattagagtttgtgtaaacacatcaggcattttgtgagtggttgataatgcaacctctggagaagacaccctaagttcaaacctaggctttgctaccttcaacgtggttgaagaccttacacacatccctgaggacagtaacagtccctgactcttagaattgttgtgagagataaatgaggtaatataggtaaagtgcttagaatggctcctggcacataataagtgctctataaatatttgttcataatattttgtcatttgaggggcataatagataaagcatttgtaaaagattgtttaaaaatgtttttatttttcctttgatattatgtattttaatacttagtaaatgtctttaactgatgggttaagtacatttcattttaatgtccatcagtcaaatatctttcaatcaaaattatccttaggccttattttcttatagtcaaaagaaattttttcaatcaaaggattttatgaattgcctttttcagccttcctgttttaaagaaaataaagagagagttataagagattaaggacctataggtctctttttttttttttttttttttttttttttgagacagagccttgctctgtcgcccaggctgcagtgcagtggtacaatctcggctcgctgcaacctctgcctctcgctgctcgctgcaaccttcaaccttgaagctgaggcagggttcaagcgattctcctgcctcagcttcccaagtagttggaattataggcgcctgccaccatgcccagctaatttttgtatttttagtagaaacgggctttcaccacgctggccaggctggtctcaaactcctgacctcaggtgattcgcccacctcagcctcccaaagtgctgggattacaggcgtgaaccaccacgcccagccaggacctacaggtctttcatttcctaataccaaattgatatttttagaaaaacaaagaatgcttttggaaaaaaaaattgccaagcttctaggacataattcccgtgaatgtctctgtgtgttttccaggtgagctcctgggtgacatggctgatcctcacggcaggctccatggaggagaagcgagaagtcttttcatatttggtgcatgtggccaaatgctgctggaacatgggcaactacaacgctgtcatggagttcttggctggcctcaggtatagtcagtggggaatatggttatcttggcacaatcgcttctcatcacctgaatggcactgaattaattgtccagggactcacctttacccaagccaggtaaytggaaatgattaacttgggaaatgtattatcttctttcagcaccaaaggccctgtccctcaaagatgctgcagaattcagcccctgtgggccagtcacaatcctacttcactgggtctgctgtgatcctgtgttctttgccaagccaagtgaaattacttggttgcataacccgatcaaccccaccactgactattccccttcctgtcctgtaaaccccactgttatctgtctcttttcaggcctgccttatgtagtgttccagggctatatgctatagaccaccaactgcccttagtaataacagtggctagcattgacaataggcctccaataatgtaagctctcattattaacaaacactatatgtcaagtatgagctatgcacattccctatattgtatgttttaattctcaaaacaggtttatcaggtagatactattcttattcccacattatacaaaagaggaagctaaggctaagagaaattaagtcattcacccaaggtcacctggcattgctgggaatacaggcaaccttggtttcggagcccatgagcttgaccactatgatatcctgttcttatgctttttccatcaagctaataacaaaatcaccattctgttcatcaggttgcctgctttatccccttttagcctcagctacctggcataaagtaactgttcttactcctgtgggwggcagcatggtatgtgaggaagaagagcatgagttcttaagttagaatcaaattaggaatcaaatccttatccaggaatcaaatcctgattcccccaaggaatacctgtgtgatccaggcaagctacttgacttcattgagcctcagttactttgtctgcaaaatggggataatactaaaaagcacctacatctttaggtagaattcagtgaaataatatagtatttgacacatgtgcgtggcgtatagtaaggcctcataaagagaagctattgatattgttattgcttcctgagattcaccatcctcatgagggttctcactataaaggaatgttagttcataacattactgagatttttctttgattctccaggtccctaggtagggattctgggttaggggaggagatgaaaactcccagagttctaattttttttttgtcgttttcaactttcttaacttagaataaacccaaatgatcatgtccttgacatttaaaatagtcatacaaatgcatcaggcatggctcaaaagaaggaaaaagtggggagaaaaaaaaacaaagccttggagaacaggaggttatatccagatgatttagattctctttgtgatcaattttctataaagaaaacgtgtaggccgggcacggtggctcatgcctgtaatcccagcactttgggaggccaaggtgggtagatcacctgaggtcaggagtttgagaccagcctggccaacatggtaaaaccccatctctactaaaaatacaaaaattagctgggcatggtggcaggcgcctgtaatcccagctactcaggaggctgaggcaggagaatcgcttgaaccaggaggtggaggttgcagtgagccgagatcatgccattgcgctccagcctgggcaataagagggaaactctgtmtcaaaaaacaaaacaaacaaamaaaaaaaaacagaaaaaagaaaatatgtattacatttcttttaagaaaagaattatcatattttgataaagtcattttattttaatgatgcttatcattctgtgtctggcaagttggtgctggctgttggccagggaccttgcttcctgaccccacaacatgactgccatcacagcacggtgactggctccttctgaagtgggtgatccaagagagggaggcagaggctgcaatgccttttatatgatagccttgggaatcatacatagtcactcttgccatattgtactgatcacataggacagcatggattccttgtgggtggggactgcacaaagccacaaaatcaggagatgtggaccatgggaggccgtcttggaggctggctgccacataccatgttctagattctcttattacaggaacggcctcagagtgacctatggaggcctagagtgaatgggactttaagattcaactgagtttaaatccaaaatccaagaagaccatagaacctggtgatttccctaaatgaggaataatctcaaaccaggrcagacctcaacattgatcccagtgcattttgtctcacaccccagacccactgctgcctagtttcatgctcctatatttggcttaaaactaaactgatctttacagatagataggcgaaagtaccacgtataataggtcttttgttgacagctattctgtacacaggagataagtggccagatactcttatgatgcaatgattatggaggcagagcttatatgtgcacttttaggtttgaaagtgtttaggttccaagcaattaactattaccaacataatagagattttttttattttttaagcaattaaatgggaagagaaagcatacttattaagtgactttggtttttttatggacattgtacattttgcttcctctaactaaattcttagctctcttaagccactagtaagaagtacaaatatttacaatcaagagtatttactcagtcatggtgtcagtttaaaataacccaaatgaacaacaataggaaaatagttaaaggaaataatatgctatatccaggtaatggaatattatatagccatcaaaaatgatgtttataaaaaacaaaattttttttttaaacggagcctcaccgtgtcgcccaggctggagtgcagtggtgcaatcttcgctcactgcaacctccacctcccagatttgagcaattctccggcctcaccctcccaagtagctgggattacaggcacgccaccatgccctgctaatttttttgtatttttagtagagatggactttcaacatgttggccaggctgatctttaactcctgacctcaagtgatccacacgcctcagcctcccaaagtgctaggattacaggcatgaggtaaaaaacaattttttaagagataagatctcactctgtcacccaggctggagtgcaggagcaagatcatagctcactgtaacctcttaccctgggctcaagtaatcctcccactttggcttccaagtagctaggtctacaaggagtgtaccagcacaatggctatttaaaaaaatttttttagagatggagtctttctatgtttcccaggctggtctggaactcctggcctcaagtgatctcccctgcctcagcctcccaaagtgctgggattacaggcatgagccactgcacctggcctgaaaagtttttatatcattggaaagcaggagacacataatacatgaatctatctgggaacaaaactgtctatccctaataacctcagcaatatttatatgcccatatagacaagaatagaagaaatactgaaagaaaatatacctaatgtctgtgtgtggtagaaytgtaagtgggttttctatatttttgatattttctagattttctacaatgagtagtatctttataatcataaagatgaataaaagttttaaaaatagtttcaattctcawttcaacaataaagaattgatctttgctgaagtttgccctttgcccccaagtgaaccataactacttcattactcacacaataagaaaccagtgagaaccatgtctcattcattcattcacttcatttgtttgtaacctccacttcattccccaaaaaagaattctcactgtcttataagaatccagttataggacaagctggatttagtgggatgaaatcataaaatgcttttacttttctgatttgattgcctttcaaagcttccaacyagctctccctccctcaaccctggattatgctacattgagagatcctgtagttttccagtcactttcctagttaacacacaatctcattctcctatgctcttgaatatgaatgagtcttgcaaayttaaggctgtataaaaaaaaaaaaaagcaagttgtttaaaacagggatccccagcctttttagcatcagagaccagtttcatggaagacaatttttccacagactcggggtgtgggggtgggrgcagatggttttcagatgaaactgttccacatcagatcatcaggcattagattctcataaggagcgtgcaacctagatcccttacatgcacagttcacagtagggtttgcgctgctatgagaatctaatgccactgctgatctgacagcaggcagagctcaagctgtaatgcttgcttgcccgctgctcatctcctgctgtgcagcccagttcctaacaggccatgagccagtactggtctgcggcccaggggtggggacccctggtctaagactatctaccatgtgatactatttacataaagtttaaaaatacacaattctgtaacttgcttagtgatatatgcatatgttggaaaagtattaagaattttaaggaaaggagaaccccaaagtaccagtggtggtcctgtctggtgagggaagaatagagtatgtgctcttggaggaatacactagggcctcaaccacattgttgatgtttgattttttaaactgagagattggcacatgggtgtttgtcatgttgtacttctttatgtctttggatgtcttatatattacacagtgattttgtaacccagttaatctaaatcaaaattttaatatctcattcaatatatatcttcttcccttccttacgtttcacaacccaaccagtctcagagacttgtagtagtgaggaagatagagtttatcttttttcttccttttccctgcaactgggtgtctgcagaaaagaagtggacaggagaggagatgggaaaggatggggatagagggagcacagagtcttacttgatggggcagttgtaatctggccttggtgccctcacagagaccaatggagggtgcttttaggttttcttactagttactctctctaattttttccatctccccactgcacaattacctagcaaaatgcagtgtaccctctggtcaacctcttattcctcaccccctggggtcctgtcctcacaggccctttctgctagggtcgcctcatttggcaggcagacccttcaagacagctcaagccccacctctttgcacagtatcccctcctgactcacaggaaatagtcagcatgttgccctcccaactctgcaagcacaggacatatctactggaatcctctctccctttgccaccagggagctccagctagcctcaaatctttaggcaagagtcatgcaccagttcacgtgatctacagactgcccgggacacaggtcaatgtccccagggaattcacttactgccccctgcacttggggtgacttcatcctctcacagaaaggtgagctctcccacaattccccccagagaaatattcccaagctatctgctcagatccactttctctgcatgggctgaaagagagtgggagaccactgtgggcaaagcagttcaggtaacaccttgtgagggcctctctttagaaggtgtggtgcattgtcatctgtgggtctcagcaggagtttcagaatagggaaagtcccacttaacatcctgtaatgcaaataatactttacaacaaggtcccccaaaatgggctggtggcttcatgtcaaagcttgattcagtaaaaatcaattctacagaagaggtgaaaacaatgggcttcatgttgatcactaagggactggattgatccaagagtaatatttaaaagatcaagagggccagatgggccaagtttccccaggcagtcctcctccaccaatatctgtacaaaccacattaccctctactttccccttttggccatagctgccagaaaaactcaaacctacattcagtgcccagcttccataactaacgcgtcccatatgcctatttgtgtttgtatctgtcctatttatttttcagtttcaatttacaaaagtattattcatattatctggggaagtaggtggggataggaaccctacataaatattaacaagtaaagaatattggggctgggcgcggtggctcatgcctgtaatcccagcactttgagaggccgaggcaggtggatcgcctgaggtcaggagttcgagaccagcttggccaacatggcgaaaccccgtctctactaaaaatataaaaattagccaggcatagtggcgcgcgcctataatcccagctactagggaggctgaggcaggagaatcgcttgaacccaggaggcagaggttgcagtgagccaagatcgcaccactgcactccagcctgggcaacagagtgagactccacctaaaaaaaaaaaatggtaaaaagaatgaatttgtatggaatttaggctccttgctgtaaactatattatttctccttcagtctgaaaaatgtcatttacttgcaataggtcaagaaaagttttaaaaatgtggcagttcatggaccagtctgatattgagaccatgaggagcctgaaggatgctatggcccagcatgagtcctcttgtgagtacagaaaggtggtgacacgtgccctgcacatccctggctgtaaggtggttccattctgtggggtgtttctgaaggagctctgtgaagtgcttgacggcgcctccggtctcatgaagctttgcccgcggtacaattcccaagaagaaactttagaggtaaggcctttcagaatcatcgtggcctgaagagccactgttgctggctgtctcatcaggccctgtctgtgctcaccaaagaaatgatcactgattgaacacagggttaatagttgttatattatttctgggtagcacatagatccttggaagttctgtagaaaagaatgccaactagcgctgtgtgggacatagtattgtgaagttagttttaatgtattaggtttaatatgtaagtacaagtcaaaaagggtgttgttttctgatggtttttaaagattgacaggtttttcttattgggtgggaatgtctggatgcaggggatgaagacagtcaattgagagtattaagttttccacatcagtggaagaaaaaagaggggaagtcaacactgctttctgttcatcctttgtgggaaaatgctggggagcctggagacgcatgtagagacaagctccaggctcctgatcctcagagccttgtttctcccagatccattgcctcctgttcctgattcccagagcagaagggacagtgtgagctttgacccaaggcattgggcattggagagaaggggagttgagaaactggagggaaaagataaggaggctccctccaaggtgtttaaaaatgaaagaagtgactaaaatggaaagaactttatggagattttgagaagtcccttaccggggaccaaacccaaatctaggatcattcctgccatgatgacagaacctactactgacctttcacacacacacacacacacacacacacacacacacacacagagtcatgtacatgccttctccatggagtgggaagactctcctcaaccttcagcctcttctttgtcacctgggagcaaaggcatcacctgatatcagaaagacttaagagctcctgacaggtacaggcaacaccaccggcatctctctgggttatgagctaggataaaagggcaagaaatggaggagaaagcttaaaggaagactcccgggccacaccccctagcttcctcatgtcttaagaagagggaactccacatctcttatcccagacacagctctcacctctgatgagagaagcttcctaatcaactgtatgaacaataaggcttaaagagcttaaaaaccaggaagaagccactgtgttattatagaacacatgagcaataaagcaaaacatcacctcttctcagtgttttgcttgggcccagtcattttttctggttccatagaatagcatactttactcatggtttttctcagttctcactataaggataaaataaccatgctcttcctctgcaaattggctaatcttctccttagggagccctgaaataatattttttttgttttaaatttgaagtggagtgtcgattcccagagggattaaagttgtctcagtggaaacaagggtgagttttgatatttcatgtggtgaaatgaaaaaatgtttttcctggaggctcttgttttctttcccataaaataggcacaaatgccmttatttattactttatgatttcatttccctagccaagtatgttatccaggcatattaagttgcaatagcaaattctcgatttttttttgtagtttgtagcagattacagtggacaagataatttcttacaacgagtgggacaaaatggcttaaagaattcggagaaggagtccactgtcaacagcatctttcaggtcatccggagctgcaatcgaagtctggagacagacgaggaggacagccccagtgaaggaaacagctccaggaaaagctccttgaaggataaaagccgatggcagtaagttttacacgttaaaagtgaggaatgctcatctcttcttttttcctgttgatgagttgtttcctacttcagcttagtttcagatggacacctcatcaaaacctgccacttttatcattaagccacacttctttatcttcaaaccttaccaattccaaattcacatttacctttctcattttgctgctttgttctaaaattactgctcataatttaacttcttaccatctgttacccctttaaaaaaaaaacaaaaacctagagctatcctgccatttctaagaattcaacacattaaatttcagaaggagagctgtgatcttttatttcctagtttttgtaacagtggtttttttaattcttgggtggggtactagggtgggtattaagatatttttaaatcaaatctactgacttagttaggtctgggtgatacctagaaatcagtatttttatctctgccaacctctgggtgattctaagtcgagggttagtgatctcacttcgagaaacactgctctgtaaggtgtgttaaaattaaccctacacacacaaggcatctgcaggtttttaaattgctcagtaattccagtttctcagagattatttcaaagatttttcacttaacaggttgctaacattagtggcaatctatatatagagagaagaccatctgcaaataatcacctctgcacagaaagcctctcagagccatttaagttcttaatctccctctctctctctctcggcatctatgtatatatctatttcttccaacaaaagattttgtagatgcttttaagaataactatgaataattgaggatattaaagaaaagaaaaataagaatatgagaaaataaaacatacaaaaatgtatactatgtagtctatacagtgactaaattttgttctgagattcctagcagtcaaaggaaagaggaaatcacaattcattataagtttcacagtatttgtaagaaaaattaaacagatgtttgggagaagaatgccttctcctcatactggatctggctgaaattccttccttaaatcctactgttaaggctaggatacatcagataggaatagataaaataatgaatttcatatggctctttttaaagagccttcatctttaaagatgaagctttacaatgtggcttcatctggggctgtgtgtgtatgtcgtttgacctttctaaaacaccttcaggactgccacttttactgagtgtcagacccctagactatcctttcctttccctcgaagttccttcaagtggtaactttcttgcatcattttcacccgttatgaaatttttgtctctaattttctccacagtctcttgtctttttcctaatcattttatcacgtacatcctaagaacatttctcttccactgcccattttccaagccctgctgcaagcactcttagaagaggagaaaaacacaaaaatgcagatatttcttttataaaacctgtgaagtcatattgaaatcctcactttgaaacttgtgtacctaagtgccagtgatagcttctttacctcaagtgactgctactctgaaaggaacctcaacacacaagttaggttggtggggctgtttaatagaattcaccaaaaccagatcagtaagcactatttctgtggccatctgctgggacttgggaatccattcctgattgagagccccatgttttgtccagtgcagggttatgtgtgccaaagatgtgcagattgaaaagcccataggaactatgctttgttgatctggctgaaacagagactctacaaacagcaacctctagcccctgttcacttggcaacaaccagccctgtgaaaactacagcaaagaaagaagggacaatctcatggtcctttggtttaccccacctacagggtgctcttataattcttcccaaacctcacagctactcctgccagaaaaccactagaaacactcatagaaatctcaaaaagtgattataaaaagttcaagatttatttttgctgggcccggtggcttatgcctgtaatcccagccctttgggaggccaaggcaggtagatcacttgagtccaggaattcaagagcagcctgggcaacatggtgaaaccttgtctctacaacaacaacaaaaaacaaacttcaagatctcagcaggaagggaattgggttgaaaaaatcttgaaatgtcaatggggtcttcaagtaggcttgtctaacttctgtacagatgaagttgtgcctagcragctgaagtcgcttgtctgactaataaacagtagagccgggtcatgagcctgaccatgtgttcagtcacaggggaggatcctttgtcctaaaatgcttaaggcatttcttttgattgtagagagactaacccttagcctctttttatgtctaactcctgaagattaggaacatctgaattctgaaagcattccaattacatttcatatgaattataatgctcattaataattacttttttatttaccagcataaagaataaataaactatgcgtttgtatgtttaaaaacatatagaggcatggagacctaagagtagcatgtggcaccattgttgggaaatagaaatgaggagtatgaaggtgtgtagagaagagtatagagtcatataggagctgcaagttcttattgtcatcattttcaatattgttgaccctctttggcatgctgcaccttaagaaggatttgtacatttggaaaaataagatataagtagatgatgccagaaacctacaatggaagctgcttcagctgattaagaactcaaaccttccagtcacattgcctgggactgaattttgacaccacctcttactatttctgtcacctaggtaggtagctgaatcttactaagcctcagttttgtcatctgtaaactggaaatgacaatactacttgatagggtttttgtgaggwttataaattaagcaaattgcacggcatactataagtgccaatatagatggtggctatcgtgattaatgtgtgtatcacacccttaaaataccaagctgaagttctgagggtgatatggtttggctgtgcctccagccaaactctcatcttgatttgtaatccctataatccccacgtgtcaagggagagaccaggtggaggtaattgaatcacgggggcggtttctcccatgtgttctcacgatagtgagttctcatgagatctgatggctttataagtgtgtggttgttcctcctgcgttcattctttttcctgccaccttgtgaagaggatgcagcaaggcttcaccttctgcttccccttcaccgtccaccatgattgtaagtttcctgaggcctccccagccatgctgaactgtgagttaattaaacctctttcctttataattacccaaactcgggcagttctttataacagtgtgaaaatggactaatacaggaggttccagcacttaagtgtggacacccttggcagtaatcaccatttcagaggcaatcctcagtcatcctcctctcccttactgcaaagaggtattttctgtgtccttctacctcaataacctcgttagagacgcgcctggacgataatccaaccccatagggataggaaaaaaagaaagctaagcatgagaaagtagaatatctgagaaaagataatagttaccaggattaaccacacacacacacgtacgcatgtggatgccccaaatcataaaatgataggaaatcagttattctccacagggaaggatgcagacaggcctcaaccttatcaatgcccaacacacaacatcctttatctgcaacagctgcctcagcccagcccagaccttcatacagtctcactttctggctttgctggggatacctgggatcctgtatttctctctttctgcttctttggccaacacctgagacccaacatgatttgtaacagagaccattttcccactatctgcacaacattcaccttaggcttttttctcacttaaatctcaacttgaaacttggacaccatttttacagagaagctctatttgtatggatgtcttttgttttatgatactaacttaaactcaagccagacaacaataacattagcaatatttaagatgctaatgtttattgagagcctatctttaagcaaacactgctctaaattctttccatatattaaactatttaatcttcacaacagttccattttactctcatagctagcagggccaggatttaaattcaggcagactggttccaaaacccacaractactcacatataataagagaatgcttatagtcaaggaaggtgctaggttaattaaaagcaagaattttccagaagagagcattaaaaacgctagattttattagagagaacagctgtrgcaagtcctttggaaaggacatagatttacttctatcttaaaaaattaaatttacgcttgtttgtcacgtggtaattcatgttcaagggattatgttaaattggcaggaagcaaacgaacacttacaaagaaaatatttaaccaggttaacaaatacctgttgatcacccaatgtaaaattttcatcagggaacattagacaagtatttatctgtctacggtttctaactgaatgataccatggaagctctttaggaacaggataaaaacctttcttctatttttactccttggtcctctccttaaggcatacaacctgagtttgacaagatagtttctttgctggtaaaccacatctttgatcttcggttaacattatttagttcctaaataagtcttaacattccaccttatcccttcttgtaaacccacaggaaattatcttctaagagaatcaggcacaaaattgcataacattcactatatcatgtaagagacaaaagctactagtttcctgcttgaaatgaacttatttcattacaaacaattgtcaattttattttgagcattagtccctggaagattgctttttaatggaattattaccatctggcattagttcttttttgcattctaaaataaaaactgacgccaagaaagacagcgtcccctctctcccagcttacatcatctctgagcagcagaaacaggctccagaaaagccttataatttttctttccagacactatttttttataatgcttgtggtatttcactggaacatgcttgacttaactcagaacttaaatggaatatggaaaacaccatttatcttgctaaattaaaatcagaagttctatgtacaaatttacatgttgtattttaatgggtactaacactcaccaattgaatcctttttgctcttaaaacaacaagaagtaggacatggagaatgtggaaatggtcccaaaagaaagccccttggccgggcatggtggctcccccctgtaatcccagcactttgggaggccgaggcaggtggatcacaaggtcaggagttcaagaccagcctggccaagatggtgaaaccctgtctctactaaaaatacaaaaattagccgggtgtggtggcgggcacctgtaatcccaactactcaggaggctgaggcagaattgcctgaacctgggaggcggaggttgcagtgagctgagattgtgccactgcactccagcctgggcaacagagcaagactccrtctccagaaaaaaaaaaaaaaaaaagcccctctagaggaacagctgggctgggctgaggtagcctagagaagaggaagtgagaaaggaaaagtgcaaagaattggtcttcctatatttaatgagtgtactttaccaagacaggcgctgtgctaagtgctttccaactgttatcttatttgatcttcaccattattctatgagatgagcattgtctttttgccatctaatagtgaggctcagagaggttgagtgttttgatgaggtcacacaggaaacaggtggtgatgtttaacattaaacccaggatgactgcagcaggcatgtatgaagccattgtgtaagaggacataagtattggttttccagtgttaccgagagcaatttcagagggatggagctaaataagacacaaatgatttttttcttatttcactttttattatgaagtaacattaggaaaagagcataaaatatcatgtaaccccagatcttgtgttttttttgtttttgttgttttattttttatttttatttttttgagacagagtcttgttctgttgcccaggctggaatgcagtggcacaatgccagctcactgctcactacaagctcagcctcccaagttcaagcaattcttgtgactcagcgtcccaggtagctgggactacaggtgcctgccaccacgcccagctaatttttgtatttttagtagagacggggttttaccatgttcgccaggctggtcttgaactcctggcctcaagagattcacctgtcttggtctcccatagtgctgggattacagatgtgagccactgcgcatggcccagatcttggtttctaataccattcttcagtaaagggaggcaaggtttctcctagagaggctgattcgaggactggggcagaaaatacacaaggtgagcctggagcatgttgtagtaaggaagttctcaaaagaaacacacagtgatgggagctgtgaaaggaatacaagaaccaactggaagagctcccaatagccacagcaacaaaataaataaagtagtatcacattataaatcacccaaagtattaaattaatattcatgagctcatactgatacaagtaaatgatatgtgtaaatgataaataaacaaatgggggagaagagatccatcttttgtgcaaaagaattcccaataacttaggcagattcttcaccctcaaggaagtgcaacataactccccactccttaagagtgagttgggcatggtgactttttcccaaagagtagagtatggaaatgagttaaaaataataatagtagtaactgtacagtggcacatgacacacaggtcctcagccaggtgatcagtatcaccagagagaagtcatgttggtagtaggtgccctcaatatgatgtgataagaatgatactttacctctatggtcttccctccccaaacccataacctgcatctagttatggaaaaaatatcagccaagtcctaactgaggggccttcaagaaaacacctgagcagtactcctccaaactgtcaagagcacctaaaacaaggagagaccctcatagtcaagaggagcctaaagagacctgacaagtaaatgtaatgggagatcctggaagagaaaagggacattaaaaactaagaaaatctgaataaagtgtggaccttaattagtgataatgtgttaggatttgttcatgaattatgacacatataccagactaatgtaagatgttaatagggaaatttttgtgtgaggtacactgtctttggaattttctataaatctaaaactatcctaaaattaaaagtttatcgaaacagtgtatttgaataattatcaggtgactgagcataactagcatccagggttagaacattgccagcacccctaaacttcttatttcccttctgaattattaccagcctccccctagagaaaactactattataagttttacaataacatcttgtttttctttgtagtttttctactaatatgccttcctaaatagtacagtatagtttttgcctggttttgaaattgacatttacagaaatgtatgtatttatgtatcacaaatacataccatatgcattcttgtgtgtcttgcttaaaatttgtgttattccatgtagttagctattgcttattcattttcattgctgtacagaattacattgcatgaatacaccaaaatctatgcatacattttattgttgctggacttttggttatttctggtatggggctctgaaatggattttctcaccgtcagatttgtgagacactaaaattcaatatttgtggtagactttttttttaaagaatatccacgtgtggggcaaggatgtagaacctgctgtttgaaagcaagaatggtaatcttgttcagggaccatagtctaaactgaggagtatcaacaagccccatgatactgtcgttgcctcatcaagaggcagtaggtggcccaagtgtctcctgagcatgaragccttccttcccagagacgcgtggaccagcctatgtaccagctccttcacaattttactcaccactttgctggtgatgtctgtggaccaaatagcagaaaccttgatcttactaacaacttcctatgctttgaaaagaatgagactcttgggcaggttcctgccaaggtggccatgtaagaaagaagcaatcgcttgccttcactgttctctgatcctcttggctcaaataatccaggttcctgactcagcggagggaacgtgctaaattttctatgcaaactagccttttctgtgtatacctacacacatgcacagagagagtagaaatctaaggttgagtccaggagaactgttatgcttttctggccaccgtgaccatatttcccaaggagtgtcctttttaaatgtcatttatttttattttttgagacagggtcttgctctattgcccaggctggagttcaacgatgccatcacagctcactgcagactctacctcccaggctccagcaatcctcccacctcagcctcttaagtagctgggactataggcatgccaccatactcagctaatgtttgtattttttgtagagatgggatctcaccatgttgcccagcctggtctcaaacttctgggctcaagcagtctgcctactttctttccaaggagtatctttgaactaattgtattttatttttaacagtttaacagaggtacttctcaagccagcctattaagtccttttttaacctaaaaaggttaaaaaaacctaaaaaggactaaagtcccagtatattcagatcatgacttgtgtttatgatttaattgaaggcaaacaagcctaacaatgaaaatcccaggtataaagttagaccaaaatctcaccttggcttggcctcctctgagaggggttaccttgaacaaattactttccctttctgaacctcggtttcctcataggtagaaaaagaataataaaacttaccttgcaagtagattggatttagtacaaaaaatgtacataaagtatttaacacggttcctgacacaagaaggaaaactaatacataataaagattattgttgttgagaataaaaatacaataactcatctagtagttgttttcttatgcttatggtcagataccttgctaaagataagaatacagttataaagaatattagaatacggttataaaaagttactcaaaattttttttttgctctgtcgcctaggctggagtgcagtggcacgatcgcagctcactgcaagctccgcctcccgggttcaagcaattctcctgcctcagcctctcaagtagctgggactacaggcatatgccaccatgcctgactgatttttgtatttttagtagagagggggtttcaccatgttggccaggctggtcttgawctactggactcaagtggtccaccctcagcctcccaaagtgctgggattacaggcgtaagccaccacacctggcctcggttattagaagttactgtgtgctatttagtattttgtatttcctatgctaatttgaattcatagtgcgatgaaaaataaagcccagtgtcagtgaaaatgtctttgggttgttctcacttgattataagacaaaccaaattggtgtttctttccttaaggtttataattggagatttgttggattcagacaatgacatctttgagcaatccaaagaatacgactctcatggttcagaggactcacagaaggccttcgaccatgggacggagctcatcccttggtacgtgctgtccatccaagccgatgtgcaccagttcctgctgcagggggccacggtcatccactacgaccaggacacacacctctctgcccgctgcttcctccagcttcagcccgacaatagcaccttgacctgggtaaagcccacaactgcctccccagccagcagtaaagcaaaacttggtgtacttaataacacagctgagcctggaaaattcccactactgggtaatgctggattaastagcctgacggaaggggtcttggatctttttgcagtgaaggctgtatacatgggccaccctggcattgatatacacactgtgtgtgttcagaacaaactgggtagcatgttcctgtcagagactggtgtgacattgctctatgggcttcagaccacagacaacagattattgcacttcgtggcaccaaagcacacagctaaaatgctcttcagcggattattggaactcactagagctgtgagaaagatgaggaaattccctgaccaaagacagcagtggctgcggaaacagtacgtcagcctttatcaggtaaggggtgcagccatccctctttcctcactggcataatactcaagagcacacactgggtgaccagaccaccaggttcatgctcccagctctgacagttactacctgtggtgaccttgggcagcttttacttaacctcttggtaccccaatccccttttctataaaatggaaataataacacctgctcacagggtggctgtgagaattaattgaggctgtggctcacgcctgtaatcccagcactctgggaggccaagatgggtggatcacccaaggtcaggagtttgagaccggcctggccaacatggtgaaaccccgtctctactaaaaatacaaaaatttgctgggcatggtggcacatgcctgtaatcccagctactcagtaggctgaggcaggagaatcgctggaacccaggaggcagaggttgcagtgagccaagatcgtgccactgcattccagcctgggcaacagagcaagactctgtctcaggaaaaaaaaaaaaaaaaaaagttaatatgtgtaaagccacagtataattcataagtatgaagaatagtatctgcactcataggtggtcctatttgtattttgtatgaaatacattttacttagattttatagtaactgaaaatgcttatgttaactggtttctttgcagatgggagaactataatgaccctggtcgcggtttttattttgtattatatttatatattgtattatactacataaaaatagtcccaggatcattgtagttctcccatctgcaaagaaaccagttaatataagcattttcacttactcaggtttcaatggaaagcattgttatctgaatacttttattattagttagtgactagctgattcactgaaaactgtccctattgaaattaaaatcctggttcatttcctaacatgctatgtgacttttggagagttctttaacttactgcatattgctgcctaattgtagaggtgaggggttaatttctttaaggttgaaagaaatttttccaaatgtgggataattcttatgtggagttcttctttattaggtttgtagtggtggcagcccttagtgggcagtttttcacagtcagctgcttacattgagtgaattagtctttcattaaccctacgttatcaggtactctaacactatagtttagcgtggcaacagggctgggctgaatgagatagaagagacacaggcataaccagagtagcatcccttggggaaaagaggatacagattgcttggaaatcttaaactccacaagcaggtgacacttgaagtgtcattctcaaatgagttgtgtcaaagtattcagtttttctttgctatgcttttctatcttcatggcaaaaagaaatatcttttgtattgtcacagaacaaatagaactaccacttgaactactcaaatgcctgatttcatgtacttgtcacagttctaatacatttctgacaattaaaaacatttctcgccccaggaagttagacaaggcacatgtaatgccccttctttcttctttccctacacccatgtcmcgattatgagcagagaccatatcctgagtgactaacttgattaattgattaataagcagataggcctatgtacacaattatcctaatgttacacagaacaaagccagttttagttaactcgtctaaaatggaaaacaaatacctgactgtgtgtggcggcttatgcctgtaatcacagcactttgggaggctgmggcggtagatcacttgaggtcaggagttcgagaccagcctggccaacatggcaaaatcccgcctctactaaaaatacaaaaaattagtcatgcacctataatcccagctactcatgaggctgaggcaggagaatcgcttgagcctgggagatggaggttgcagtgagccaagataatgccactgcactccagcctgggtgacagagcaagactgtctcaaaaaaacaaacaaacaaacaaaaaatacccgcctcctgtgtactccacagggcacagggagctttcagtgtactcagctggaaaaaaaaaaaaaagtcttcaggagctattgtgaatgtcagtttttaattacagctattccttggccttctagaatcaggaaaattcatcaaatatggacatagaccagtgtttgagctcaattacaattcctgtcacaaagtctatgtggtttagttgttccatttgtctgcttctcaagcttatagcataggtaactgaattaatacataagaggtacttggtttctcatttaccctggcactcttcagcttttactgaaggaggcaccagctgagaccacgaacggcaggtgaagaggtaagagttgctgctagaacagagacagaagtgacttagagaagactcagtcctacccagctgcaaacacagctccaccctcccccaccacccctgcacagaaccaagatgttacagtgtagaggcaaaacagctcatactcaaccacttctgaaatataggtgatgttattccttgacactgctctctctacatgagccatttatgaagtcaggcaacgtgccttagaaacagacactcaagatttctttcgaaagaaaaaagttggaaagaccaatggactgatcattttctcatcatataaaccagttcccaaactgactcagggatcaccaaaaagatgctaacttagtactcagagaacaaaagatcaaatcttttgttaatgtttaatagctgtattggtgatttataatacctcttagaaaattaaattctctcagatgccctaaagttaaaaaaaaaaactatttaaatttacctataagctaaagaaatttgtgaaacaatgtttgggtttttccaaacttctgttaacagctctataagaggattttttaatccctagtttgggaagtgcttatatggaaaataatcattctgacattagaatttccttatgtagtaaatgtaagtgaagttactttcaaatactacaagtatttgagtactactgatggaagtagtaacaagagataacacagaagacaagaagaagtaataacatttgtagagaagcctagaaaaatacaggaaaatccaagaaagtaaactgcagagatgttgatgtggggtgtggaggaaagaccaatgtcttgagctttggcccaaggttatcatggacagaactgayggcccataatcctgggtatttggaaggtgctctgggaggctaagaaagttaaatatggaattaccaggtaaatatctttggttataagcaaaaaagattctggctatctttacgtgggggaaaaaaaaaagattcattcaaaggatgtagattagtttaatggtcttcaaaatgtcacatgcaaagatatgccaagaggtaacagtgcatggatattttttaaggaatctattttctaatcttcaactttcacataaactgttttctccactgcactccagcctgggcaagagtgcgagactctgtctcaaaaaaaaaaaaaaaaaaactgttttctaaaattgaacatgtgccttcacttacagtagtccatctcccacattaaaaaaagaaggtaggccaggtgcggtggctcagagctgtaatcccagcactttgggaggccgaagtgggtggatcacttgaggccaggggttcgagaccagcctggccaacatggtgaaactccatctctactaaaaatgcaaaaattagctgggtgtggtggtacgcacctgtaatcccagacacctgggaattgaggcaggagaatcagttgaaaccgggaggcggaggttgcagtgagccaagatcacaccactgcactccagcctgggcgacagagggagactccatctccaagaaaaaaaaaagagaagaaagtatatccttcatccatcccaaacaagtttattattttgtgtaaaacaaaagaaagattaaaactacattttacttcccagaaagcttcctttaaagactaaacaaaggtatccttccttttcctgacctaaacatatttctgttagtggtaaagtttgacccatgttgggatgttctgaaattagaaaaatcaaagcagtataggttaatggtgccaattattttacatgtaaactataatgggcctattaagcttttaaagatgtattggttaaaatccataaataaaagttttactcttctttcagattcagagtatgttattcaaaatggtagttaaaacgtatccattaggtttcattcatgaaatgtttattccaatttgaagtcactcctagtgacttgttagcagggattctcttcagcaggcctccagcagatggactgatctccaaccattttcattctctgtatcactgcattcaagaaccctgctccaggaaggggcttctgattggcttattgggatcatgtgccaatcattggtcaaaggaggatatttcatcttgattgacacacccatcgagactatatccagtggagaatagacagttaaagtaaaatcggggtatggttagagaagggagaaacagatcatggacagccataagtcacaatgtcccactataagaggtcaccmaaaggtttctttgtcaagtacccaagttattcagcatcctgggatccacagcaggatgcaggaagtgggaatgcacaagtcataacatcagatagttattaaacattaggctgaaggagcaagcacacacacacacaaagcttctttgttttttgcatatgatctgcaacaaagcaaaatctatccataagcatttctttggaactgcaaaggagagccagcctgaaatgtttttgaagagtaaacacagtacatggaaattaatttttaargagcccgcttatacagtgtatgaaatatcaatatcatctttagctcataggcaactttttgtggttttattaactgacttatggggagaatcattgacaattgtttaattaatagatccctgctgttacttacaggatgctacacagagttgccttagaagcagtagctactgtgaacaattgcctgccccttgagtgtgttgttgctgctcagagcatcctaatatgtatggtgttctgagtcccatgggctccctatctttagatttcagccactcaaggggatggcagcccaactattttaggagctccctggggcccttcaaagggaatttcatgcatgtcacacacaccctgtatttcaagtccgactgtcccaagcatcaaactagttgaaaacctacctggcaataatggacaaatacaacttgattttacttagattgataccctgcccctctcccttccaggatgtccaaggccctaatttgcaaagtaagtctaaatgaattttcctacagtggtagttctgcaatttaacctctgtaaatgggatgggaagtttttgttccccagttgatrtattaaagcatgtcactggaactcagcagkgatgtgaccaggacaacgggggacatgatgaaattcctgacagagaatcttgtgagttagaaaacagtcacttgggtggccagatcattattcttctgtggccgtctgtgctcttccacctcttggaattttctgggagacattaatatatttacttccccattgcttgatgcttcctattgtgttcaccatgtggctctttcacaggaggatggacggtatgaaggcccaactttggctcaygctgtggagttgtttggtggcagacggtggagtgctcgaaaccccagccccggaacatcagcaaagaatgctgagaagcccaatatgcagagaaacaataccctgggcataagcactaccaagaaaaagaagaaaatcctcatgagggtagagtgttatttgtttattaagcattaaacccatcttccmggaccgctgtatggtgaacatcaccataaaacacttaaggttgtttgggttgaggacaaagtcaggtataaaatagaagatacaagggcttaccacatacctccatggtgccatgctagtgccaggaacaccagggaaaagacaaggtccgcagaaggacatagacatgtaaacaaacacagtgygagctaaaaagagacatcgttgagtcacccacaaagtgctgtgggggcagagagaaggaaaatagagagctgaggggcaggcacagagggctccacagagcaactgacacgcaggtcttgaagaacgtgtaggattttaccaagcaaagaacataggagaaagtatccccagcagaggagacagcatagaggcataaaagacagcttgttcaaggaagcacatgctgttctggatggctagagcatgagcactctgtgggcaaggaagggctagaagagaacagagatcacagaggccccaaatactgtgtgtagaacacaatgtaaagtatattagcactgtgtattataaactatataatatgaaatatcactatgaagtgataatatatttgcttcatggctatttgtttgtttgtgttgctataaagaaatacttgaggctgggtaatttataaagaaagaagkttaattgactcacagttctgcaggtgtacaggaagcatggtgccagcatctgcttctggtgacagcctccggaagcttacagtcatggcagaaggtgaagcgggagccagcgcatgacatggcaagagcaggagtgagagagaaggggagaggtgccacacactttttttttctcttagaaacagggtcttgctctgtcacccaggctggagtgcagtggtgtgatcatggctcactgcagcttcaaactcctgggctcaagctgttctcctgcctcagcctgccaagtatctgggaccacaggtgtacaccaccatgcctggctaattttttttattttttatagagacagggtctcactatgttgcccaggctggtctcgaactccaggccttaagtaatcctattgtctcagcctcccaaagtgttgggattacaggcatgagccaccacacccagcctacacacttttaaataactagatcttgtgtgaagtcagagctagaactcactcatcaccaagggaatgatcctcagccattcatgagggatccacccccatgatccaaacacctcccactaggccccacctctaacactgggaattacatttcaacatgagatttgaaggggacaaacatccaaaccatatcatctatctagaaaaagtgccactctctttgcttatgggaggctttgatgctcatgtcaaattttatctgcttcacagtttttttctgtacacagaggttccggaggttctgtgccgcctcttgtctgcctccctcccctgaggagtactgctgtatagtaaagaacaactgaaataatatgacatgagaatactcggtcagccttaatgtaggtctttacnggttttaccaggaagaggcagtattgaaggtgggtaggtcagaaaatagagacctacctgaactaaagcagtgatgggagagaaatacaggcttggaaccatcgtgagctttgtgttcccaggktgagagtggagaggtaactgacgatgagatggcaacccgaaaggccaagatgcacaaagagtgtcgaagccggagtggttctgatcctcaagacattaatgaacaagaagaatcaggtaaagcggcatgtttacatctgagatttttgttttttaatttttgtgggaaaaaaagtatacatttggttttaaattgtgatttaagcattgcaaacatttctaayaaaactctttgtcctaaccagacaatgaaacctaaaggtacttctgcaagcatagtgtgcttggaataaaatccccattaattaacttgccattactgacagggagtattagatatacatggtataatttgatggattaaaccagtgattctcaaccttggctgcatattagagcttttaagaaaatctgattcctctggccacatctaagaataactgattcagatattctctggctgggaccttgggacctggacatcttatttatttttgaagcttcccagacagttctaacatgtagccagttgagaccccaccagattagcccattcataaagatattttggtgctgcttgtatagaaaccagctgcataggttgatttgctcagacatccagaagcctctmtggtttgtatttggttctgagggaaagtataatctgagtcattstctcttttctgtctttcatcctcacagaggtgaatgccatcgctaaccctccaaaccccctcccttccagaagagcccactctttgaccacagctgggtcccccaacttggctgccgggacgtcatctcccatcaggccagtgtcctcccctgtgctgtcttcttcaaacaagagcccatccaggtggggccttaacatgataaaacagaaggacccttcacattattccagttgtgtggaagggcatatctttacagttgtctatggaaagactatttcacattttgatgtatagttgaactgaaaactgaaaaatcccaaaattttaaatgatcctaattctcccaattttgtactcctaccttctcatattacttcaaaggtcagtagcagtaacaaaacctaagccatgattctccaaatctgtactatccagtacactagccactaactagatgtgggtatttaaattcaaatgtaaattaattaaaattaaagaaaatttaaaattcagttcctcagtcacagtagtgacatttcaagtgctccatagccacaagaagctgatggttattatcccaaagagtgtagatagagaacatttctttttatcattgcagaaagttctattggatagcactgctctaaacgaagaagagagaatagattgttttaatgtaaactatttggcccctttgctaatcgatgaaatatatttaatacttttctcatatgtaagttatgcatgtctagaggaatgaattcaagtatcacagcaagttggatatgtttaagtataaatctaaagctggataaattactttataagttccatgcaaattacatatttgaaacaatatcttccctctcagaagaaggaatgatattaaaatggcagacttccaaagggaaccagaatgctgctccatcctcctgtatcccacattaaagtttaagagatgtggaggttccagacagaaccaagctaaaacaggaactctttactttatctcacacacacacacacacacacacacacacacacacactctctctctctctctctctctctctctctctctctctctctccccacccctccctctctccccacgcccctctctctctttctccctttctctctctttctcttggaagcttcttattaasaatcctggctgggcacggtggctctcacatgtaatcctagcactttaggaggtcagggaaggaggatcacttgagcccccaggaattcgagaccagcctgagcaacagaaaccccatctctacaaaaagtaaaacaattagcgggtgtggtggttctcacctctggtcccagctactcaggaggctgaggtgtgagagtatcacttgagcctgggaggttccggctgcagtgagccataatcatgccattgcgctccagcctaggcaacagagtgagagcttgtctcaaaaaaaaaaaaaaaaaagaaagaaagaaagaaagaaaaagaaacagaaaatagaaagaaaaaagaatcctacagtaaattatcttttaaataaaaattctttcacaatgtgagcaatgaacttataatttatgctttatacattcacattctacaatgggtgagcatgggtcaaggttatatgggaattctttgtaccactcttgcaacttttatgtaaatttagattcataacaaaactaaaagttacaaaaatcagaatcctgtttattatactttcagcctgtgtagtatcctgggtaaacagcaaggaacctggattaaatggcatttcccgtttatttcaatcattcatgagcaggaaaagaaaggacgaagtaagggaggaaaatattttaaaaagagaaattaacatgccagatgcaagatcagaaggccaaccccaggaggacagggatcagcacccactcaagtgttttaaaacagaaagaaaacacaagacaggaggaaaaatcagcttgaatgctattaagggagaaagctagactgaatcctaagtctgatagtgggaagagtggacaaacagagtttcctagaatcaaagggagatgggttcctacagacagtagctggatctgcaaccagaaagaagcaagacaggaaatttacttctttagctgcaaatgatgaagtcacctttttcctcttcctgcacctctaccctatgtttcctgcactacactggggatcgacaacctacaacctatgactacaaaatgctaaaaagctatcaatttgtagtgctctttcattgctgaaggtgaccttcaaatgtcagcacaaattaattttccatgagtgaacattgttagcagggttgagagtcacttcaacaaactatatattttatatttatagtcttaaatatatagtttttagattatatatttaatatacataaaatagacytcatgatattctctatactttcttatatatttgaaatatttcaaaaaaaacttttaaaatccaagacaaaaaaaaacaggtcctctagaactagaaataccatttgacccagccatcccattactgggcatatacccaaaggattataaatcatgctgctataaagacacatgtacacgtatgtttattgcggcactattcacaatagcaaagacttggaaccaacccaaatgtccatcaatgatagactggattaagaaaatgtgacacatagacaccattggaatactatgcagccataaaaaggatgagcttcatgtcctttgtggggacatagatgaagctggaaaccatcattctcagcaaactatcgcaaggacagaaaaccaaacaccgcgtgttctcactcataggtaggaattgaacaatgagaacacttggacacagggcggggaatatcacacaccagggcctgttgtggggtggagggaggagggagggatagcattaggagatatacctaatgtaaaggacgagttaatgggtgcagcataccaacatggcacatgtatacatatgtaacaaacctgtacattgtgcacatgtaccctagaacttaaagtataatttaaaaaatagatcctgttcattaatttgactacaaaccataatcaaaacatctctcataccattgtgtcaggaaatcagtatagaaaataaaaaatgttgtgaaacagtaagtctgttctgagttgactgatatttctacattgaatagatgcagccttggaaggtgcaaatataatcctagtcaaagctggcttttttccattcttttttaaattttctaaaattagagacagtgcctcactatgttggccaggctggtttcgaacacctggggtcaagcaatcttcccacctcagccttccaaagtgctgagattataagcatgagccaccgcacccagccctttccattcttaacatttttccggttcacatttttcattaatatttaaaagctcttctctgttttcatctaaggactggttaagaaaggaatcagacaatacactcaaaggtttcttcttaaatgtaattctataacttagaatatagaaaagaacgtgcattatttcccatagattaagagtgagtaatttggggctctttttaatagacatcttcagaaacactgagttattttgcccattgatctgcaatttcaaagaactgatttgattaatagaggaatattaacctcagccctgggcccttattaaatagactagaaacatgttttctttttcacatagaacatgttttatttcctctgatacaatataggttaagagatgtgaaaagagagtactggaaaatagcttcaatcttaaataacttgcactcatccttttgctcatattgctaattggagcaagtctggtgggacagaatcacwacagtggcctgcccttgtgcccatgaaggccttgtctttgttgcagtgcttggagcagtagtagctggcacgggcggatcaaaggcggcatgaagggatttcagagcttcatggtttcagatagcaacatgagttttgttgaatttgttgagctgttcaaatcattcaggtacagtcttatgtttccttcttattctttctcaggcccccccatttctataaagatactcaatgagaggtgttttccattcctcattcagtgtcaggagccgcaaggacctgaaggatctgtttgatgtctatgcagtgccctgcaaccgatctggctccgagtcagccccactctacaccaacctgacaattgatgaaaacaccagcgatcttcagcctgacctaggtttgttgaacattttaggatttccctttgggatcaatctgtctaaaacttaaggtcagaggtccagtcacacaaactctgagcctgtcccacatagtgtgctattactgctgtgtagggaaagacttaagagaattttttttttttttttgagatgcagtctcactctgtagcccaggctggagtgcagtggtgcaatctcagctcactgctacctccacctcccgggttcaattgattctcctgcctcagcctcctgagtagctgggactactggcatgtgccaccatgcctggctaattttttgtatttttaatagagacaagggtttcaccatgttagccagaatggtctcgatctcctgacctcgtgatctgccacctcagcctcccaaagtgctgagtttacaggcatgagccacctcacctggccaacacttagagaattattttaaggtgtcatctggtgttgagggagcaggtgctactggcattttgagcaaagaaattcatcattgtgtggttctgcccatgtatttatttaaccaataaagccttccagtcattctgacaaccaaaaaccctttcccgactrtattagtccattttcatgctgctgatgaagacatacccaagactgggtaatttataaggaaaaagaggtttaaggggctcacagttccacctggctggggaggccttacaatcatggaagaagatgaaaggcgtgtctcacatggcagcagacaagagaacttgtgcaggaaaaactcccctttataaaaccatcagatctcatgagacttattcactatcatgagaacattttcacatgggaaagacctgcccccatgattcaactacctcccaccaggtcccttccacaacatggaattgtgggagctacaattcaagatgaaatttgggtggggacacagccaaaccatatcactgaccatttccaaatgtctgctaggtatgtggtgtgtgtcacagtggagaacccccagtctcttccctacctacagacagttgtgtgttcaatcacagggcagtagtctcctgccctttgacaaggagagtctttagcgccttccacagggtacttctgtctgaatgattgtccaggatatatttcctactgtataaacaagaatgtctcattcttctatctcactcaccaccaccaccattactatcaccacccaygcattttctaaccacttatgcatttccagcctatcattttcctcctctgttcttcctggaaactataaacacaaatagcaaaacaaaaaactttcctcttttatgcagttgcttcataattatttataagtttatgttgtccttgagctaagactattaagtattgttcaactttagtcataaaatctccataaccatggattagtcaagtagttacatttttcaaaaattattggactttattttttgttctattatattttattattttattatttatcatgattttcatgtattttttatttttgttttattttaaaatattattattttaaaataatgtaattttttgtagagacagggtcttgctctgttgaccaggctgctctcaaactcctagcctcaagcaatcctcctgcctcagcttcccaaagtgcagggatcttaggcatgagcctccatgcccagcttagactttatttttagagcaattttaggtttatggaaaaatgagtggaaagtacagagttccaatatactctcttctactctcccacacagactttcttctgttagtaatatctggcattagtgtagtacatttgttacaattgagttaatattgatatattatgatgaactgaagtccatagttaacgttaggattcactgtttgtgttgtgcattctatgggttttgacaaatgtgtaatgacatgtatccacctttacagtatcatacaggacagtttcactgccctgaaagttccttatgcttcatttttccatcccccccgcgacctccctccaaatccctggcagccactgctctttttattatctccatagttttgccttttccagaatgtcatatagttggaatcacacagtacatagcattttcagactggcgtctttcacttagcaatatgcatttaagtttccttcctccgtggctttttgcagcttggtagcccatttctttttaccctgggtaacattccattttgcggaggtactacagtttgtttatccattcacctactgaagtatatcttggttgcttccaagttttagcaattatgaataaagctgctataaacatttgtattcaggtttttgtgtgggcataagtttttccatcatttgggtaaatacctaagagtgcaattgctggatcatatggtaagcctatgtttagctccataagaaactgccagactgtcttccaaagtggctaaaattaaaatggccataccaaagttggtgcgaatgtgaagcaattggaacattgcaggtgggaatgtaaactggtacaaccactttggaagacagtgtggcagtttcttactaagctaaacatattccttccatgtgaccagcaattacagtacttggtatttacccaaatgagttgaaaaatttatattcacataaaaatctgtaaacaaatgcttatattaaacagtaaaactgtaattttaagggtatatcttcaatctctacaaacaaaaatgtgcaagtagttactccctaaaaccaaagcctgaatttcacctaagtccccagctgaacctacatttagttgccatgtaataccacatgggatatcaagatcatcaacctagctctgtcttcttttcctttttttttttttttttgagacagactctcactctgttgcccaggctagagtgcagtggcgtaatcttggctcactgcaaccgccgcctcctgggttcaagcaactcttatgcctcagcctcccgagtggctgggactacaggtgcacaccaccatgcctggctaatttttgtatttctagtagagacggggattcaccatgttggccaggctggtcttgagctccagacctcaggtggtccacctgcctcagcctcccaaagtgctaggattacagtcatgagccaccatgctcagcctttatttattcattgatttgttttttattcctatcactatgtgaagccagaaataaacacttctttgatggcttgtttaggtacattagtaaagagcttctccattttaataactccacaccattatctccaaaatgaactttgcaaaagatgctggctatcttgtccatgtactgtggtgattctgtttcagatctgttgaccagaaatgtctcggatttggggttgttcattaagagtaaacagcagctatcggacaaccagaggcagatatctgatgccattgctgctgcaagcattgtgacaaatggcactgggattgagagcacatctctgggcatttttggggtgggcatacttcagctcaacgatttcctcgtgaattgccaaggagaacactgcacttatgatgaaatcctcagcatcatccaggtttgtgcctgttttgtgtgtgcatgtgtgtgtgatgcctctggctattctaataatttgctgctaaatgtttattctttctatacttctttccaaagcctttaaatctgggacagatatacagttttgtttttttttttgtttttttgggtgtttttgagacagagtcttactctgtggccaggctggagtgcagtggtgtgatctcggctcactacaacctccgcctcccaggttcaaacgattctcctgcctcagcctcctgagtagctgggactacaggtgtgcgccaccacgcccagctaatttttgtgtttttagtagagatggggtttcaccatgttggccaggatggtctcaatctcttgacctcgtgatctgcccacctcggcctcccaaagtgctgggattacaggcgtgagccactgcgcccgaccttgttttgttttgtttttttaacaaaataccaagtatgttttttaacaaaataccaagtatgggctgggtgtggtggttcatgcctgtaatcccagcactctgggaggctgaggccggtggatcacctgagatcaggagttcaagaccagcctggccaacatggtgaaactgcatctccactaaaaatacaaaaattagccaggtgtggtggtgcgtgcctgtaatcccagctacctgggagagtggagcaggagaatcactggaacacgggaggcagagactgcagtgagctgagatcacaccactgcattccagcctcggcaacagagcaagaccccatctcaaaaaaaaaaaaaaaaagaaaaagaaaaatcagccaggcatggtggtccacgcttataatcccagctacctgggaggctgagacacgagaatcgcttgagcccaggagtcacagaggttgcagtgagctaagatcacaccaccgcacaccagtctgggtaacagagygaaaccctgtctcaaaaaaacaaacaaaaaacaagtatgtaagtgttcttctttaacatattattagtgtattattacataatatgtttttctttaacatattatatgttcttctttaacattattagtgtaataatattaacatattattagtgtattattacatattaatgtaggtcccaggctttctctaactcagtaactattataaggagttggtacataattttttgttgttattctagaacatgcaacagatttagtctaggttttcaacctcattagtcattaaatgaacatgcactagttcctactatgctggctcagttttaggaggtgggaatatagcagagaataagataaaagttctggtcctcaatgcagcttacattctagaaggtgaggcagacaacaaagatacgatgtaatttcaggtaataatggggtaggggaaaaactgagtcaagtaaaggaatggaatgatacaggaggtgggctgaggagagtaagcaaaggccacttggaagaggtggcatttggactgagccctaagtcaataaccagtttgatggtctcgggaaagagcattccccacagggagccacaaggtcaaagaccaagacagcagcaagctgggggtttatgaggaaccacaaaaagctggtgtactgtgagctgcacaagccaggcagagaatggcaggcatggtgtcagacagatgtgcaagggcccaatcatccgggccttttagagcttgataaggaggttggctttagtccatgtgaaatgggataccactgaaatttttgagcaggggagtaacatgatttgattttttttttttttttttttttttttttgagacagagtcttgctctgtcacccaggctggagggcagtggcgcgatctttgttcactgcaacctccgcctcccaggttcaagcaattctcctgcctcagcctcccaagtagctgggattacaggcacacagcaccatgcccagctaatttttgtatttttactagagatggggtttcaccatgttggccaggctggtctcgaactcctgacctcgtgatccacccacctcagcctcccaaagtgctaggattacaggcgtgagccaccgcgcctggctgatttattttttatgagattactctgagccacgcatggtggcacaaacctgtagtcccagctactcaggaagctgaggcagaaggattgcctgagcccagaagtttgaggccaggctgggcaatatagtaagaccctgtctctaaaacaaaattttaagtggttactctggccccattgtaaactgtgtgggtgaaggaacagatgcagagagactgcttaggaagctatcatagtaaccagcaatagctggtgaaggtttacactacagggtgtcagcagagaggagcggtgtggctccatgcaacaaatgagtctaggtttcaacctcccttatcacctgactgggtatcagtgtattagttgtccagcagttggatttgatcaccgaaaatgctaaaattgtgagattactatcacactgttgagtgctcattatgattttactaaatacaggcatggcactaagtgctctatgtgaatcatctcagttcacctctcaccaactttatggtagctgctattattatccccattttcacctggataaactgatacactttgttttcatagaaatcagccttcttttctcattctcttcttttttctattaaataaatatgcttagtataataaactcacatataataaatgttttcttttggactaaaaactacttcttaccactacgttactaaattagttcaaatatttggtttagatgtttcctgatgaaaacagaacagctttaaaaaatgatgtggtggtttctttccccctcttagtttccttaacctaaataacacttttttttttaatcccttgcagaagttcgagcctagcatcagtatgtgtcatcagggactaatgtcatttgaagggtttgccaggtaacttttaaaatatcttttgcccntcttttaagagtagatgcatttttcccatgcagtcttaagaaaatttgtttcacctaggtttctgatggataaagaaaattttgcctcaaaaaatgatgagtcacaggagaacattaaagaactgcagctacccctctcatactattacatcgaatcttcgcacaatacctacctcacgggccatcagctcaaaggagaatcctcrgtagaactctacagccaggtacagggaatgccacttggaatgtggtttttattaaacctaattatttatgtaacccccaaagtcaaaaaaacctgaccccagactcctttgaagagcttatagagtaagctattacatgtcaaatgtgaggaaccatgatgtgtgggaaaactggctatactacagcagtcgttttctttacttcttttgttttgttttcccccatctatacttaacctttattctgggccaaaatgaaagtgtttgtttgagactcatagcttttagatcctagttagtctgacctactcccactaaaattagattttcccatgggaaaattatctaatcgtttctctaactgctaaataatatattgtagtgggaaagcatagtagaaaatgcaacttcctatgtacttattcccaaaatattgtttgttttgcttttcagtttgttaaataatcaatctatccctatggtaaccaaaaaaaatgcagaaaaaaatctacacagactttaggcactgtccctacacattaaattcatcagaatgttctttgaaactcagtaggttctctagactagaaaaagtacatccttttgacctaaacatccaacttgcaatgatctgcgtgtccattgcctctctgctggatggtctgcagcttcctcatctattctgccttttttcttaactctttcaagaagggtcaattcggttggagccaggcagggaatataagtgtgtcattgtgtgcacacgtgggtccaggtttgaaaactacaggtgtattgtttacataaccccagcaccagtgaggtttctttgttctccagattagtccagatattcctcaaagcatggggcaattttttgtcccaaagcttgcttagcgggaatatgtattttaaactctattttctaaggaaactttattatgaatgaagatgtgttcttagagcagtgattttcaaaatagaagttctgtcatggggcctcagccccccacactgagatgaggaagccagagagtaggaggggtgccatacgctgccccatttcaggtaatgtactactcctctacacactacatactggccctcccttcgcacacagaatgccaaagttaaaagaagtttgaaatccattattctataggaatgaaattaaatatacatataaatacagatacttatatatatttcatatacacatttgtaggtacacacatatacatgcgtgtacatatatgtgtaagtgcatatatacatatctatgtatatttatgtacttgtgtgtatccacatttatcccagggaaataaacaaggaccagtgtcctggctttaatttctatttcattcctctgtttgacttcaaacagtttttaaacctcttaatatcacaccccaaggagagactctcacagcttttgaataaggcacaagaacccctcaaatagactcagagatgtgactaaacctagtgtgcaggtggatccctcttacttcatttctaacccctctccactcttccttagcccttcctaattacctcttaacattactccatggggcaaatgggaagtgagaataagccctgttcttctcatctagaatttccagcccaggttttcctcttctagccatatgtggatatctaaggttacacagactttggtgaagacctttagtccttcaatgctgaaaagccatctcatctgttgccagttgctgaacattattcctggtctggcaggggcaccacagagataagcagcttggtgttccagccaccattttacatagcaatttccagcccaaggcactgcacctctagatactctagctgctgaaagaagcagatagccttgagattctaggccactgactatgctgtaaaataggaagaatatagcacttatcccatataaaagtgttaaaatgagaatcattccactatctgagcttagttgcagaaactctagtggccactaagccccagtaatggattgctgtcacacagaaatagttatgtgcattctaaaatcagtgggtaggcacatttacagatgtatcaatttcttggcttgggtcactattccagtatgtaataattttttaagatgatgtacagatctatggaggaagaggttgcttcaagcaaactttatagagttgcaacccaagcacatgtattgagctctgcttcccacttcagatccaggataacaaataggtatcagctcatctgattctttggtagtgttttctggagcactttaataaagaggttatgagctaacatattaaagcttaaaggacaagtgtgcctagcttgattactgatgtctgctgtgggtatgggagaaaggaaccatttatggattatttgccatccctgctctagttgctattctggaattagatagccaggcaaatccttgataactctgcttccactcttcttacatgttatgcattcacagcaaagatgtttaatcgtggcttaatttgggtcttaatggaagtgattttatcctgattggcttgctgtaaatgtttagccagttcattaaggactcagtggccttattttctctgggctgtggcatcagcattttcacctccattgatgtctacccagatagagagcacttgcctggctctctaatttgaagacgtgccctttcaaggggccaaagttgctaggaaaatggccatatggttttgctatcaaattttactttcctttaatatccagctctggtaaacactctttctaccttaatctgttcccttccttccccactctggattaattgtggcctttggcaaaaatgccatgtttgttttagaccatttgcccttctgctttagtcctgagtgtaaacactgcctgatatgtagaactacatgctgggtttagttcgaggctttatctccaggtgctcacctggggtggattcgctcattgatcacacaggtccttttgcaaggctgtcgaagtgtagaattggactgctgggacggagacgatgggatgcccatcatttatcatggacatacgctgacaaccaagatccccttcaaggtaatccttcataactttctttaaatcaaatcacaaagagacattatcttcatttgtctttttttttttttttttttttttttgagacgggttctcgctctgttatccaggctggagtagagtggtaccatcttggctcactgcaacctctgcctccgaggttcaagagattctcctacatcagcctcccaagtagctaggattacaagcccawaccatcaagcccasccaatttttgtatttccagtagagatggggtttcaccacgttggccaggctggtctcaaactcctgacctcaagtgctccgcccgcccctcagcctcccaaagtaccgggattacagacgtgagccaccgtgcctggccttcattcttyatttaaatcagtgacttgaccaaattacaccttagatcaagggtctttatgctgggtctaaatgaagacttcccaaaagtgtttgctgtatcatgtggaatgtgcacatgttcatttttctggagttaatctagaactctcattagattccccattcaacccaagttagtaaccattaccttacattagttagcatgtaataatattgttgcaatttttacgtaatatgatatataaaggcaaggtctattttcctgctataggaattaatggtcatttgtcctagtgtcatgctgacaaaggccaatgtcaggagttaggagatggttaaatagttagcattataatgtaatgagcatcagttccacctaagaagattggtcacccaggaagactgatctcactggatttgtgtttcaaattctgggtagcttattagttgagttatgcaattactaccttcattcagagggtcttaggctatataacataatttttctctgaactgtggccaggttgtgaaggaatattatttttattttacatgtagaaatagtggctaaaatgcattttctcctcaacttggtttcctatttagcattcctaaaactcctgtatgctatattggcatgggcatgagttgataactgtgtttacayatacacataaatatatgtgacatatgtcttattgcctcaaataaattataaactctttataagcaagaaagtattttatgcttaattatgtttgctgctataactaggacagtgtcttttacctgcaatatactctatatatgtatacagagagagtatatgtatataaatagatttgttaaattcaatatgatagttgttccttatagtatgtgaacaatactcactataaagtttaatgtctttctrcaaaatggccttatcctcatgcttcatttgaaaatacgaaaaccatctttggccagagtctgctgcatgtaacaattgagatgctttctgtggctataactaccctgccttctgaccaccttgacagatatctggactctaatgagctgttttggctctcataggaagtggttgaagccattgatcgcagtgccttcatcaactctgacctgccaatcatcatatcgattgagaaccactgttcattgcctcagcaacgaaaaatggcagaaattttcaaggtgagctctcaacaaaaaggcaggatggtatgttggcccttgttttgcaattgtcattgggttgttttgttttgttttgttttttgagacagagtctcnctctctcacccaggctggagtgcagtggtgcagtcttggctcactgcaacctctgcctctgaggttcaagcgattgtcctgcctcagcctcccgagtagctgggattaccagcatgcgcccccatgcctggctaatttttgtatttttagtagagatgaggtttcgccatgatggccaggctgctctggaactcctggcttcaagtgatccacccatctcggcctcccaaagtnctgggattataggcgtgagacactgcacccagccgtcattaggtttaaatgaggcctttgtggactatgctgcaattagaccttggctgtgaagcatatacagttagggtcccacaaacctgagaaattgggctgttcttagagcctgggccctctctgggatggtccctattttcagctggagtgatataagtattgctctctggtctccttaccctttccagaaagccttaggagattaggatagaccaactctccaacacttctggtaccacaagtcagggatgccaggatgtcatctgtcagttgtatgtggaaaagctgaaaatatctcagggcaagtaagtcaaatcttataggagaagatcatcttttttttttttttttttttttttttgcgatggagtctcgctctgtcacccaggctggagtgcagtggtgcaatctctgctcactgcaagctctgcctcccaggttcacaccattctcctgcctcagcctcctgagtagctgggactacaggcgcccaccaccacgtctggctaattttttgtatttttagtagagatggggtttcaccatgttagccaggatggtctcgaactcctgacctcatgatccacccacctcagcctcccagagtgctgggattacatacgtgaggcaccgcacccagccaagaagatcttcttataccacagtacaaagatccaagttagcaaagagcttagactggccagaacagttgctgtgttaacagtcagtccttccttatataagggtatgataatgtatcaggggaacctgcccccaatgtttcaacgtaggttctttctattttccctaagtgtcagccagtctgagatataaagagaaagaatacaaagagaggaattttacagctgggctgctgggggcgacatcacatattgataggtccatgatgcccacctgagccgcaaacccagcaagttttattaaggatttcaaaaggggtttacaaacagggagtaggtcacatgcttcaagggacaaaaggcagagcaaggatcacatgcttctgaggaaacaggaccagggcaaaatcagaaactcctgataagggtctacgttcagcggtgtacgtattgtcttgataaacatattaacagaaaacagggttcaagagcagagaaccggtctgacctcaaatttaccagggctggggtttcccaatcctagtaagcctgaaggtactgcaggagaccagggcatgtctcagtccttatctcaactgcataggacagacattcccagagcagctgtttatagacctccccccaggaatgcaattcttttcctagggtcttaatattatattccttgctaggaaaagaatttagcaatatctctcctacttgcacgtctgtttataggctctctgcaacaagaaaaatatggctctttttgcctgaccctgcaggcggtcacaccttgtggttgtcttcccttgttccctaaaatcgctgttattctgttcattttcaaggtgcactgatttcatattgtccaaacacacatgttttacaatcaatttgtacaatagtggtcctgaggtgacgtacattttcagcttacaaagataacaggattaagagattgaagtaaagacaggcataagaaattaaaaagtatgaattttgggaacgataaacgtccgtgaaatcttcacaatttatgttcctctgccacggctccagctggtccctccgttcgggatccctgacttcccacaacaataatgcacccagatttagaagcagatattccattatacttcccccttcctttaatggtagaggcatttgtggaaatgaggctctcagtgggaaagaggggcactgacaaaatgtccccaaatattaatgccaacaaaactaattaacttttcatattgtcctggcctaagctttgattttttttttcaattaaaaaataactcaaggccaggcccagtggctcacacctgtaatcctagcactttgggaggctgaggcgggtggatcgcttgagctcaggagttcgagaccagcctgggcaacaatggagttgatataagcattgtgtctgctttccctccacccacctccttgacagacacacattctgctttggagatccatgctcaaaatctttgtgagaattgtgtctgtggttctttacactatgtggacgcaaattctacctatgtctttgtccctactccctaccccctccaaagttttatccttttgacttgacttcatctgaaactaaccttattctacaaacaacagcctctaactgattctctgttttcttatttaatacatcagaccacagaatattttcctaaatagttagaactgacaccagctgcagagtggcctcgacctctcctcctgtccttctaaacacctcccttcctttcagtaagaaactgtgaagggggcaggagcaggggacagcttctttcctagttcctcttcctaagactttttaaataattcaaccagtctaaaatatctactatrtttatgaagtgtacatatatttatcaattatagataaaaggcattgattgtatgttttccttcattctttttagactgtgtttggagaaaagctggtgactaaattcttatttgagactgatttctcagatgatccaatgcttccttcacctgaccaactcagaaagaaagttcttcttaaaaacaagaagctaaaagcccatcagacgccagtggatatcttaaagcaaaaggtactcccctctgttaaaccagttatgaaaaggcagtgtgcctagaacaaagaaaaataacatcattctaacctttcagatgacctgctggtttactagtttttcaagactgactttccttaaatgataagtttgattttgggcttttcattccatagaccaataaattctctcatctcactcacccaagatttaatttgtggaatagttcccacatagaatatacctccgttatttaatttattctgagtgggatgaagtgtgactgttgtgtctgaaactgagcttmgggggttgttcatcccataatggctgctatagtcccctttagggagagtccccttaggggagcccttggcatggggcctgtagtagaagcccaaaagccatagccctgtgatcccagcgtatcactagtttatgctgcttgggcccagatccggacaacagagatctgggcccaagcacgacaaacccacctgtgtaggagaccctcggctcaaaggtctgtgaaaaagttcaggtacagaacactgagtccattttccagtctgcacctacttatcccacaggatgacagctgacaaaactatttgtcctacttaggagggcactgttggtcctaaaacatcactttggaaactagccagctacagacttgctctcaggctggctcaaagagtacaggcacacagatgctaaacatacagaaaccagtttctttacaaacatccgaacctgcatattcccttgaagtgtttgtgtcctctgaaggtaatacattacccaatttgaagatcacccatgattctgggccaaaagttgcaaaatcagccactttcaggggctaagcaggaaacatcagtgtgaggagccagctggatacaggacagctggaagtggtgaggacaggagtggagtgtgcacgccgtgtcaaagaacagctctaattcaattatttttaaacactgcaccagccaaacaagtcaggtctggaggtgcagtcagccccaagggccaccagttggagacctccagtaggtctacctttatccagatctgcacttccaaatctgctccaggtgaccttgcttttgcttgggtttcagaggccatggcacctatgctgatgggccttgttacaaagttatttaaatgttagcatgtatactctaccttgccttcctcaaatgccacatcagtgactgaccacccagtgtggtgctttttcttctagagccctgttcatctgtgctgttttctttatccaacaattcctgcccagtcctcactgccaagcagataaagctgctaaccacacataccactgtggtcttcaagataaatgataaatgtgaatgtccttgccttttccattctgtgcacagtcatttgcagttacttataaggccttcattccactaatgaacagaagtcttttttatgttgagcccaaatcttccttccttttcctccttctcattggccctccctcttccctctgcagctgtacagactaattttatatttagaaagctatcatgtgtttccccaccagcttttcttctccaagctaaaaattcttgttgtgccaactgttcctgacaggatatggttgctaagactctttacttaccattaagaatatcgtagatattcttaaatttgtggatattcttgaattcgtcaatctgaaaatgtgatttccagaactaaatcagtattctaggtagtatattacagcacaagaacagtgaaaccatcacctcccctaatttgaactttaaacctttgttaatacagcctcagactgtctgcttttcaaaaattcttggccagccgctgtggctcacgcctgtaatcccagcactttgggaggccgaggcaggtcgattgcttgaatctaggagttcaagacaagcctgggcaacatatcaaatccccatctctacacaaaatataaaaattagctgggcatggtggcatgtgcctgtattcccagctactggagaggctgaggcaggaggatcacctgagcctgggaggccaaggctgcaatgagccatgttgtgccactgcataccagtctgggccatagagtaagaccctgactcaaaaaaaaaaaaaattctttagcacacactgagctcatgttgagcttgtagaaaacaaaaagcattcagttattttcatatagactgttcttatgcccagcgttcccatttttccagattaacaatgaattttaaccttttgtatatgggagcctcacatttatctctatttctgctcttcttggttttggtatattattacrtcctacaaagttctttgtgaattttgtttctgtcatctggtacatttattagcagtttctcaaactgtgtcttcatcccaagttgcccttgagtcagccagccacatggagaggcctgtgcccttcttaaataagccccctggcatttgatgattattgcccccgtctggtgctctcctctcttgtagcctgcatttcccagagtgtgcttcgacttctttattgatttctttatttataaaatagaaaactgaaacctggccacttgtgtgactttctcaaggccacccagctcatagcaatagagcttagtctcagacttgggtctttagagaagcccttttcaaaggtgatacagaagtcagagtacattaataagaataatcgctggagcactttgaaaaacagattctaaggtcacaaatctgactgactaagtcagaatttccagaagaaaggcctggtcatctgtttatataaaaataattccttaagtcaccatggtgtctgcgtaaaaaataataacaataataattcttattatcctggaagtttgagaaacactatttatctgctgtttttcccataaagtgaattatcttatccaaaacagctaaggaggtcactgtgtggtaaacttgttcttagtagatccactctaactcttgcaaatcacctctttattttctaagttctcacaaaccaagtgattaataccccatcatgaaattttgtcagctatcaccttgacactgcccacagtataatttccacaacttacttgttccttattttggaaaaatgggacaatataatccctattgccagttttctaagactgcttgcaacctttcatgatgacttcccaaggggtaccagcaatgattccacagtcacatccrtaaggcctttctgttttctggtagatcatgggtctagacctagtgatgatctgacctcaaataaaccaggtgatccagagctccagtgggctcagacctacccgctaacatagaaggccggagtcatttcccatacaaagaactcaccctcagcaaggatggattgactcagagcaggatttctgaagccctccacctgcctctggcttgtactgagatgcatcctgaggtctcctaactataccccaccaggatcctccaggattctgacattcctctcctgaatttgaacccaaaaaactcagttcaccttaaatgacagacactgcggctaggtactggggaaacagagaagtgtaagacattgctcctgcttagccctatgagggccagtctcctcatctgacccatacctccaaccacaacctatatccgagttacttttattcaggggctgaggtcccatttttctaccctagaataagtaggatattgcatagaagggtcccagctgttggccgtttgttgggctacctctcccatgcttctccttgagcatcttgggggccttggcactccactttcagacactgctattcgtggttctttgagcagtgtccttctcccatacagttctcatgcttccctgccagtggggtctgtccagcccttggcgtcatcattcccagcacttggcattaccttgagtgctcgctgagtcaaggcccttctcttatcagcgataaacagacctgcttttgtggctcacttgtgcctacaacagatttcccaaagttttgaagaacactaatcctatgagagactctgagaagagaaagacaggggaaaaaaatttcctggttaagtaagcatgggaaatgctgcactggagatctttgaagactcgtgatgccctttagcgtattaaatgaaggctgtgtgaaaccctgtagtaggaatgtgttcaggtttggttaagctgctgcttccaggcattcagtgtatcttgtggttcctgtaattgtcagtttttccataacacctattaacacccaccgagctccataaaacccactttgagaaatcgcagcctagaccatgtccagttatctggaatggactgctttgtaatacatttcatctggatatggacacagcctaaattgtatcttccttatgtatacatattcattataaaggtaatataaccacatttcaaaaatttagggaatagagaattattttaaaacatacataattccagggtcaaacacaactgtattacacgagttcttaaccttggtaatatccacaaatagaatttagggagtctacgaatataaatgraaaaaaattacatctttattttcactaacctctagctgaaatttagcatttcctctgatcataaatgtagggaataaactacagtaatataggcaatacctattgtcatcaatagaaatggcaactttttcattatacttcacagttgtcgctaatatctccaagaattatttatgctcaatttatmttttcaaaaatgttaattaacttactactatgttttctactgtgttaataaacacatatattctaatagcacaaatttgttcctataacatgtgatcactgtattcaacagtatttcctttgtaaccatttcattttatgcatttaaaacatcattctgagaagggatcctrtctcaccagacaaccagagaagtctgtgatgcaaaaacaagtgaagaacccctgccatattaacatttaatatctaggacttcgtgactgtcattttatataattgcactttaaatatataaaacaaatacagaattatatgtatatttatatagtgtatatatttacatgtatagctattatctgtatgcacacacatacattatatatagtatatattagcacacatgtatgcacacatacacatgcagaattatatatgtgtgtatatataatctatatartatattcaatgcataaatattgaataaaagaatttgttcacttcctttgttcaataaatatatatcaattattttttcatatctcattctctccagcagacaaccattgcttactgaccccgttcctctaccccgtttagattgtttcctgcatttagttcatgcaagtaacgtttcctatatttcagatgattttcttaagctaggtaggttcccagacctgtactgatgcttatcacttcacagtaattccagtaaacacggagtatgtgacctccctggctgcacacatcaagtttcctaaagtttctaggcctgttttgttaatctgatttatggttcagaaagccgtttgaaaacaattttatttaaaccaacaacaattcttttggcctctttgtccatagggattctaatattgttctcaaggtcaggagcctgtagatattattttaagaaggggaaaaaatggtttcttaacagagacatacttctgaaaaattgatgggtgattcacttcttcagtcacttgggattgatgctggttctccaaatcaccaaagctttctcttggaggggttgtcctgggaacctggctagctgggcactgcacacagtcttctggagattgtttataaaagctccaggattcttcctgtaggaatgctaacgttcacccaagtgttgacattgcatttcgagggaatctagatttttttctcctctcccaaatgtatcaaaataggttaagccacttttaacgattgtgttaaacatcaggggtagttttaaaggttataaatgaattcattaacttggcatctgcagtttacaattattgctattttacaggctcatcagttagcatctatgcaagtgcaggcttataatggtgggaatgccaacccccsacctgccartaatgaggaagaggaagatgaggaggacgaatatgattatgactatgaatccctttctgatggtaagagaaacagatccctatgctgtgcacaggaaaattntyggatgatttgccacatttttctttctaaaataagtctagagcgccaaagaccagtaatacggatggttgtaatattgtccaggagtttctgaattcagtcacttagcaaggaccgaggaaggaggggattctgttagccaacacttacagaaagaagaggcaggtgtgggaagttacagggagtcattcctacgacaagtttctagaggaagagatggaattgcagcagagaaaccctgttttcaccctttagtttctagcgtggctgataatcttggcaggagtcgtagactgaggttgcgtcctttctcctgcaccaccggcagggggcagcatcacggctctgtgctctctgtttcacactcttgctctggcattctagtagtgaaaagaaaggagaggagcctcatttcccctccctccctggttttcataccactaagccaacaagatctttccttctggccccaccaaagagaaaaaacataggcaatgctaatgacgcaacacaaaaagtcacacgaatgatgttaactacagattactagcgaaggattcttctcacatgagaattaggttttcagtgtgtttcatttgcattaaacatttgttagagattgcagaatgtttactcaggtacctttgctgatagtagactgtttcattttggtgatgtctgaaagrcaacaatataataataagaaaatgccaaggttcctatttctataaacattatatagtagaatatattctttctatgtagaataattgttttgctaaatatgcagatatgcccagaccagaaaccatttaccattaagttgtctcatgcattaagacaactgagccccctcctccaaatatctgctcctcagcagaaatttgagttgtctccagtcatagttcagttttgtgagcctccatcactggttatactgcaaatataataccaaactgtctgcccccaaatataataccaaactacatcatttagtatttgtccttagtaatagttgattgctccataccaccaattaaaagccagtttgctacacctgaaaccccatgagctaatatgagagacatatctcatcagatagtaagaggggaaaaaattaaaaggagtcaagacaatttctctgcaaagtcatgggaatgtgaattttttatattaacttattcttccccatggttttcttccccattacagttgcagtaatgccccatagaactaattgattcagatatgaaataaaaatcacacctaagaaatcaactaatctagatgtcatatgcccctataagtagttagtccactagaaaacaaatttgctctttcataaattactcctgtgctttttctgtacttctgagaataagaaaggaaaagcctttttagaaattattattatactgtagatttcacataaagaaataacaaaaaattattatagatggttttgatttgcaagtaacaaaatgaacaggtgggagaaggattttctgatttattttcatttgggaaatttagtcctataccactgaatttctaagatagttgcatgtatttttaacaatccacatatgcagaggtggagtatcattggaaaaggggaccacaccaggctctgttccagtagactgtgatacctggggcaatgtcttcaccaccttaggccttagatgcctcagatatgtaatcaaaagttctgcgaagtgtttggtgatgttcttcctctacttccagcactaagatctgtaatgtatgaccacttaagcccactaccactacatgagtatttcccccttcattgaaagatcgctctgactggatgattctcaaacaggccttgtagttatgctgtgacttgttgaagcttgtccagttaaggcttccgtatgtgactattagatgccttactaaccacatgcctttgattattgttgtgaccatctccactttctccagcagggatagagaacagaaatctacctgctgtgggaagcaccgttaccagcctcttagggggcctaaaaggtttcctagcttctcgtaataatgggtctttttgagaatcagatgaaagctatcacctctgaaaaataaaacgtgctctcaaaattctgcacaactgcaagagtttcacaagtttcctgagaccctcataggcatcctagattaggaacccatctctaaagtcagggtgcccggtttatctctgtgatctctcatccttggttttcatgcccattaaataaaggaattaatctaacaccatttgggctataaaaatgagataatgcctagccacagaattattgcaagaaaacgctaaggaagttgcaaatgagagttatttatctgagaaattgtaactctgccttttgggtaataaattcttaatatttttctcccaaccttgttgtttaccttgtgtctagttttgaacatacactgcagacaaatttgaatttacaacttaacgcagacatattctatgacaatgacagcacaattccaagaaattaatctgtttctgtacatttgaaatgaagtcatattgggagtattacagcagtcagtaactgaaaatatgtaacatgaatgtgtcagcccttggcatgattcacattaataatgtttacatttcgtttactgctagtccttgcattgttccacagtcaaaatattaaatctatagagcatttcctgtttcatttatttataatctaagctgctgttatttgtgctttgcttcatgcctttgtttaatttatctggtgtttgtcttaattttctccttcctttacccctttctgattctgtttttctgtagcagatgtccttactgcctcccctgctcctaacggtcaggaaggtaaatgccatttgaacggggcattttaactgcatggatgtcagcattctgtttccaatttcttgggcccggttagcatgacgttgtgatacttctgtgaatacaaatgtaatgaaatgatttatctcatttacttcttgtcagcctgcatggccctgatttggtataaggtccttttggtctaatcgtttgtgctctgatgatgcgatactaaatcttgagtgagaaattagctttcttgtttttcattttaaaaggtcatcatcacgatacacttctaatacctttagagtcattccaaatrgaaaagcaaaaaaagagcaaaatataagattatatcttatgatataatattcagatatattttattttctgttatgattatcacttagtaaattaataacaatcatgaaaactttactttttaattataattgtgaagactttgcattgcacccaataataagtctttccccctaggttttggcatttctcaaggtaaaagaagtaaatagcttcatttcaaagtgagagtgagtcaatcatgtatgtaccttctagaagtgcttcagccactaaatccttcccaaacgtgtgtgctgtcagcttcttgacacggggtatcttccataatatttgcacagttccaatcatctgtatgaaaattggcatcttcatttagattatgtctatatgccagattattttgaatcatttaaattatgtatataagtgacaaaaactactggtaaataaatcaattaaattgaaaataactgcatcaacccaatttttacagttatgcttcaagccatcattttgttaacatactatatagttagagcctcattcttatagataagtacaagtatctggatgtcctcacagtgatgcacatgtagctcttaagtgaagcattgggttcgttttcactgaagtctgctaacttattttcagacaacattctggaagacagacctgaaaataaatcatgtaatgacaagcttcagtttgaatataatgaagaaatcccaaagaggataaagaaagcagataactctgcttgcaacaaaggaaaggtgggtgaacggtttctgttaaatgacactttgaccatgtggtactcttgtcagtttcagatgrgattccacttgctccctgtccctccctttcacctttcccctcactttcccttagatacctgccaaagttcacttggtgatattaaaagacacccaccttccatttgtggaaagttagtcactgattcatccagccaatacctactaatggtgtatgtgtggcaggtactgaagtggcacagaggtggtttagtgatgaaggcagacatgtcaactgtgttgaatgtaagtgcatagaacagtgattatactgtgttatcagagaatcaaggacaggctctcagggaagatgaggtttcagaaggaagatttggctaaacagacaaaaacagaacattcgggccaagagggcagcctggtatgtccagggaattgcaagaagttttaaaggcatttgggatgaccaagaagataaackggccakatagcagaggaatgacactgagaataggaagataaatgagatacccagaccctatcctcaagtgcctcacagtttatagactctgagcaaatctttagacgcagttgcagtgacattgttggacaatggaattgtaagatatgtcaaaaatttgagccacggaagatacatagtcaatcctctatttatttaacaaagatttattgaccattccacatgtaagacagtggaccatgcactgagggaagatggaggatgaattagactcacctcctgccctcagaaagcttttactctaggaaagctgttgggacatgtatatggataattaccatgcaaggggaaatacagtaataacaccagaggaggacagataaaagagctttgggaatccagaggtgagtagcatataccttccatgtaaaatggtatcatttttcccttaccaggtttatgatatggaactgggagaagaattttatcttgatcagaataaaaaggaaagcagacagattgcaccagagctttctgaccttgtaatctattgtcaagcagtaaaatttccaggtaagattaggmaatatcatctataacttttaaagatatcaaaggttaaaaatatgccatttatttaattgggcattgtgaacactctcaaaataactaaattgtgttgctgaaatcattgttataatacctcctaaatatctttattattataatttgccttgatgctcatgaagaaaaataccataaartattcatttttcaggtcacacaatgtctttttataatagttaataattataaaagttataatactcataatttctaattgctaaatgtattaaatacttaagtactaggatttgtgctattttacgtacatctcctttacygttcataatgattctacaaggtaggcggtattatctccattttaaaataaagtctgagagggatgaagtaatttgccccaagtttcagagtatatcagtcaagattcttttgtttgaaagtggcagaaattgacctaagtaaagggaactttattgactcatgtgcttaaaaatgaagacacacaggtttcaggtatagcttaaccaaggtacatgctttctctttcctcatttctcattccgcctccatcatgttggctttctcccctttattcccttctggttgcgagacggctacagcaggccagcactacatgcttccagtttcagcttcagtgtaagagtctcttccagaacttcccgcagaagtgtcattgtttctcattgggtcctttaccaatcactgtggccaggagatgcagtgctctgatggtctggatcccatgtcacattctccactctgagctgggtagcaaggccccacccaaaccacaaggaccaaggatggcgttgaagtggaaggagagatttcccccaattgaccgtttttagaagtacagtggacaggctgatgaaccactttccaaaaacagtgtccttttcaattaatgaatggtagacctatggctctgaagcctgtctgtctccaaagtcctgcccttacccgttatactgcctggcctctcttgtttcgggctgttttcaatgaggtactcaattatgtgtcccacaaatggggcaccagggggtagaagacaaacaagaaagtccctaagtacatggaactcagaaaaattcatctcctcatactaagaaaaaggattctcttgaatataatttctgagaacaggaaagtggctgagataggaggatcagtctaaatgttagtaaacaggatttatagacttggcctggagagaggcactaaaatgccctcatcttttcaagatgggctgaactcaggtccctcccagagcatatcttaagcacctggtctcacacagtgcctgacaaatgggccagaggcattgggctatttaaaaattaggcaaactgggtgtagtggtgcgtgcctgtaatcccagctaccagggaggctgagcaggagaaatgcttgagtctaggagttcaagcccagcctgggcaagatatatagcaagacctcatctytaaaaaataataattaaatttttaaaatcacagttaggtaatagtgagcttttcacacatcagagtaaaaaaaatcatattatttaatgatatgataaaaatcatatatttcatgatattaaaatcattttaattgtaagttttctcctataagctgtttttaaacttttggcagctgctactgcttgtctgctagcaaatcctgttgaggaggatatgaatcaataagtagccagcaaagatttcagagaaatgcaggaacctggccatttaagtttaatttcacagaccatgacctcatggcatataagtacaatatgaccattatttgcaactggcaaaactctttttctgatggagtaaaaccctttacctgtcaaagagcctggaggctggcatgtccttcattgcaggaacaaggatgagcgccactctgtccaagaatcacacccactgcagctcttattctttataaatgcagcggatgccacactcggaccattccactggctttgtcttttcttctcaagcactcagtaaataaggagcacaaattcccaaagatatttgaagtctgtgtgaaagataaagtctctgtaccagtagagaatcgtggaagatcaggaggtcatgtgatagagcttctaagcatgtggttgttcggcttattttaaaaattccaagtatgttgttttttaaaagtgttcacatagcatacatttcttcataggtatagtgtattttctctttagaaaaatgaaatttcttacattttttccctgattttatttcctgtctcaaaatagctaaattggattgccagaatgattgttataataccttctaaatatttctttttacaatcatttgtttgatgcacatgaggaaaatactataaactgttcattttgctatgccgtttattttaattttgctacattatcaatttcagtgtatgtcacctttcatcatcccaagtcccttcttacaagccatatgcaaaaaaaaaaaaaaaacccttcattgcaatgaggcactcaacaatcatgtggtatgaggcccacagaaaggaaggaacttccccaccatcagaagctaggtcagtggcagggcaagagccagaattcctgtcagctcccaggggtgggctctttgcaccacactatggaagtagttgaattttttcgacctgctttctcttagggtttatttctcggttgcatttagtacttctattgtcctgggtttttttctccttctaatagaaaaaaaaaaggatatggtatttttattttatgaccccatcaacctagtttccaatatcttcccacaagctcccctgcatcccccactctcctcaggcacctacatacactgccgtctttctagtgccaggccattgctcagagtgttctcaaccttgcctggccttccttctccccttggccccattccaaattccaaggacggggtccttggaaagtatctgagactcttcaactcattgtgacatctcctttctggagctccttcatttataggcatatgtttgggtacctcctagatacccagttgttccacagttaggagtgcaaccttgttcttttattttgaatttttttattttgacagctttagtggtacaagtagtttttggttacatggatgaattgtatagtgatgaagtctgggattttagcgcacctgtcacccaagtcgtgtaagtcatacccaccaggtagtttttcatccctcacctccctcccactctcattctgagtctccaatgtccattacgctgctctgtatgccttgacatacccatagcttaaaagattacaaccctgtaagacaaaaattattcagtggtgacaagatcatcagataagatcgtgggtcagagacctgggctcttggctaccatgctttgtgatttggccaaggcaaatctctctgagcctttctcactcaaaagtggagttgactagaatccttgtttactacacttgctgaaatctccagaatcacccaggccacttgattaacatacccagtctcaggcctctctaccagggatttacatttggaaggcactgggaggtcctggtccctgggtttctaaggcaggcaattcaggagcaggtagagccagatgatctggaagtctgattctgagggggattttgcctcattctcctttggatccaccacacagtccacagagcaggtgcccagggattccatggtgaggctcgtccggaagattctgtgacttccagggctcatttttattcctacactgaaggagccacatggggagagccttgcaagtgtcagtccattccctggacacacactgtcattttctcagcactgagagacaagctttgttcatcaaacagtggtttgctaacaagccatttgaatgacaaaagtagaaccctgctgccttggacagctttgggctagctgggtgtaggtccctggcactgagagttgcctcccccacagagagccttggccatcccccatggctgttctgggttactcagacccacagtagtgctgcaggttggaacaccttggagggcaaagggatgcatttcaagaaatgagagggcttggaacagaactctcgggagaatgtcaaccaacacaccactgagaggtagccctgttcactgaaacttaattaccctcggtgcctcccaatatcttgcaaaaccagtgaacacagcttttcggacctatagtgactgggtaagatgaggccctgcagagcatggcaggcaaggcactcaggaaggaaaagtagccgtgtgaccctgagtggctctcggaccatccccagactcagcttctctcctgattttagcagtgccaatatgttgaatcctctgatgtctctgggagagcatccagaagaaagcctagcactgattatatttacagtaatgcatcacttaatcagggagagacattctgagaatgcttcattagattattttgtcattgtgtgaaacatcatagagtgaacttagacaaagctacagtgtagcctgctacacacctaggctagatggtgtagcctgttgctcctaagctaccagcctgtacggcatgttactgcactgaatacggtaggtaagtgtaacacaatgataagtatttgtgcgtttaaacatacctaaacagacaaggtacagtaaaattatgacataaaagatttaaaatggtacatctgtatagggcacttatcatgaatgaagcttgcaagactggaagttgctctaggtggatcagtgagtgagtgatgagtgaatgtgaagacctgggacattactgtacatgactatcgactttataaacactgtacactaaggctacactacatttataaataaaaatttttcttcaaaaataaattaaccttagcttactgtaactttatattttataaatttttatttttttaactttttgactcttttgtaataacacttagcttaaaacacaaacacattgtacaactgtataaaaatgttttctttcttatcttatttttattttttaattaaagacctggccttgctctgtcatccaggctggagtgcagtggtggaatcatggctcaccgtaaccttgaactcccaggctcaagtgatcctcccaccctagtcttctgagtggctaggactacaggcatgtgccaccaatacctggctaatttttctttttttttttagagacaagggtctcactatgttgcccaagctgatctcctggactgatctgccttggcctcccaaaatgctggaaatacaggcatgagccatcgcacccggccattttctttcttatttttctccttttttttttttcccattctgtgactccagccaaagacattttctttctttattctgtaagattttctctatttttaattttttttacttcattttattttttatttttttactttttaaacttttttattaaaaacagatacaagcacccacattagcctcgatctacacagagtcaagatcaccaatatcattgtcttccacttccacctcttgtcctactgaaggtcttcagggacaataacaagcatggagctatcatctcccatgataacaacgctttcttctggaatacttcctgaaggacctgcctgaggctgtttyacagttaacatatatatatatatgtaacttaaaaaaaagtatatatatatatacacacacacatatatacacatgtaatgtagaatgagtatactctaaaataatgataaaaagtatagtaaatatataaaccagtaacatatttattattattaccaagtatgttctgtacataattgtatgtgctagacttctatatgactggcagtgcagcagatttgtttacaccaatctaatcacaagcacttgagtaatgtgttatgctatggatgttaggacagcagaaggtgataggaatttctcagctccagtacaatcttaaatgggaccaccatcatatacgtggtctgttgacctaaatgttgctatatggctaatgactgtacatcgcttgtctagttagggagttgatttcaaagcttccagacagattaggatttctgaaggaagataccatcatatgcactggagtcaatttattctttttttttaagtaattctttttctttttagagacagagtcttgctaagttgcccaggctggcctcaaactcctgggctcaagcgattctcctgcctcagcctcccaagtcgctgggactactggtgtgcaccactgcatctggttctggagttggtgtattcctaaatacctagatggcttctgctcaaacttccatctcgaagctttagtcatgtcagatgttccaacatctatatctaaaataagcattcttattcacaatcacaagtaaaaacacagatgagaggaagaccctaaaattaactagagactcagctgaggaagagaggcagccaccaggctaaccatgtggatttaaatcccagctctgtctctccatgaccttgacttgaacagttatgtattatagctgctctgcacctgggattccctatctgtaaaaggggtgtaacagtcctaacttaaaggattgctgtaaaaagtagcaataaagtatctagtgtgattagcacatcktcgggagcatggtgggtggatcacttgaggtcaggagttcaagatcagcctggacaacatggtgaaatgccgtctctactaaaaatacaaaaattagtggtgcacacctgtaatcccagctttctggaaatgttgttatcggtaagtgagccaacggggtagatgaaggttctttgttgcttcttcattatttttctgggccccttctcacaattcaaaatccttccccttctttgatcactcagcccttgtttacattcttcccctccccatcccaaaagaataaccaggctcttcactgaagtacccacattctggtagaagatattgacatgtggcaggatacaggcaaaagtccagaatgaacagagcccctccccactggtccctcatcagttttacttgggagaaaatccattattaagtaattgtgtcaagagcaaaatgtacacaaatattaagatcaaggtatgagaactcaatagtctaagtttgtgcatgtttgctattatgaatactttggaggtaaaagaaaaccttagaagccccacattaagctataataataacagctactatggactgagcacttccctgaacaagacacactactaagtatggacaagttgagcatccctaatccaaaatgctccaaaatccaaaactgtttgaacgctgacatgatactcaaaggaaatgctcatgggagcatttcggattttggattctcagactggggatcctcaaccaggtgagtatgatacaaatattccaaaatccgaagaaatctgaaatctgaaacactttcatgtcccaagcatttcagataagggatattcagcctgtatatgtatattatcttgtttattcctaaccacagcccacttacagatgaggagggagtgttctagagaggttaagtaacttgtgtgagattgccctgctaggaacagattttaaatccagctgtctcactccaaagtctatgctcttaaacactactctatcctgtctcctctgatgatgttcttggaatgtgtattatcatctgaaatacgacctcctgaatgctgcttcagcttagggaattactctccaaaggtacagttatgacagtgggaacaatttggaggcaattctggcctcactggtgccttcagctcactctttttacattggagccaggtctatgtggtttgcattcatttcctctttcagcaaatatgtattcagttcctgctctgcaccaggcactgtgccaggcatgaagcatccagggagttgttagaccaggagtgagaaagagaagccataaacatcattatcaccrtatttcccatcttcagagtaaccatatgagtgagttcctatcattacacacattttgtagataaggaaactgaggaccaaagaaggaggtgttatgtcaaggctaatatcagcaggaattgaacctagacactatgacactaaaacccaagtaatagccattccttcatctctccaaattaaataattagccactgatcatttctggccacagcaccttcttttcatgcagtttttcaaaatctttctgatgcacaatcagctaagtgtgtgtgtgattttgtggtcattctgtgataagcatgcagttcttgttgcatttgcctatagagatttttaaaactttgctttaattgcctacaatgctattattaacagaacaaaaactgccagtagggtttctgtactaggttccaagggagtagtaggacttcaaaataaatattaatggggatggaaaatgttgagttgccttgcttgtagtttttggctwatttattttcattttatgggaacaggactgtcaactctaaatgcatctggctctagcagaggaaaagaaaggaaaagcaggaagtccatttttggcaacaatccgggcagaatgagcccaggggagacagcatcatttaacaaaacatctggaaaaagtaaagtcactttcttacaatatctttgcttgattctgcatgctggatgatttagatattttactgtctaagcacttcccttgaattttttaattctttttcctgaacattaatattgtctgagtatagtataaatttttgtaattgctaacttacacttttaacgtactaaaaacagcatttcaggctgggcacagtggctcatgcctgtaatcccagcacttttggaggccaaggcaggtggatcacttgaggtcaggagttcgagaccagtctggctaacatgatgaaacgccatctctattaaaaatacaaaaagtagccgggtgtggtagtgcacacctgtaatcccagctactagggaggctgaggcaagagaatcgcttaagcccrgaaggcagaggttgtggtgagctgagatcgcaccactgtaccccagcctgggtgacagagcaagattctgtctcaaaaaaatattaaaaaattaaaaaataaaaataacatttcactgaagatgtttgaacagtgtttgcctcacgagtaaaaattagaggcaccttggaacattcttggaacattctagtggtttcttggagctgttctcttcaccattataactccagaagatatggctattttatttctagttactttttattatgaaagtaataaattcttgtagttaaaaactcaaacaatacagagtattattaaaattcctttccactcaatgtcctggtgctattctccagaagtaaccactattaaatttattgtgttttgttcaagaaaaataagatcctttttaagataatccaaatgggatacaggcatacttcggagatattgcaggttcggttccagaccactacaataaagtgaatatcacgataaaatgagtcacattaattttttcgtttcccagtacatataaaagttatgtctacactataccatagtctattaagtgtgcaatagcattatgtcaaaaaaatgtacataccttcaatagaaaatactttattgatacaaaatgctaacaatcatctgagcctgtagcaagttgtaatatttttgctggtggagggtgttgcctcaacgttgatggctgctgattcatcaggggggtggttgctgaaggctagggtgtctggcagtttcttacaagaaggcaacagtgaagtctgccacatcaaccaactcttccttgtacaaaagatttctctgtatcatgcaatgctgtttgatagcattttactcatgatagaacttttttttttttttttttttttttgagacggagtcttgctctgtcacccaggctggagtgcggtggcaagatcttgtctcactgcaagctccacctcccgggttcacgccattctcctgcctcagcctcctgagtagctgggactacaggagcccaccaccacgcccggctactttttttgtatttttagtagagatggggttttaccatgttagccagggtggtctcgatctcctcacctcatgatctgcctacctcagccttccaaagtgctgggattacaggtgtgagccaccgcgcccggccatggtagaactttcaaaattggggtcagacctctcaaaccccactgctgctttatcaactaaatgtatgaaatattctaaatcctttgttgtcatttcaacaatgttcacaggatcttcgccaagagtagattccatctcaagaaaccactttctttgctcatccattaagaagcaactcctcatccattcaagttttatcacgaaattgcaggaattcagtcacatctgcaggctatacttctagttctcttgctgtttccaccatatctgcagttactccctccactgaggttttaaacccctccaagtcatccatgaagtttggaattaacttctcccaaacttctgttaatgttgctcttttgacctcctcccatgaatcatgaatgctcttaagggcgtctagaatggtgaattctttctaggaggttttcattttattttcaccagatccatcagaggaatcacaacctatggaagctttagccttatgaaatttatttcttaaataagacttaaaagttcaaattactccttgttcatgggctgcagactggatactgtgttagcagacatgaaaaatcatgctgtaaacagatgtgctgtcatctaggttttgttgttccatctatagaatacaggcagagtagatttagcatgattcttaagggccctaaggattttcagaatggtccatgagcattggcttcaacttcaagtcgccagctgcattagcccctaacaagagagacagccttttctttgaagccaggcattgacttatcttctctagctatgaaagtcctaggtggcatcttcttccaatagaaggctgtttcatttacaataaaaagttgttgtttggccgggtgtggtggctcatgyctgtaatcccagcactttgggaggctgaggcaggtggatcacaaggtcaggagatcgagaccatcctggctaacacggtgaaaccccatctctactaaaaatacaaaaaaaaaattagttgggcrtggtggcgggtgcctgtagtcccagctactcaggaggctgaggcaggagaatggcgtgaacccgggaggcggagcttgcagtgagccaagatcgcaccactgcactccaacttgggcgacagagcaagactccatctcaaaaaaaaaaaaaaaaaaaattctgttgtttaatgtagccaccttcatcaatgatcttagctagaacttacgaataacttactgtagcttctccatcagtacttgctgatattatgttatggagatgacttctttccttaaacctcatgaaccaacctctgctagcctccaacttttcttctgcagcttcctcacttctytcaaccttcataaaacagaagagagttcagggccttactctcaattaggctttggcttaaaatatgttgtggctggtttaatcttctatccagaccactaacactttccccatatcagtaataaggctgtttggcttccttatcatttgtgtgttcactggagtagcacttttaatttccttcaagaacttttcctttgcattcataacttagctaaatgtttatcgcaaaatgcctaactttcaacctgtcttggcctttgacatgccttcctcactaagcttaattatttctagctttttatttctttctttctttttttttttgaggcagagtctcaccctgttgcccaggctggagtgcagtggcgcgatctcagctcactgcaacctccacctcccgggttcaagcgattctcctgcctcagcctcctgagtagctgcgatgacaggcgcgtgtgcctggctaatttttgtatttttagtagagacagggtttcaccatgttagccaggctggtctcgaactcttgacctctggtgatccacccgcctcagcctcccaaagtgctgggattgcaggcatgagccaccgtgaccagcctagcttttgatttcaagtgagaaacgtgtgactctccctttcacttgaacatttagaggccaatgtagggttattaattggcctcatgtcagtatcgttgtgtctcagggaatcgtgaggcacaaggagagggagggagatgggtgaagggctggtgggtagagcagtcagagcacgcacatttgtcaattaagtttaccatcttatgggtatggtccatggcaccccaaaacaattacaataaaacatcgaagatcactcgtcacagatcaccataacagatataataataatgtttaaaagcttgaaatgttgcaagaattactaaaatgtgacacagagacacaaagtgaatacatgctgttggaaaaattgtaccaataaacttgctggaggcaggcctgccccaaactttaaatttgtaaaaaaaaaaaaaaaaaaaaaaaaaagtgcagtatctgcaaagtgcaataaaacaaagcacaataaaacaaggtatgcctgtataaccaaacatacatgtataactttatatttgctataacttttcacataattttctgtacatatagcttccttattctctttaatgcttgtgtggtggtccactgcatggatatactgtcatttatggaatcacttcttcactgatacatttgggttgcttcttggtttggtttgattttgttgtttcctatgaaaaacaatgctggagtgaatatccttgtacatatattgtttatttgtgcaaatataccacaacccaaatgaagtactgaggcaaaggacttctaggcttttaatttaaattgatgttgctacattcattttgttttgtttcttgtgtggggttttttgtttggttttattttatttttttactttttgtagagatgggctctcaccatgttgcccaggctggtcttgaacttctgggctcaagcaatcctcccaccctgacctcccaaagtgctgggattataggaatgagccaccacacccagccaccacactcattttaaaactaagtagccaccatgttgttttaaagtggcgaactaactcacaagtaaaatccaagaggtattctgatgtggtttatatgctatgactgtttactgggatgttgttcaggtttatctttctaaaatatttaaagttttctacactaatctgcggctaatttcttggggggtttaggttcctgtgaaggcattcgacagacctgggaggaatcttcttcccctctcaacccaaccacgtccctcagtgctatcattagaactcccaaatgttatcatatctcgtcgctgaatgaaaatgccgccaaacgtctgtgtcgcaggtattctcagaaactgayccagcacaccgcctgtcagctgctgagaacttaccctgctgccacccgcatcgactcttccaacccgaaccccctcatgttctggctccatgggatacagcttgtggcactcaactaccagactgatggtaaggrgcctgcatgctcacctcgctcctttgcatcttacatttcagtaaatgcagtttgacagcattttttcaaaggggcaagattccagactggggcacaccatatgtgagagtaaaaatatgatgatggaaaacagaagtgaatttgatactgaattgtgcctccgatgtttcagattaaggtgatagaaaagaatcttgaaggggcctgtaaggtctcctggtcctgccccttttttaatgcagtttttcaaataccaagctgctcttgacaaagccatgcccggtttatgtttaaagytctttttggagcagggatttcctaacactgcccagttaacctgtctcactacgcagttgttcttgcagtcaaaaggtagtgtcactccaaccactttgcaagttaaaaccatgttagcgtcttatccttttggaattgagatggagaataatggtcagtgcccgaagagtagctagcaaaaggaaaacaactatgtgaagtacatgaacagagtaagtagtgatcatgtttctccaatgtcaatgagactctgatatgacgcctaaaactccagagtagaagctgccgtttattgcacgcttactgtgcattaggcagtacgctgaatttttgaccccctattatcttatttaatattcacaacagccctaaagttgtgtacctttatgatcgccatttctcagatgagcaaatcaaggcacaaattggttaatttgttcaaggttgcaggatgacttgtagtaataaattcaaggagtctggaagtttaaaggataaagcattatgtttccacttggttatgggggaggagaggagctacagaaggtaagagtagataaatgtttcctaaaagctctttcataaaccacagtttttcctttgaacagtcaagcggcaggcagctgttatcattcatctcgcgtgaactgaatccaatctcatctaaccatgctgaaccacaaaccacagtatggccttgtctccagctgaggtcaaaccacagctttagctctgggaccagctagctacctggcactggtgccaacaacacccattggtggatgccccaaagacatatgattagagatattggtcacatttctgcccttgttatatgtgcttctttcagttaaaattaaataagatgatgccggtgaagtaccatatttagcatagtgcctggcacatagaaagcattctacaaaggttaactatcattgattgtgtttgataagttatgaaaacagtatgatttgggctcacaaatggaaataattgtgaaatactttcaaagttgtaaaaactttattttctatttctgttcattctttcctgagtggctggtgggttcacatctccagccctgtctgtagtcctgtgtccacctggtgccattggttattatcccggcatattttaagtaaactgaagtcactatcaaaagattttctcaaggaaatggaagtgcatttggttttggatgtgccctttctctggaagtgccaggactggtatagacacactggctccactgaatagcaaaagggagcaacaggtgaaggggacacagggagctgccactccatgggccatcctgcagtccagaagtacaaactaaagctgcctgtcctccactgacccttaaaggctttgcctctcttccaaatcaagttgggattgagagtacgtctttaagccgtcccactcaaatggctgtgctgtgtggttcatcctcaagtttctctgcataatcttccaaaccgggaaaaggtgctatcatataacctctctccattcaatgtgctgattaaacatctccccatgttggacaaaatacaagcaacatgcagtatcagtgtgttcatctgtaaaaatggtcttcatttctgcaaactgggggtacagcctgatttaatattaatactttgcacacagtagatgctcagtaaatgcttgttactctgagttgaggcagattatctctgtcagccccactgcaatatgaacatgtggttcttgatttttggtcaagatcttttccaagtgtttacttctctgaattgcaaattcaaacagatagataaggccaggtgcagtggctcatacctgtaatcccagcactttgggaggccgaggtgggtggatcacttccggccagsagttcgagaccagcctgtccagcatggtgaaaccccatctctactaaaaatattaaaacaaaatagtggggcttggcggtgtatgcctgtagtcccagctrctcggaaggctgagcgggaagcagaggttgcagtgtatcaagattgtgccactgcatttcagcctgggtgacagagcgagacactgtctcaaaaaatacatagctaggggccgggcacgatggcttatgcctgtawtcccagcactttgggaggccaaggtagrtggatcacctgaggtcaggagttcaagaccagcctggccaacatggtaaaaccccatctgtactgaaatacaaaaactagccgggcgtggtagtgcatgcctgtagtcccagctactcaggaggctaaggcaaaagaatctcttgaacccaggaggcaaaggttgcagtgagccgagatcgcgccactgcacttcagcctgggcgacaaagtgagatactatctcaaaaaaaaaaagaaaaagaaaawtatatatatagatagatagatcgaatagatcgataagagtcaacagtggaagcaccatttttcaattgttgaaaagaatttccaggctggaaagtgcttgattttccatgaagcatcccaactaaatagcagagaaaccctcccagggccagcctcccaagaggtttcatggatcatctgctctgtgacttcctggatttcaggggattctaacgctccaagtgggtgtccatggacttatggccatcccttcccaagctttctgctggttccatcaactccaagaaggtctgaagtgatctggaaccaggagtttcccagatcaacactcaataaaaccaactcttgagtttagaaactgacgtgaggctggtatgcaaacccctggttattgctggcaacagaccctctaagttctttgcatctgaggcagaacaataccgcctcacacccagacttacaatgtgtaaacatgcaaccctagtcaaaagaaaaacttctttttttaaagaatttattaagcttttttgaatgacagacttccaatcctcaaatataaggataaacattatgtgaatggtgtctacataatgcagagtattttaatgggtagaagaccatcaaggcaatggtatgtttatctatcattatgtgcattgtttcagaggtrtagcagggttacactgatttgtgcacactttttcacttgattggaatgatgatttttaaactatagccccagatgaagttctgggaccatgtccaggggacagcaagagggctagatttgaggtccgacctttatttcaaaccgtgcggctctacgtggatctcttttacatgtttggtcaccaagttagatttcagttaagaaactgagcattaggggaaagagctgatgcacgctgggtttaatacctaggggttgggttgataggtgcagcaaaccaccatggcacatgtttacctatgtaacaaacctgcacatcctgcatatgtaccccggaacttaaaacagtaaaataaaataattttttaaaagcttcaaagttttaataatagctttagagttttggctttacagctttaaagttttggaaaactattagggtagacacggtgctactgaaatcacttgaggttgatgtcatgatcacaaaaaaaaaatagttaccatttattgagcaccttgcatgtgccaaatctcatttactgtatccacacccctataagatgtacattatatggctcagtagttaagattgggaacaatggktgaggccatctgggctcgatttatagcatccaccacttactcgttatgtttcttgggtgttttcactttttctgcttcagtttcctcatccataaaaatggagatactaaaaggatctgcttcatagattattgggaggtacttgatgcacataaagtgcttagaatggtgtctggtccttagtaagagtgcagagtgcgagctgccattgctgttgttagtactgtatgtccatttcacctttaccaaccccatatgagctagctggcttcaccctctttgctaccctcaccatgtctgtgttcctctgtcatgaagtggcctgagaagagaattttctcccaatgcaggtgaggcagcatggccacaatgaaccagtcacatcaggactggcaggggcctgagagatgaggtcctctgcaatcattttacagataaggagctttcatatgtctaagacatcttacactaggaattcctgcacaaaatactggccaaccccacagacagggaaacattttacagacaggacaagtagaggccaacttctcattgccccagggcgtttactgcactttgccttgatgtggcccatgtacagagttcgttcttacacatggaaggaatctatcagagggagtattcatcaggtgtgtctcatcaactttttgctcatttgggtaacttttatacagacttgcaccatcaggtgagcatttgagtgtgtaagagcccagaaacagtgcaagaatccaattgttcatcaaagtactgtgccaaataaaatttggcaacaaaaaagcctctgtgaaggttcctgatgtttatgattgaggggattgtggacatgatgtgaatcagatgtgattattttttttcatgtttacgattttttaaaaagaaataggtgtattgtaatttatgggatgaaattgagatttcaaggaaaagcatgtttttctggctattctcctattctttcttgtataattaagattttatcttacatttgaaatagcaagaattgtccatacaattgtctgcatggcttagagataagccattattcctttctaaaatttagtataaaataagtagagttgcccctccatatccttgggttccacatctgtggattcaaccagctatggattgaaaatattcattaaaaaaaatggatggtcgcatctgcactgaacatataacagccttgtctccttgttatttttccctaaacaatacagtatggcaaccatttacatagcatttacattggattaggtatcataagtaatctagagatgattttaagtatacagaagggggagaatatattcagggcaacttgaatctaggctcccaggggaaaaaaaaagaaaaagtatgcagaaggatggtataggttataatgcaaattctacaccatctatatcacagacctgagcatctgtggactttggtaccttctcgtcctggaaccaatcccccatggtcaactgtatttcacaagatttttcagacagatgtagcaaatatttgcaaaggagtttttaagtgatttcacctagtttggagtggtaacactgggcatatccatagactgtaagccccagagggacaggaatttttctcttattacctgctgtatctgatgcctcacacaacttggcatatagtagtcatttatcaatctgtgggacgaatgggtgattatctctttttcatgctggagcttagggaaaattgatgcaaagttcttttgaactttnaatttataaggtgatacttaagcgacaaagtaacaagctatattggctttctttgttgtttgttttacagatctccctttacatttaaatgctgcaatgtttgaggcaaatggtggttgtggttatgtattgaaacctccagttctgtgggacaagaactgccccatgtatcagaagttttctccactagaaagagatctggacagcatggatcctgcagtctattctttaactgtaagtacggcccctagagaaagaacataaggtcgggtttaagccttcctgaaaacgaactggttttgaattcaaggcattggaaagctgtcatgtcacaatttgggtcatacagatttagttcccagaataatgtatttattttccaggaagcagtagctatggctagacaagctgttgccagacactgtgtttgccagagcccaggagcagggcatatgaggtccctgtttcacctgatgttctgatgatggtaactctgtcttccagggcccacagaatcataactatgagtatagcccatggaagttgagctttttgttagatcagctcatgttaggcttcaaagctctaagatcaaactcatgtcaatatataaatacaattaagtatatttcctccgtataatttaacctttatcattcctgggcctttccttattccttttcacctaattaacttattgtcaaaactccacagactcctcttaaaaacagacctggccaggtgcggtggctcacgcctgtaatcctagcaatttgggaggcccaggtgggtagatcgctttgcgctcaagagttcgagaccagcctgggcaacatggcaaaaccctgtttctacaaaaaaataacaaaaaaaattagctgggcatggtggttcacacctgtactcccagctacttgggagtctgaggctggagaattacttgagtccagaaagcggaggttgcagtgagccaagattgcaccactgcactccagcctgtgtgacagagtgagactccgtttcaacaaaacaaaacaacaacagagacctggtcatctctttccacctttagatcttgtctctctctctccacaggaagaatgccaggcagccctccaagtacgacacccccaaacccctgggataaccccattcacagactttcctaccacccaaactgctttttctctttccctaagacagcagggcagtagcccctttcctatttgttattttttagatagaggcgagggtagttttatctgtttacagaaagctgtgaattagttcctaacacgtctgtgacttgctccaaaatgaaactattcaagaaaaagattttgaagttataaaatcctgtggcattttgaacagaatattagtaacaaatttatgattatattgcataaagtcttctcttgtgagaaatttaacttcatcttgtttggtttttgaagatatttgaacattttgatagttgaaagcttacagttaagtgaatgatgttgacaaaataggcttttcatatgattccagtcgtgtgattacccagttacaatcacttactttttttttttttgagatggagtcttgctctgtcaccaggctggagtacagtggcgtgatctcagctcactgcaacctctgcttcctgggttcaagcaattcccctgcctcagcctccctaatagctgggactacaggcgcacaccaccatgcccagctaattttttgtattttagtagagacagggtttcaccatgttggccaggatggtctcaatctcctgacctcgtgatctgctcacctcagcctcccaaagtgctgggattacaggcataagccaccgcgcccagccctacaatcacttactttttaaacagttttattcatcattcactttgtccattccagtgttcttgggattcctttgcagagggaagcagtgaggtgcagaggttgtctttcttttttatcctcggtgactttgatcccttttgtctccctcaccctagattgtctctggtcagaatgtgtgccccagtaatagcatgggaagccygtgcattgaagtcgacgtcctgggcatgcctctggacagctgccatttccgcacaaagcccatccatcgaaacaccctgaaccccatgtggaacgagcagtttctgttccncgttcacttcgaagatcttgtatttcttcgttttgcagttgtggaaaacaatagttcagcggtaactgctcagagaatcattccactgaaagctttaaaacgaggtagaataaaattgtccaaatgttaataattgttgtagctaggtgatggatgccagaatttccttatactcttctctcttttctgtttgacattttcctataaagaagttgaattaagaagcaaaaggaaatacaaattggagcacttttgaagcacatctcaaaagaagtttttcttttacattttttaagaatctgaggtattaacaatatcccttgtaaagtacagcctcacccatgcttgctgatgtcaggagcagtggttgttgctacccacggcactgctggcagtttgaaagcagggattgaaataaggagaggaaacatgtcagaggggtcgggtgtggtggtggcataagtgaccgtgcagttggagtcggtgcctggcagaagtccagttttggaagctggggctgggtttcaggtgcaggaagaggggaatggagaattctgggcaaaggctagagctatttgcttgtagattggctttgttgtggcactctgatgaatttcagcctgtgcattgtttttaaactttgatgtgcacaggaatctgctaggactggtaataccatgcagatcgtgattcagtggcctcaggtgaagactgacagtttccctttctaacatatttccaggtgtgctggctctgatggtctcctttgagcaccaatattctaagtacacacttcctctcccagctacactcaagctgccatccttggagctcacaaacacattacagtttcctacttttgtgatcttttcctgtttctcttctgtgtgcaagtagcccrtggtcatttaattagtctgctcaggctgccatcatggaataccacagactaggtggctgaaccacagaaatgtatttcctcgcagttctgaaggctggaagtctgagatcagggtgttggcaggtttggtttcttctagggcctctctccttggcttgcagatggtccccacacagtcagccctctatgttgtctgtgtcctaatcccctcttctcataaggacaccagtcccactggattaaggcccaccctaaggaccccattttaacttagttacctctttaaagaccctctcttcaaatatagtcacattctgaggtactgagggttaggacttctacacaagaatggggagtatagggtcgggggagacccataactgttattatagaaatgtgagaaagtacatagaaacaaaaacaatttttttttaattatccatttttccatctctccaacacagtcactcttggtgtataagtcttgcaggctttgtttctctccccatgtacgtaacacatgagcatacagatatatttttaacaaacaggctttctactaatctttgtgttttgtaacttactggttttcacttactaatgtatacagtgagcaacctttcatgttaataactatacatgtacattaccatttttaccagctgtgtattattccattctatacttacacttacagtcataccrtaaattataaccaatcttccattgtgggaatgttctattatcactaaagctgctctaagatggaacatttgtaaaacagggactgttagtctgttagtgcttcattcacagggactgttagtgatcaggttttcctactagatcaggttttgtctgagtttaaggttttctgtttgagtctaagttggaaacagtacttggacaaattaattgccattgggtaactcagggggcagcactctcttggcgaaaagacgcctgttggttgcatgcctgttgccatccctgcccattttaaggtctttctacctgtcatttgcygacttccaggagcatcttcttttcagtagccatggttaacaagcttttcccaattctgtattactccaggatatcgacatcttcagctgcgaaaccttcacaatgaagtcttggagatttctagtttattcattaacagcagaaggatggaagaaaattcctctggcaataccatgtcagcctcttcggtaatgaagttctgtttcactcarcatatttatggggattgctacactgaaggtgggcttttttgtggcccagcaaagtggtcggtgtgagttattaattaggtagctatggaaattaataacaataatggctgacacttggcactgactaagcactttacgtatatactaactcagtcctctcaataacgtcaggcagtagctatttagtatcatctccattttgcagatgagaaaggtagagctaagtacatctgaggtcacacagctagcaagcagcagtccaggatttacacccaagttccagtaacaaagcccatatattacagtgtctatcagggaagtaagccaaatataacaaagtgaggaagaggcttattatgcgaagcctagtaggaagcatttccaatacttctagaaactttaggttaaaccaggaaaatattttgtttcttcagcagtccaggggcaaatgtcacaggcagagcaaggctggagtgagcaataggctctgctggcgatgcataacttgcacctcagtgcttggcagatgcagaagctgctcccttgagaatggaagaaggacactgtagaaagkgccatagttgcagaatctgcttttttttttttccagagacagtgtgtctctgtcacccagtgtcactctgtcacccaggttggagtgcagtggtgccatcctggctcactgcagcctcgaccttcctggctcaagcaattctcccacctcagcytcctgagtagatgggactacaggtgtgtgccactatgcccagataatgtttttctatagagatggggtctcactatattgcccaggttggttttaaactcctggactcaagcgatcctcatgccttggcctcccaaggtggcctcccaaggtgctgggattacaggcatgagctaccgcacctggccagaatctgctttttaacaagtgcctcatggaaactcagtgcccactaaagtttgaggacacttggaccatggccccctcactaatgcaggatggtttaattaggtaagaatctgggctgagtgcagcggctcatgcctctaatcccaacactttgggaggccaaggcagaaggatagcttgagtccaggagttcaagatcagcttgggcaagaccccatctctattaaaaaacgtgttttaattgagcatagtgtcgagcacctatagtcccagctacctgggaggctgaggcagaaggactgcttgagtccaggagtttgaggctacagtgagctatgatcacaccactgcactccagcatggacaaagaatgagatcctgtctctaaaaaaggtatttttaaaacaactactttaattaactggctaattccattatgcttcctctttaaacatacattttaaaagtgtatccattggttaccccctttacatgtttaataatgtgattacttctgtgtcaatctcagactcaacgtagtcctaacaatctttggaaaggcaccttctgcgctcacaatggcactggccatgatggcttccactgccactttctgctttcttttctgcccttctcctgccctcaccactatcagttttgactcccgctgtccctgcccttgtttgcttaggtgttcctcctttttcccttcatcactccacagcaaccttcactgtacatttgtatcacctggggagctttaaaaactccatgtgcacaggccacaccccgcaccaattaaaccagagtctctgcaggtgggccccaggcatcagtttttttaaggatcatcaggcgattgcaccatgtgtccaaggtttagaagagcactttggccaaagtggagggaggtgtggcttccaccttgtgcagaggattgacaagcaagggcagggccgcgtggtacaaagagcaggartcacatgctttcagaaaggcagagcagggccaaatacccaattctgagctgggtgacctcgatatctgttacagctgaagattccacagatgccacaaatgaactgtttttactcacgacacttctgacaccaaaaacatggtgtcttttccaactctctggcaacagctgggtgtcctacatttcagttcaattctaacactatccatctagagttggtgtcagatcccacacattgagggctcagtcccacaagactactcctacttcagatgccagtcagaagtcccaggttgtcaccaggacttctgaccaaacagctataaattcaggggatccatataaatcctcagattcaagagtttgctagaatgacacagaactcacaagagtgctttgcttattatcaccagttgatcagaacagatgtacttcaggagcagcctcatggaaggatgcatggaacaaggtatgggaggaggagtgcagagcttccatgtcctctccaggccaccctcccagaacctcgatgtgttcaccaacctggaagctctcggaaccccatcatttagggtttttatggaggtttcatgacctgggcatgattggttcaattattggccactggtgatcagttcagtcttcagccccctcccctccttgaggtctggcagcagggctgaaggtttcacccttctaatcatgccttggtctttctcagccaccaatcatctcattagcaacaaaggacactcttatcactccagagatttcaaaggttttaggagctgtgtggcagaaactggggacaaagaccaaatatgtattttttgttatatcacaccttgccatccttgggcttcctgggcagccatatatggatatgtgcttggtaaatgtgcatttgaccatggagagcatcactctccattgctgaagccaataactgtagatcatcctggccttctgccccatttaagacttgatcattctatttccttagtatctttcaaatccattyatcttgatctgtctttattgccttggccctggttcattctcacctggcttgtggtagagtcttcctaattggtctcatttcctctgggtttgccacctctgtctgtcctcatctagggcatcccaaacagatctatctaaatatgatcatgtcactcctctgtgraaaaccctccatcagttctccattgctttcagggtatagtttataccagaagtaacaaattcacatgccaggaggatcccaagaagatgatgtgcaggcatggacctgggctgagcacagactcttagaaagcagagagctcatgggtcatttagaggggagctcatgggtcatttagaggggcagctgtcacctagctctcagctctagctgcttgttgccttgtgatgtcgtcagatctcttggtttttcaagagaatcaggacatctggggttttgtaaatgttggcaactatttaatctttttaattaataatatagtgcaagctaaatgatacaattagaatgtgtgcattttatagtatgacaattatacttcagtaaaactgattttaaaaaaatcacattgtgcaagcataacaaagacaacctctcctccccaccccaaataaaaattaagtacatgctaaacaatacacttcagccctcaggtcctcattttgccagtttcagtctaaattttagccagttaggcaaagccctgaatggctgtgcttttgcctgcatctccagcctttctccctccaacaggttagttgtagaacttgctgaggttcccagaatgccctgctgtaggccatttctaagtcttcatacacatgttacgtcaatttggggttctcttgtctcattcttcatctgctaaattacactaggtccttcaagatttggttcagataccatttttcagaaagccctccctggtttctcccttacctcttctaggccacctcctctggaacttaaaatgctctttacaactgcctactttcccctctagctatctcattcaactggaagcccttggcagggatagtgtcccatttgcccctgattttctagggacaggcataatgactgattcactataagccttccataaattatttatttcaaatgaatatatcttaatacacaaaatgcccgaagaattgagttacacacttaccgacctctttctaacagatatatgtttgcattctaatgattcatgtgcctgaatgatgtactctctaaaggcagaacattttattattaccatccaaatttctagcccagtaccctgaagagagatggaactcaatagatactatggaacatcagttaataagaactaacatacatttcagataatatcagcctctaattatgatggaaagagacactgtaatttaaaataatattttggtgatgtgcttatgaaataccctcactaaatgactgaggaagaggtaccatttgtagcactaggctacaaatggactctcatcttttgcatttacatgttcctatccgtacttctaagtactagcacctctgtatcaaatagagcttagaaatatgtgattacggatgaatgatcagccatgtgatcttcttgacagatgtttaatacagaagaaagaaaatgtttgcagactcacagagtcacggtgcatggggtcccagggccagagccctttaccgttttcactattaatggaggcaccaaggcaaagcagcttctgcagcaagtaagtccactgagccgtggttgggagaatccaaaatctaagatgtatggatgtatgtgtgtgtataaatgcctgtgtgtaaacatacacagatgcacatgaatgcgcaaaagtccatgtggatgatatgccttttgattatttggaaatgtgttattcaacattgagatccactccaagaatcayctgatggatcttggtaccactagacaaactaccttcaacctgtagagaagatttttaatgattcttaagctatataaaataccaggctctagaatgataaagaccggaatgagtggccttccaaccatatatacactttcgccctaagcctagacatggcctaatcttccttcttcacgcagagattattaatcaatcagaatttgcacattaggtgaatggaatcttcttgccatcygaggagctgaatcaaattcttagagcttcaggatgggccacgtggaccaaggagacattttctgcccctccagcctaaggccttcctttgcatgttgagcagcccccttgctcccctcccctggcacctgaccttggcatttgaggtcctctccttttggtggtagcaagaggcatggagaccctgagacctgttaccccaagccctgtagcagaactggcctaagtctccttatgctgtgccacctccgccctagatccccctccgaaggatctttgtggccttctgcagacaggtccccatccatggggggacttctaagagtgagagagccagggacatggagcagcatccaaagagggagggggcatgtcctccaaagggcgaggcagggcccatgcgtaattccttttttcaccacaccagaagcgctatccttgcttggcacagtggcctaaaatccttgcagatgattttatccttaacccatttcagaattccttctccatgcagccaggcgcagtggctcacacctgtaatcccagctctttgggaggccgaggcaggcggatcacgaggtcaagagatggagataatcctggccaacatggtgaaaccccatctctactaaaaatacaaatattaggtgtggtggcgcacatctgtagtcccagctactcagtaagctgaggcaggagaatcatttgaacccaggaggcagaggttgcagtgagccaagataacaccatggcactccagcctgggtgacagagtgagactctgtctcaaaaagataaaaaagaattccttctcctgaataggagtagactaaaggaagcaatgaccaagggaatggccctttagctccctctgaagttagggtgtatgatgaaatgtagctgggatcataacatttggaggaattaaaaaccaactgaacaatcacaaataataagtgtcaataaatggctctgtctttcaagggcacatctctatagacaggctaacattctgtccaacattttataactgacttaaatagagaaaacagctcaggtgtcacatttcatagattatcaaacagaagctattaccaacagtttgttttggttttgttttaatacatcagtccatgtactttagtgtccactatcacaaagcactgctgaagttttgtaaaggaaaacttaccaagagccacccatagcagtccattgctttactgtcacccgtgcaaatcagcacacagatataaagcaggactgagcagggggtgatgctggccctcttgtggaggtggcccagaagcttcacatcctgaattatccctatagtatttgccttggcccccttttgagtcaacagcatttcatcakttatagaccaagggctggggtggagagatttcagtcttcctgagaaccttcactcccactgccctcagtccatcacattctgcttttcctcctggtgagatgtgttcgctctgggctttgccttattggcaggggcctgaggagaagggtgtttgcttaatccagaccagatggtggcagctttctctcatcaccaagctacttctcacgggaaggcaacaaagggagtttcttcactgcaactgacctttactcccttcaaattcagccttttgtagtaacctgtacaatatgagtgagaaaatacattggtaaaactataatgcctgtaatcccggcactttgggaggccgaggcgggcagatcacttgaggtcaggaatttgagaccagcctggccaacatggtgaaaccctgtctccactaaaaatacaaagattagccaggcatggtggtgcacacctgtaatcccagctactcgggaggctgaggcaygagaatcacttgagcctgggaaggcggaggttgcagtgagccgagatcacgccactgcactccagcctgggcgacagagggagactctgtctcaaaaaaaaaaaaaaaaaaagtaactataatggctcatctttattgagttcacctaatgtacccatgttatgatttatgcttcaaccataaaacaaaattaagattgctactatttccattgtgtagatcggaaaacagtctccaagggattaagtatcttacccaataattcgtagccaacaagtattaaaggcagacctcagactcaggtctgtctggttccagggctttgtctcagctgccctgtttgactgcacagggtcagcagccaacaaagaaaacaagccctttaagcacactgtcagaagtttatttaaagaagaattcccaggaacttagaccacatgagaacctagccctacaaaccttccatgagaagatgaccgagtatttccaatgtgagaaaaagagattatcttagtaaatactaaactaggttatttgccctcagtcctgtgttgcaagattacaaagggctaagttcatggaatgagaaacctaaaatttttaattcactaggagctctcattccagcagtgggaaaaaatagttatgctgtctggggattatgaataagttgtgccgttgcccggagtgaacataaacaatccattctgaacataagagaattcttagatcttccaaaaagaattatgcaatactctagagtaaatttcacttataaattgcatagcaaacctatctgaacaccatgaaagttgatttgttttaagtttttgcctcactcctcagtttgccttcactttttctttagattctgacaaatgaacaagacatcaaacctgttaccacagactattttttgatggaagaaaaatattttatatctaaagaaaagaatgaatgtaggaaacaaccattccagagagccattggtccagaagaggagatcatgcaaattttaagcagctggtttccagaagagggatacatgggcaggattgtsttaaaaacccagcaggaagtaagtgtgtctgggtgcagcctacacartaacgactcattatgtgattagccatttaccactcacaacctccctgaaattcagaatttcttgtaattgcaacttggtttatattcttcttaagtaaatgtggatgaacagttttattcttctgcacataatcagaatattatctctaaggtacagaaattcaatctaaaaaacatcccttagaccgggcgtggtggctcacgcctgtaatctcagcattttgggaggccgaggtgggtggatcacttgaggtcaggagttcaagaccagcctggccaacatggcgaaaccccatctctactaaaaatacaaaaattagccaggcgtggtggcaggcacctgtaatcccagctactcatgagggaggctgagtcaggagaattacttgaacccaggaggcagaggttgcagagagctgagatcgtgccattgtgctctggcctgggcaacagaacaagactctgtctcaaaaaaaaagacaaggaaatatgttttctcacacaaataaactattccattttaaaaataaataaaaacataccttataagataaaggaagcaaagattccttatgcatgtcatcagctatgggtccagtattttatttgtatgtgtgaaaagacatcgttgtgagggtcacattactgtataatgcaaaacctgcaggtattttctattctggggatgactgacttccagttttagctaatagaagttttagctaatagaagcttccatgcttacaagtaaaataataatatttctttgaaaatattccagaacttcatacaaagtaagaataatatcttggcctgagtcagaattagtaacaatttatattacgtgtgctaagattcccatgatcattcctgggaaggaaaggatgcaacaactgccatgttgactccaaactgattggctcctgtttgacttaattgatgaagcactttttttttcccctgaattaactgagaaaaccctactaacttaagaatgacatataaggtcatttctctagcatagacagtcatgygtcatgacatgttgatagtcaagcagttgagtctattcaacaatttgattacataaatattgagcacctaatatgtaccaagccctgttctrggcacatgatctgctcctttggggcatgtaatagtgcttgcctgatagaaggtgcctcaggcccatgcttgctagggcacagtgaagataatagccaattttaaccattgtgtgttttcactttctagtcacagtgagtgaatgtgacctaaagcctctacagagctctagcatcaactctagagcccagagccactgccttctttccctgaccttgcctgagacaatgaaagggcatttaatttaagcaaaaaaatgtaattgtctccccagccttctctccctattaagacacactaattgctaagacagagaccaggcaaccctaataataatcactttatgataaaatatcagagggcttagctgtacttttgaagccatctttaatgtctaaatttttgtcctgttcctaaattgtcttgccttattaattagctacatgtaaaaagtatgtatcctctaagcgatgtcagaaaatcagtaaatttgtaaacctcatacttgtgtatgatttacagcgttgaaagccctcaaacactatgttgaatgatataatggaaaccattttacacttaaggaaatagattcagagaggtgaaatcatgacagggttagaagtagaaagaactcaagtctatggcttccaggtcagtgttctttccaccatcctgtgctacccaagctgaaattgtgtccatccttgtggatcacccacactcagcaccttgggaggagcaggaggcagtgggtaggctagagggaagacaggctggctgctgagtgtcacaggaagcttcattttatgctcagaggagctggggaggtgagggacacccaaatgcaatttaaatgtataccacaacaagctgggcacggtggctcacacctgtaatcccagcactttggraagccaaggcaggctcaggagtttgagaccagcctggccaacatggcaaaactccatctctactaaaaatacaaaaattagcagggcgtggtagcaggcacctgtagtcccagctactcaggaagctgaggcaggagaatcacttgaacccaggaggcagaggttgcagtgagccaagattacaccactgtgttccagcctgggtgacagagcaagacttcatctttaaaaacaaaaaaaagtatatgacaacaggcagtagggacctcaggaatatgcttccaaaaggctggtaaaggaaggcattttgaagaaaaaggggcataaatcagaagggaaggctaacaagatttttctgataagtaaaatatggcaagttgtcctttatatgcctttgttaggaaatttttgaaatgactgaaatatatctcaaaagataactaaatttagtgtatctaggtttacctggtgcatagtgatacccaaataataattgctgattgaataaatgaattcagtaattactgaatgtaagagggcactactagaggagacagatttgggctataagtatttccatttattttatcccatggaactaataagacatataagcagtttgcccatatatgaaaattcttcagttgctctctgtgacctctgatctctcctgccttttataattttcttgtctcctgggctttcaagctgtcagataccacatcttcctgtggtcaatgtgtcctcttctgttactggatttgaaattgggtaaaccaggattgtcacaatgaacagaccacctaacttctgtaaacctcactgccctaatttgtaaaatctatatacaaactaccctacttgactcaaagaaatgatcatgagactcatgtcaaacatgtacacagacaaggtgtacaacaatgcttagtaaaaagggatataagtgagggctattgttattttgttcataacctgtggcttcgaactaatgtggctagaaataccttaaaataagctctgagggaggctcaaaggtgctctttttttttttttttttttttttgagatggagtctggctctattgcccaggctggagtgcagtggcgcgatctcagctcactgcaaattccgcctcccgggttcacaccactctcctgcctcagcctcctaagggtgctctcttaaaaataaagcttaatgcatcgttgttgggacattttatgtgccaactctggttttctgatttcttgcctcctggtttgggggacaaagattataaattatgtcatgtgaattacctctcaatcttactctctgactggttaaatatatgatgatcagtgcaatgacatattattaagcaagttgtaaaacagtatacataggatacaatctcattttatgtaaaaagagacaatagctcatctcttcccccccttccattatataatggagtattcattcatgggaaaaaaatcaaatggattttttcactcattgaaaaaagttaaaatagattatatatctttatttatttaacaaaaaatcatgtaattataaggccatgattgcaaagttaattaaatgattggggcaagcttcaraagccagtcctttctggccctggttgcagttttggcgccacctggtggcagttatctattctgactttaatcaatgggtacaattctagttggaacttccaagatagcgacagcaactcatggattcttctggttagttagttagcacccatttcagtagcctggtctggagagatgaggctagaattctggggataagggagttttcctgccaagacctcacttgctgagatgaggttgtctactgtttacttactttacctctccctgcccttttactaagtctccctcttgcaaaagggaagctatcctcatttgaaaatgtggtggacaaagaacagcagcagctgcttgacaatcacattatatctaaattcacctaattcaagggtgttgctttacatagtcacatacacaaaaatacatttgaacatccacagcaaatgtttaaaaggatgtattatccaatgacagtggggtattttgtggcgaataaggtgggagaaggaaaaaagatgagaatgggaaaagtttggtttttcttattgatacgcttctgtactgtttgaaaatttttaataagatacatatatctgtagatacataatccaccaaaaagccaattaatctaattctcataattttactgtgaattttgtcaaaatttgtttcaatgtggcttacctccagccattcattcagccttgtcactgcagttttgttcacccaacctgtcaatttcatggtttatatttcagatgtctagcatttcttaaatgctcaacgtctgtggaaatgggtgagctttcttttaaatacaatttactgtgttcttatttggcttttgctaattggcaaaatggtatattgtctttctacaaatttacctacagtcaacttggactctcaaaatccacagctaggcggggcacagtggctcacacctgtaaycccggtactttgggaggccgatgcaggtggatcacaaggtcaggagttcaagaccagcctggccagcatggcgaaaccctgtctctattaaaaatacaaaaattaggcatggtggcacacatctgtaatcccagctagtcaggaggctgaggcaggagaattgcttgaacccaggaggtggaggctgcagtgagccaagatcatgccactgcactccagcctgggcaacagagcaagactccatctcagaaaaaaaaaaaaaaaaacccacagctaataggagcagataaattggcttgttatggatctatcaacatcakcagaagcacagtagtttcctcctctcaggagataggtatatccttttagaacagtttatgaaataataacatagtatatgagatattaagctaagaagtttctrcatcaccaagatacaagctcagatttttgctagatttgtctttctttattctgcataaacctattatttactcacattttttctttttaaacatagaacctagaagagaaaaacattgttcaagatgacaaagaggtgatcttgagctcagaggaggagagtttctttgtccaagtgcatgatgtttctccagagcaacctcgaacagtcatcaaagcaccccgcgtcagcactgcacaggatgtcattcagcaggtaaaagcctctcccttcctcacctgagtcctttcctcagcataaattattggaacaaatgtctgtgcactgatggctcattttatgagtgaagttcctcaacaacagggacctcaaaggggagtgtgtgcctcttaaggctgggaaattgcctcacatggtggctcatgcctgtaatcccagttttaggaagctgaggcaggaggattacttgagcacaggagttggaggctgcagtgagctatgactggccactgcactgcagcctggatgacagagtgaggccctgtctctaattgaaaaaaaaaacaaccaacccagtggctcacacctgtaatcccagcagtttgggaggctgaggggggcagatcacttgagctcatgagtttgagaccagcatggctgacatggcaaaaccctgtctttacaaaaagtacaaaaattgctgggcacgggggttcacgcctgtaatcccaacactttgtggggccaaggcgggtggattgcctgaggtcaggagttcgagaccagcctggccaacatggtgaaaccccatctctactaaaaatacaaaaattagctgggcgtggtggcaggcacctgtaatcccagctacttgggaggctgaggcaggagaatcgcttgaacccgggaggcagaggttgcagtgagccgagatcatgccattgcgcgtcagcctgggcaacaagagtgaaacttcgtctaaaaaaaaaaaaagtacaaaaattagccaggcatggtagcatgcacctgtagtccctgctactcaggaggctgagataggaggatcgcttgagcctgggaggcagaggtttgcaatgagccaaaatcgtgccactttactccagcctgggcaacacagccagaccctgtctcaaacaaaaacaaattttaaaagtttaaaatcttggaaatattaattcattccttcaacagacacttagtatctacagtgagtttggatctctataaagcattgataataatggatttaggaagtgactctgcagtgacaatgtcatggtcccagaaatacctaagccagtaggtactgaccayctctcaaggatcctacagaggacaagtaggaggcctactctgatcctctcccctcctctaaatcacgcttctctgagagtttacatggtttcagagaagtttgcttccttcatagccttgttagggtaggccattcatcaaacacctatttgagaagacatacaacacaacaattaagagcacagaccctagatcaagctgtgttagattcaaatcccagctctacttctgagacctggagtaaaagctcagatctgtgccttagttatagtagtgtgctggtaaaccagctctttgtaaaagaaagataaaagcccttatttatttcttttgtgtaaatgcccctaccatatctgatttcaccagactattcccgttggctccagcaaaacactacatggtaagtcaccacatagaccaccacatagacaatatggagatagtatgatagtactttccttgaaggttaagtatatgtaagatgtttaatacaatgcctagcaaatggtaaacattacttaagggttacttgctgttcttactgtatgataacttrgttaatattagccatcttattcaactgactttgaattccaaagggcccagacttacatttctttaacttatctttgtctcccctaaaagtacagcacagtatctgggacataattggccctcactaaacatttaatgaattaacaaatgcatcaatgaaagacattcttatattaaatgaaaagagagatcagttgacttctaaaattctttcaacatccaagactctgtgatagagatagcccagtgggacagagacgctcctgaagagcaagattctattcctcactggctgactttcatgtctgtgagcgctggtacatgcagaaaatctggttcagacctttattgttactattatagctgtatatatcctggaatctacttaacctgtcttaagtataagcttcctcgtctgaaattcaggataataacacctaattcatagactgttgcaaagctaaatgargtaacgtgggaaattacattacaagctacaactatacaactgcaaaatgagttggatgaaatgatctggaagatccccttcatctctagtctgggccatttttccaccttaaagtttcatatagaatgaatgcaaatgttggagattctgtgtctttattcagttgatcataacttacctttcagaccttatgcaaagccaaatattcctacagcatcctgagcaaccccaatccaagcgactatgtgcttttggaagaggtggtgaaagacactaccaacaagaagactaccacaccaaagtcctctcagcgggtccttctggatcaggagtgtgtgtttcaagcccaaagcaagtggaaaggtgcaggaaaattcatccttaagctaaaggagcaggtgcaggtaaagtttaaagttattttgctctgttctwaagttatctgatacccataattacactgtagccagatctggaagctggtgaaatttaggagaaagttcctgagtcaaggaatggagttaggagaaaattgtttggctttgttttcactgtgtgaaaaaacatgtggccgagcttgcggttaagcagtcctagaggggagctcctcagccctactctctccaaagctctagagagaagaggaaagcgctcttctgaaatartgtcatgtgasagaggaacctgagtttaacctaacaccaatggaaggttctttgttcccacaggcatctcgagaagataaaaagaaaggcatttctttcgcaagtgaactcaagaagctcaccaagtcaactaaacagccccgaggacttacatcaccttctcagctcttgacctcagaaagtatccaaaccaaggaggagaaacctgtgggtggcttgtcctccagtgacacaatggattaccgacagtgactaasggcagcatgtttaacccaggtatagtaagtcattgcaccatcctggaacagggcttaacttaaactactttgtaaggaaggcataattagtacaatgtcttttatcttttccaacaggaggatgtcccttgaaggcaggtaggaatgggaccttaaaacaggaaaagggctctgaagatatgtgtaacatgatatgctattgaacaccgcctataaagaaaaagggaaagaggctgggcgtggtggcgcatgcctgtaatcccagcactttgggaggccaaggcaggcagatcacctgaggtcagttcaagaccagcctgaccaacatggagaaaccccgtctctactaaaaatacaaaattagctgggcatggtggtgcatgcctataatcccagctactggggaggctgaggcaggagaatcacttgaacttggaaggcagaggttgcagtgagctgagatcacaccattgcactccagcctgggcaatgagagtgaaaactccgtctcaaaaaaaaaaaaagaaaaawawatatatatatatgtaacttgagcttttgtaattttagaccccttatttattttgtagataaataagcaaagctcccaagaagtcaatcaacttgcccaaagtactctgatagccttatttcatcagacaactgtcttcagtattaatagctgacagaaacattcttcaagggctctatggatcattcagcttttattcttttggatttctcgttttattactgttctaatttaggtttgatgtagcttcaacaacctcatctccttctgcctcaattaaaaaaataaaaatctggcatccgggatgtggttaaaaagaaagcaaaataacataacagcctcaatcttggaaatgcagtaaactgactgcttgatagtcacacaaatttcattctatcttaaagcaaattatttacatgagacctgaataaaagcatgtgagggaaccagtggtaagtctctccttttcgcttagtttcctaatgaacctaagggttcattaaagcccacttttcacctgttccatggtagttcacagatttaaaattcccaagatgaacagcacagtgaaagcattgctgtttatgtgacagagcttcaccatctgcctttatgacaatgaggaacttctgatataaaactgccaaactgcagaaactcacaattaaagaactcagtgatgcctcttcccagagccaaatttkacttaaaacagcccaaaagaaggcccaatacattgagatcatgtttccacatttaaagagcaactcctaaaataactgatgtcctatattacactctgcagtggtcaaaattttaaatattgttttccatatccagaagttagtatcaaataaatcataggtgtgatgttatacacacctctataacttctgtaatgaggtgaaattacactaaagctagtaaattggtcatatacttctctacatataaagagcccgatatgtgctacaagattacttcttaagtacagaagaatacaactccattagaaatttgacttaaaaataatatgcctactataatgaacattgctaattgcttatattttaggagactgggggagggtgattgatagtgatttagatgattgcctttagattctattgtcctgtagcaagtagatatttattttttctgaccaatggattcacatgactttttttttctttttctaagcaagcagatatttagaatcattctgttaacttcacagctttgcttaaagctggggaggcctggccaggcacagtggctcacgcctgtaatcccagcactttgggaggccaaggcgggcagatcacgaggtcaagagattgagaccatcctggccaacatggtgaaaccccgtctctactaaaaatacaacaacagttagctgggcgtggtggtgtgcgcaggtagtcccagctactcgggaggctgaggcaggagaatcgcttgaacccgggagacggaggttgcagtgagccgagattgcgccactgcactccagcctagcgacagagcgagactccgtctcaaaamaaaagctagggaggcttctcttatagtcattggtgcatctatgtgaattgacatcccatgttatgacctcctttacaatggtcttttcaagaaagagcacttgtaaaagaaaagaagagctcataagaaaagaagtttagagtttaggaccaggcacagtggctcatgcctgtaatcccagcactgtgggaggccgaggtgtgtggatcacttgaggtcaggagttcgagaccagcctggccaacatggtgaaaccccatctctaccaaaaaatataaaaattcctgtagtcccagctactcaggaggctgaggcaggagaattgcttgaactttggaggcagcagtccagccagacaagagggagagagagcaaaaagaaagttagtttagtattgtttccactttttaggtaacatatttcatatttgttctaaaatgatcccttttaaagtttcaataatctacagatttttaaagaacatattcatctatctgaagtagtagttagctgaaggaattccaccttttcttaaagttgaacagtttatttgatgtgatcttttttaaaaaaayaaactttctaaagaatgtgaaatatttatttccaaggcagaaataacctaatgttctacttcctagaaacatcatgttctaacattgtgagtacagaggaaacagtctcttccccaaacctagccactagagctgtggctggaaaactctgaacccttggtataccgcaagtgtttctgtttcttcattttcagtatactaataagcctctgtatacaacattacaggtgaagatctttaagcaagaagttaaagagtgaacatggtggaaaaaatataattattttcatcagacttaaactggaaattgatgatttctgaactgaagccttcacacatgtgagatccatgctgaggagaagcaaaatggcacagggctagttgccaccaaccaatttactgatgaatgaagcccaggggactgccattttataaatgtcagcagttggaaaaatcgtcacgaattgacttagagcaagggtcagcaagcttgtctgtaaagggccaaacagtaaatattttagggctgggggccataaaatatgttgcaaccacccaattctgccattgtagtgcaaaagcagccatagacaacacatacatgaacgaacgtggctgtattccaataaaactttatttatggacactgaaattggaatttcatatatttttcacatgtcacaaatactcttgttttgactttttttcaaccatttaaaaacttaaaaactattcttaattcaggggccatacaaaaacaggtggcaggctagatttggcccaaggaccttaatttgccaacacaactaagagaagagaactgggaacaaggagcacaaagatctgaaaacaggaaaggaagtttagccatacattttatggccgagaattagaagcttagaattagaagctttggggcatttcaagtgtaaatatgtcctataacataagagtcattaaaattcaatttagttcctgtattgtgtaccacagtgcactcctctttaggatttttttacatatagaaataatattgggttttttttaaggttattgcctattcagttaatagggttgctttaaaaaaggttattgcttaatcatagattagattactcatttttggttttcaaaatgaatttagaatgacgtataatttaatatctactgaattgcaatgtcttaacaagaaacctaacaattttttaaagcaaaagtagattgagttggcgtttaaatttattttgcaaggtttgtactgacactatacttatatatttattatacatcgctctcttgatattgccatggattagaagcattagttctcagtacttgaagacaaacttctaaaaagaaaatatatgctctgaacatctgaaatgggctagactttcaagtaaaattgcttcatttctcattaactgaagagctattgatccaagtcatacttgccatttaatgtaaattatttttaaactttgctgtacaaaaccattaagtgtaaaggattcttcatattcttagtatgaagcaaattatgaattttaaaaatgaaatatgtattcctctaaaacccaaacttttatctttccattggtatctttgaattttaagacacttttcttcaaattacaaaacactaaaactcactcctaaacttcactttgagaaacttttttaaccaattataaaaataaaaccatccccatgtgtttcttgcatattctaaaaacagaagtgttaaaaatacaccacacaggctgggcagagtggctcacgcctgtaactccagcactttgggaggccaagatgggcggatcaggacagagaatgaggccatcctggccaacatggtgaaacccaatctctactaaaagtacaaaaattagctgggcgtggtggcacgtgcctgtaatcccagctactcgggaggctgaggcaggagaatcacttgaacctgggaggtggaggctgcagtgagccaagatcgcaccaccacgctccagcctggtgacagagcgagactccgtctcaaaaaaaaaaaaaaaaaaaaaaaaaaaaaaaaaaacaccatacagctttcatgtcattgaaagttcttactgggtcaaagccttaaggctagaactaccattttcttgtcaacagaattcaggctattccagtttgatgtaatctatacagtagtacagttttaagtcaaatattcattctaacaaatgcacaatgctgctccattttaaaaatattccggaaacactttatcaagcctctataagtgaacatgccaaacagtttgccctaccacgtgttgaaaactgagttgctggtctaagtggctagaggccaaatgaaaactgtgcagagtaacaagatgaaaagactcgtctctttaggtttatcacatttgattctgatgctaagcgctgccccactcctcctccatgacctttaacacaggtgtatgttttacaacataaatctgagactgaagttgagaccaggttgtttagcaagtgagagaatccagcctactgcctaggttgcatcccaatttagttgtttatcacattttgaggtgaaagtacatacttcattgtatttgagtctttgggattacagaaagaacacattgtttyaaaatgtaaagagttggctgggcacagtggctcatgcctgtaatcccaacactctgggaggctgaggtgggtggatcacctgaggtctggagttcgaggccaacatggtgaaacccgtctctactaaaaatacaaaaattagctgggtactaaaaatacaaaaattagtggtggtgggcacctgtaaatcccagctattggggaggctgaggcaggagagaattgcctgaactcaagacgcagaggttgcagtgagtggagactgtgccactgcactccagcctgggtacaagagtgagactccatctcaaaaaaaaaaaaaaaaagtaaagagtctagtctactattatacacaaatggccagcacaatctgatgttggctgaaaatatttaagttttatttaaagctttctgaattaaacagctatattatgccaagtgaaagaaattatcctaaatagccactatgactatacccattaccatttcacactttttaggccaccagaaatctgggtagcaaactcttctcattaaagttgatgtggacaagaatctaaatatgcaagttggggtcattacaaaattttaagaagcatcactgaaagtgaagagaaaggagcatgaattctgtcactctattcagtgatgccaaatctgtaggaatgatcctatctgggtagaaagtgccctttgaggggtaaagcttcttttcatgtcatcattagcaagtaaaagttatttacaaattctccagttgggagtcaatatgaagtctagactcaacaaaagttgagttacaagtgacttgtttttaatcaaacttgctttcttttatgggaggcttttatgcctcccatctcaatacctctggagacactggaagctcattaatgaaagtgggccctctatgatatgtatcaatttaccttttgctaactacatcgtccccttcctttcttctctcctcttccaatatctctatagacttctgtcctctgcccagagacccacaggccttgcttaattctggaaagttatcagggcttgcttactggcccaataaaattgaattaactctaaaacacaaaactccacatctatgctcccatgctagtaaagaagagtaggattttcctggctggtgtctttgatcttacattggcagcctgcagggaaagtgctctcatggtgaaagtctctgaccccttttcagttgcttatatatcagcagtgaggccagaaaagatatacctgggaccccaaaaaagttagagagaaaagggagattgtctcttatacagagtctagacttgggtcaatattccccatgatccattgttaataatttatgtgttctctgccatccttatgtagcagcttcctaaaagcaatccttggctgatggctatggattctgacataggaatacctgaaatgagtccctttgaaacacatactgagtctctatgattaccaagttattcttttttttttttttttttttgaggcaaagtctcactctgttgcccagcctggagtgcagtggtacgatctcgactcaccacaacctccacctcccaggttcaagtgattctcctgcctcagcctcccaagtagctgggactacaggtgtgcgccatgtccgtctaattttttttattttcagtagagacgggggtttcactatgttggtaaggctggtctcgaactcctgacctcgtgatccacccgcctcagcctcccaaagtgctgggattacaggcgtgagccaccacacctggcctacctactcttatacatctcttagattcaaaacatactatgcacaagcctgtcaccaaacagatctctgaaaccttccctattgcagatgacataggtctctaaacttttgacacaagtaattctaacactgaattgggtactgtcgcatttttcaaaagcgttatgtggatgatttgactcagcatggaagactgaggttgtcttacacccattatttcccaccccactcttaagtgccagcatagtgctaaacacacagtaggtgctcattatttgtctagttaaaaaacaaattaaggctgtagcttaatatagcctcaggatatgtgtgtgcctgtgtgtgtgtgtgtgtgtgtgtgtgtgtgtgtgtgtgtgtttaaacataagcttacatataagcgtatgtaagttaatgcacaaatatatttcctcaaattcacataggatactcaaatatagatgtataattttgtagtcccactgtgattctccatatgtataacaagaaaattaaaggcataatacagctgtgaaatagctgatgagtttctattttaagctgatttttcaccagaagtatagtttctgctgccaaagtaaagtataaatgtatttgtatatgtgtggaaaataaataatttgtgacatgtattggtcacttgtgctctgatggggattagaccctttggttatccacacaaatatttatcactttcctggactttgttttatacctaaaaggtggactaaaagcaaatattcatatgctgaatcatacctttctcattaaataatcaagccttaaaaaatgtgacctcagaaccacttttaaaaatcatatataatatgctaaaagactgacatacactgttaagctcatatcctctcactctgctggaatggtaaaggaattttctactttcgtttacttcatgtgaaaaaagaactctaagctccagagtaaaataactggctgctatgactttcaaacagtaagagatctctttagttggactgctgtgcttttttcaaaaaattatcatatcacaagaataggaagcagaaaaaaacagctgttttattcaactattcacaatagagaatatttataatctagtcactgaaacacgcatttcttaggccactcctagaatatgggaatagctgttacataaaatactgttttataattatattaataagaaaaagcattttacctgttccaagaggggaaaaaagctcctcattgagtatcctttgtctctagatcagaatggtaaagtcttgggcctggttcttctaccctggagcaattcttccccagtcaccctccagggaatgtcagaaaacgtgaagaactttagagactagaatcatattcaaactttccttgaaagtagctataataaacactaacaccttttttaaaaggccaaattaggtaacttctttaggtggatcatccagcaaaagccaatgaacctgaatacaagctatttttttcttttctcaaatatcttcataaaaatatattaactcaaatttagaatgcttctcatttccatccacagtattgaaataaaaatatttaaagagtatttagttataaaaagtagctaaatggtaaaatgtcttctcatggtcttgatttttctgtgctctatgccctaattttaatatagcaactgcacttcagtaagatccagtccaaagatttttttaaaaaactataatgtacgtgaagcttttaaaaggcagcatcatcaagaaagtaatttccaaatactggggagaaaaaaaggcttttgatctccttgatggaatgacatattcagaataggggcagaaccctgtgccatgcaaagggtcattcttcctcttcttcctagacattcttaggaagctttccttgtataaaaagaaaagatcctaagttaacaactcatctttatgtacatctgcacacacaaatatacaagaaagtccactgacttcattcctctactagtgtagtgatgttttcaaatatttcgtgaaatccagaggcgattcagtagcaacttcactggagtatcttttgattagctgatttaaatcttcattcaaaaatgaatccccttgtaaaaatttaccctaggaaaatatttaaagtatgagttagaagttacttatgctataagctaaagccaacctgtgaaccaagttgaaaatggcaacagctgacaccaacacatgcaacacaatgacagatgcttggtaaggtcttggacatatcctatattgaacgaacagtttcatgatcatctctatagaatttcaacctcagaaatccatcctatgatgaaatcctaaacattaaaaaaaaaactacctataaaataattaagcaaactggagttagagttattgagatacattggtttctatttcttcctttaaaaaaatgaaaaatatcccatacctttattttggggtttgaagattcaacaggaggattgaatgtcatttctgccatgctatatgcctcaaaaagttcagtagcagatctaaatcacaaacacaaaaaatgtaaagataccaccacatctgtgtaactcaaaaataattagattatactcagagaatgattcattcttaacccatatattaaggtataagatttga

SEQ ID NO: 94149 - DNA, 22243 bp, Homo sapiens
taaaaatacaggccaggcgtggtggttcatgcctgtaatcccaacactttgggatgccaaggcagtaggattgcttgaggctaggagttcgagaccagcctgggcaacaaagtgggaacctgtctctacaaaaataaaaataaaattaaaattaaaaaataaaaatacatatatacacaaatatagaaagagatacaccaaatataaaagagatacaccaaaaataaaatgattagtttgtttttaatctgcattttcctatacatctaacatgtatatattacaattataaaaacttcataagcaattttgtacaagaacaacatttattccagtattttatagaatactgaaatattggaaatagtctaaatagtcaacaataaggggttgacataataagttgctgtatctgtaaggaggaatttatataaccattaaaaattaatattgccatagaaaatactgtttttaaaaacttgttactaagctaaatctgttattataatatacaataagaccctgatttggttttactcatattttctaaaggaagtacaataaatttccatagaggttttctctatactgttaacattataccactttcaattttcttctttgtataatgtaaaattttaataataagcacaatttgctcataattttgcttttttaaaaatcaagggaaaatatagtaggaaatcataaaatttgggtcttgtcttgattgtgcctctagctgttttacttcagtacttccgttttccagccttctatttcttcatctataaaaccaatttgattaatttatcaatttctctagcaagtctctgacccctctgaaatcttatcagtaacatatttagttttacctttttgatatcactatttcgatttaaagaataggatggttttggccaagcgcggtggctcacgcctgtaatctcagcactttgggaggctaaggtgggcggatcacctgaggtcaggagttcgagaccagcctgcccaacatggcaaaaccccatctctactaaaaatacaaaaaaaaaaaaaaattagccggacgtggtggtgggcgcctgtaattccagctactcaggaggctgaggcaggagaatcgcttgaacccaggaggcagatgttgcagtgagccgagatcgtgccactgcactccagcctaggtgacaagagtgaaactcttgtttcaaaaaaaaaaaaaaaaaaaaaaaaagaataggatgggtttgattcatttttctgttatttcttatttgttaaggccatattttttagaagctacttgtggtttatttctgcagttcatgttctttggtggaatgagagtgcagatagtcgtgcagctgggagacataagtcccatgaggatcccagagttgtggcagctggtaagctgtttgactaggcatgaattatttttagaacaaatgtgtttcagtcagtaactctatatgcctttctatgaaatgtttttccagttcgggaaagtgtcaactacctagtatctcagcagaatatgcttctgattcctacatcgttttcaccactgaaatagttttctactgaaatacaaaacatttcattaactgctataggatctgtctgctaatggtgcttaaattctcccaagaggttctcacttttatttgaaggaggtgttaagttaatttgctatgtttcttgcattatgaaggctacatctgtgctttgtaagtaccacttcaaaaaatagttctgtttactttctgcatggtatttcagtgtctgtcatacattaaaaatacttgtcactgttttaagatcttgactcttcatttgtttcagaatagctcttctactgtattctgacaactctttgctttatagcattttgttgtattcaaatgataatggtagcatttccatgcttgtgacagcatttttaagttattaatatattttatcaacctttccatcatgtctgttttcctggttttttttggttgttttttgaccagtaaaatttattttgtaataccaaataggatttaagaaaattaacgtatttctttactatggaaaaccacattgtcatttgtgacatcatctatattaaatatggttttcacattagttatttgtcacttacttggaaaatgatgctgttaggtcctggtattaaaaatctagaaaagacttgttggtttatgtgctgaaatgtctttatttataattaattttaactactatttacttcatttcggatcctgtttaacaaagatacttgagacatccatttgttttaatgaaatctgtatggatatggaaatgcttgccctaataaaagcctacatataccttctggttctttttgttgagttttatatatttatcttttctgaagctattgctgtattgctataaggtaatgagacaataccaatttaccgtctttactgtaaatattaagttacctcaagaaaattgtatcccactaaccccagaatcagagtttctttagtactgtcacagatgtggtagtgttttcctacaaacaactttaatttttaattgagtgcttcctattaaagtagatttggtacttccaagactatgaaatctatatttacagctatgttatttttacatttctatgttattttatatttttattttacactgctattacatatagcaaagatagtaaattatgaattagccatctgagggaaattggaaaagcagaaagtatagtaacccctcatttatctagctcccagggattcaaaggacagatgagtttcctactaaggcaaagaagacccaacactggaggtaaaaacttatcacggaagttagaggcattggctctgagttttgtctaagagtcttccatctcaatgtttatttggaaagttttcactcaggaaatttaagcatctagagtttacatgtacaactgctgtcctcctacccagttgggccagcactggatacacctctcctgcttttgcatgagcctgacctttaaaaaaaaaaaaaaacatgcaagaacatcatcaagtagattgttccctttgcccacttcttgtaattcccaccatccttcagctaatacttatttgttatgagaggtgtaaaaatgcatcttcacactcatcagatcagatgggcaataataagaaattggtcaggaaaacctcatacactgctattaagaatatacatttatagaacagtttggcacgatttaataaagatgaatatatacataacttatgacccagcaattccattcctaattatatactctagagtagtggtttgtaacctctagtacacaaatcctgaaggatagaattcagagtctgataacttggataggtaaaagttccatctttattggcaccaacttctaagcatttcctttgtttgtgaaggtaggcaacaaaccacaatattattagcaggacctgcaactttttagtcagtaaaaatcacagatactgtcaaattctatttatagttgttgcaaatacagaaaatttattttaccttcatcactacttcaaaattattatacctcttacacctaccattagatattgttatttaatatcttataaagaataggtctatttctttatcaagaatttgcttttagcagtcctaagcaaaaagaacaaagctagaggcatcacactaccagccttcaaaatatactataagctatagtaaccaaaacaacatggtactgggatagaaacagaaacagaccaatggaacagaatatataacccagaaattaatccatacatctacagccaactggtttttgacaaaggtgccaagaacatacactggggaaaagacagtctcttcaataaatagtgccaggaaaactggatatcaatatgcagaagagtgaaactagacccccacctctcactctatacaaaaattcagttcaatgggtcaaagagctaagtgtaagacctgaaactaaaagtactagaagaaaatataagggaaatgcttccggacattgtctgggaaaaagttttatgaataagatttcaaaagcacagacaacaaaagcaaaaatagattatgtcaaactaaaaagcttctgcacagcaaatgaaaaaatcaacagagtgaaaaaaccacctatagaatgggaaaaaataattgcaaactattcatctgacagggattcatatccagaatatacaagaaactcaaacatctcaccagcaataaaaaccaaacaaatcaatttaagaatgggcaaatgatctgaacagacatttctccaaaggagacatacaaatagctcacaaatacatgaaaaatgttcaacatcactcatcatcagggaagtgaggtattatctcaccccagttaggctattatcaaaaagtcaaaaaacaaagctgatgaggatgcagagaaaaggaaaatcgtatacactgttgggaatgtaaactcttagaactactatggagaacactatggagtttcctcaagaaactacaaataacccactactgagcattatccaaaggaaaagaaatcagtatatcagaaagacatcttccctcccccatgtttattgcagcactgttcacaatagccaagatacagaatcagcctaggtgtccagcaagattaatggataaagaaagtatgttatatatacacaatggaatactattcagcagtaaaaaggaatgaaatcctgtccttcacagcaacatggctggaactggtggatattatgttaagtgaaatatgccaacaagagaaagttgcacaccacatgttctcattaatgtataagctttaaaaaaagttgatttcagaaataaaaagtataacaggattctagaggatgggaaagattaggaggaagacaaggatgggagagatttgttaaacaaaattatagctagataggaggaataagttctagtgctctataccacttcaggataactatagttaataatatatagtttcaaattgctaggaggatattgaatgttctcaacacaaatgataagcccccgggggagtggcttctgtgagacctaaatcctcatctgccacagaaggaaggcaacacatactctccataactgaaaatgcaagaaatagcagaaaatgactattatttaaaaatacgggccaggcgcagtggctcgtgcctgtaatcccagcacttagggaggctgagccgagaggatcacctgaggtcaggagttcaagaccagcctgcccaacatggtgaaacgccgtctctactaaaaatagaaaaattagccaggtgtcgtggcgtgcgcctgtaattccagctactcaggaggctgaggcaggagaatctcttgaaaccgggaggcggaggttgcagtgagccaagatcatgccactgcaccccagcctgagcgacagagcaagactctgtctcaaaaaaataaaaaacatacggaaacaggtattagaagaacagcttaaaatgttgaaggtggttagtctggggaccagtactctgggactgggaggactagaccagaggtcggctgttttgctcttaaggcttacagaacgatctagtttcaaactatctatgtttaacttcgactttttcctatcaggctcggtgctgctattccactgagctcatggaaaattaaatctttattaggagccttccaagatcacagtggggtggcaatggggacagataatgcagaaaagcgaaggctcactggtctacaaatacacgtctatcacaacctgtaaaagttaaccctgtcccagcctggccaatatggtgaaactccgtctctactaaaaaatacaaaaattagcggggcgtggtggcgggcgcctgtagtcccagctactggggaggctgaagcaggagaatggcgtgaacccgggaggcggagcttgcagtgaggcgacatcgcgccagtgcactccagcctgggcgacagagcaagactacgtctcaaacaaagaaacaagttaaccctgtcaacatctcgactttaaatgcaaagcactgcacatgcacacgctgaacacctccccttccttctccaggggcaacacaagcacaaccgccgcacatttacgaatctacacaactgcgcatcggagcgaatgaggtcagggcccagaaaggtggggcaggaacgatcccagccttcagctaattctgtcacctctaacgtctggggcaagaacgtttcaggaaaccaagggggaccgaggctcagcgccgaagagaaagacgccaactgcgggacctgtcgcgcctcccgcgccggggtggagctgaccccgccgagtcccgcccctgcctgagttcgccagtggtccaggagccgcttttttccactcgggaagacttcagagaagtctcacaaaggactcggctggctgcttttctcagtgccgaagccgcgccatgctcgttctcagaagcggcctgaccaaggcgcttgcctcacggacgctcgcgcctcaggtactggccgcgggggcgcgcccgagccctggccggaggggaggggaggggcggggggtatttctgaagcgtgcgagccacgctcaggcgctcccagacctggggccccgcgccgccgccgaagttctaacgcggtctctggarccgtctggcgcgcaaggaggaggmtacaggccggggtcgtctcgctggcagtcgctgtcagaggggttttctaactggatgccagtgtttttgtgatttttgtttttgtttttgagacggagtctcgctctgtcgcccaggctggagtgcagtggcgtagtctcggctcagtgcaacctccgcctcccgggttcaagcgattctcctgcctcatcctccggagtaggtggaattacaggcgccagccaccacgcccggctaattttttttgtgtttactatttagtagagtcgggggtttcaccatgttggtcaggctggtctcgaactcctgacctcgtgatccgcccaccttggcctcccaaagtgctggattgcaggcatgagccactgtgcccagcctgatgccagctgtttctagcctaaatgccacaactcccgggacacccccgtggcgccagctgttgcgtttttttaggataacatctccagatacaaatctccgaaaatcaactttaaaagcagttattagaaatacctcattggcccattttccgagataataatatttttaaactgtagatactaagcagttttttattttcagaatttgattaaactgacccaaaaagaatggccatcaaaagaaaggatagttgcaggtattttttggtatgaagaagggttttctaagaaaactaagacacttgggcaataagggcataactcatactggagatgaatgaactcaagatagacaattataattaagacgttatgcacacaaactacatagacatttgcatgttgtaaccaaaaatatgtcagtgaaagatgcctactgaaactgttgcgatagattattctgggtagtgagcctcaggaaattgtcacatgctaaccatgcctaaatgaatggatttgtaaactagaatgccacgggagtggtctgtgtatacacgtgtgtttacataaatatttgcatgtacgtacatacagacagactggataatttctgacagggcatttgctactgaacattaagctcactcaggctcagagggccagattaggacagaaaatttacccattgggcatatgactaytacaaagggtggttcttaaaggatagttccataaacttggtataattgagtgcactaaatgtacatacttcttgatattgcatctrtaattagaaacaatgatggagacaattctcatttgttgagtttttttccttttcagcctttatgcagtatacacccatagtacaatgcaattggataagttatagcttccttttatattagttacattccagtcctgtttttgaccggtagtcttcatcagtagattcaggaaatactttgacctgaatagcccttcctgtttttttaggaaccttttaaaaacaagagttttttgttagtaaacgtatttttgggcctgccaaaaggcatgtgtacttaataaatttttttcaatgtgtggaactaatacatatggtattgagtaagatggaatattggctaaacaggggaaaaccctttgtaaattaaagagactaagtcttaaatgtagttcttcggtaaaggagtatcattatgatcccacagccttcttgtgagcaaattctcgtgaaaaaatggctagaggtagacccctgctaggaaacagttgctatatattcatcagaattaagagtagttatctttattgacatctctatgtaaacaagtgtatatggagaattgacaacaaaagtaaacaatggataatgagtctatgtgtgttccttgtaccagactcagatttggttgtaaccaaatctgtaattgtaccttcccaagatatttacatttgtcttacctccttcaggtgtgttcatcttttgctacgggccctagacaatacgatggaacgttctwtgaatttygtacttattaccttaaaccttcaaatatgaatgcgttcatggaaaatcttaagaaaaacattcatcttcggacctcttactctgaattggttggattctggagtgtagaatttggaggcagaacgaataaagtgtttcatatttggaagtatggtaaagagtcatccagttttagtattcagtatagattttcattctgttaaatgtaacataagacttagttcttggatctatattaccatagatacatacaggttaagtaagactttttaaaagcaataccaaaaaaataaatttagcagatcttcttcccagtggtacacctctaaccaccccttgcttgaactcttatgttatcataaatgagaaaacatgcagtctcatmtatcaaaccataaaattgtgaattagactttaatcctcagaaaaatgttagaatcgyttgctataaagatagctcatgaaaaatttaaagcagtaattgtaaatgttcaagtgggttaagatcaccgttgggcctgccaaaagacatgtatatttaataaaaatgttttaaatgtgtaactaatgtatatggtattgacgaagatggaatactggctaaataagggagaaagctttgtaaatttatgagactcctaattgcagttcttgggtaaaggagtgtcattaggataagataattttttttttcttattattgttacagctagggctggatatcagcatttttgcagaaataattcaycyatttgggagctttataaaaatggaggtttttaaaggatgatagttaacttttaagcgtcacccaactctgagatttaataattctgttatgtttagagaccacttcttttttcatttctgtaccccagagtttcaaggaattctttcatactaccctagggaggtaaggaaaaggaatgagagacagtccttcccatattgaagctgacctacccctggtttagtagaggaaagagaacaagtaacaagaatccccagaatgtttgttacttccatgtctgttcttaacagtccacatcaggacttgaggatacctaaagaacttttaataatttcatttactgtttagtgatcagtgtccaaagttaatagtcataaagtaatttaatatgaaaagtgttcattctatgcttgacgtaactctttagtttttccctgttataataaaacagaccctattaaaacataatttatgctttagataaaccacaagttgaaacatgtcccattgaaaaaactgctaataaagtgtttataattcatttatatgctttagataaaccacatatataatccacttatgtgcgttaggtgagccacaagtttaattgtgtcccattaaactgctcgtaaagtctttacaattcacttgtaagataggtgttattccttatcctcagcataaatcatataattcatttactattagtcttaggaggccctaaaagtaaatatactatagttgtccctctgtatttgcaggaggttgcaggaggttggtaccaggaacccctgtagataccagattcagctcaagtccattatatgaaacagcatactgtttccatcaaacccacacacatccttccatatactttaaagcatctctagattatttttaatccctaatacaatatagatactatgtaagtagttgttatactatattatttcacttgtatttttaaaaaatatttttaatctgcagttggttgmatccacagatgcagaacctgtggagagggagggctgactatactaggcccatatcttggtaaatgtatatacctgtttgggtaacttagaaagaagagaaataagttgtagagaaaaagaattactgacaagaaataaaagaatcagcactatttcattgggagctgttgttcaaaaaagaggcttaaaaagtgcatcttaatttcatttatgttaactttgattcaaagtgtaccttgacctaatcacccaccaccaaggaaaaatagtctttctctataaatcaaatgcttccattgataagaatcgttaacatatactgagtactaactaaggtgccaaacaccattctaagctcttttcatgtactaattcatttaatcctcacaacaacactggaggtagatgttatactattttcttcacagaataagaaactgaggcacagaaagattgaataacgaacctaattcacacaacttcctaagaaagtcttagagcctataaagcccattctatgtcaattaagttagttttttacatttcaactccccttttagaccatgagtaacttgagagcagttgtcacatatatytatgttggcatctccagcgacataataacatggggttcccatatggccttgcacgtttgctgaactgagtaaaattcaagtaaaaatatgggcgattttaaataaaaaaacattttcttaactattttcctcccatagataattttsctcatcgagctgaagttcggaaagccttagccaactgtaaggaatggcaagaacaatctatcattccaaatttggctcgcattgataaacaagagacggaaattacttacctgataccatggtccaaattagaaaagcctccaaaagaaggtgagttcttccctcttagactatgagttttaatgagtaaaatactaaagacctaaagytataaagagtaaagttctataggaaaaaaatatataattctttgttttatataataatatatgatgagtctggagataaaaatgaattagagactgggcgcggtggctcacgcctataatctcagcactttggaaggccgaggcgggcgaatcacttgaggtcaagaattcaagatccgcctggtcaacgtagtgaagccccatctctaccaaaaatacaaaaattagctgggtgtggtggtgcatgcctgtagtcccagctactagggaggctgaggcaggggaatggcgtgaacccagaaggcggagcttccagtgagccgagatctcgccactgcactccagcctgggcgacagagcgagactccgtctcaaaaaaaaaaaaaaaaaaagagaattagagttctagagctctttgcttatccttaaaacattgagcttatccttaaacattgcttatccttaaaacaaaaaatgaagtatttttccatattgaaatctaacggatgcctaacaaaagttgacatggtcaatacaggtgaaaaagtggggcttgggagctaggaaaacaggtgtaggtagatgagtcgtagttyatgaaattttgtcacagttttaaaatgtataaacttttaaatataaaagtattttttccacaaagtcagctaatcttaaatcattaagtacatctttgcttgtaaactgactgttttgggggaatgaattaacttacactgctaagctacattattgtagtttaacttttgtgtcttcctctttcttgtttctcagtttgaaaagatttgtcttcttcctgatttcacttcttgctcactaaaggaaataattacctctatctaattttaaacagaggtcagattcgaaaagcataaactaatttaaatttcattttatgtctcccataaactcaactttgtattttattttagattataagagatttgaaaagtcttgtttggattctaatgtacttaaaactccccttaactttcagcactaagtaaaacagttgrcttctcagtgtcaagtcttattaatagttcscttcctctatgttgttcataattctttagtaactttgtatttctttcctttttcttgtccaatctaccttgtcctctagtttctttctctccacccatcttatacttctggccagaaggtagaatggtttttaagcatttacctggatatttaggaagaataaaaccatctccttgagggttttctttttttccttaaaggctcagacatgacttygggtcaactagaaatagaatcctaccggagaaaattatacaaaggaaaaagttatttcctctcaaaattgaaaaggagaaggaaatgtaggatatcagaaagtacttctcttatgcatttcttttttaaaaagtgtagacaggcagcttgaaaattctgcttcattatacattctcagtatctgttttcctgacaaattttatagattaaaaatatttcagagtgtagtttatatatagcttccagtcctttttctttattttctttatgattaattttaacaactgacccttaaacatggacaaagactttctaaacataaaagcaaagaaaaataatgcagagaatcaataaatgtgactgcatatgtatgtatacatggattatcctctaacttcattggttagccttctaatgaaatcaggaaaacctggttagaaattgtttgaatgtcttctgtgaaataattatttttctccctattctaggagtctatgaactagctgtttttcagatgraacctggtgggccagstctgtggggtgatgcatttgaaagagcaattaatgcccatgtcaatttaggctacacaaaagtagttggtgttttccacacagaatatggaraactcaacagaggtacagttgtccatttgttctatgaagttgccatgtgtattagatcagttcgtctctctttttcattttggtacctgttttaatttttatctccaaatttttagagtttgttgtttataggattgaaaaaatctataagcatcttattttacatcttatttttttagaatgttaatactttatggagcctttttcaaatgctgaactggtgtttgttttttaacttttattttaggttcacggggtacatgtgaagatttgttacttaggtaaacccatgtcatgggggtttgttgtacagattatttaatcactcaggtattaagcccagtacccaattgttatcttttctaatcctctccctcctcccatcttccattctcaagtagaccccagtgtctgttgtttccttctttgtgttcataaattctcatcatttagctcccrtttataagtgagaacatgtggtatctggttttcttttcctctgttggtttgctgaggataatagcctctagctacatccatgttcccacaaaagttataatctggttcttttttatggctgcatggtattccatggtgtgtatgtaccacattttctttatccaatctgttgttggtggrmatataggttttcatgaaaagattccaagtttttgctattgtgaatagtgctgcagtgaacattcacgtgcacatgtctttatggtaaaatgatttatatttctctgggtatatatccagtaatgggattgttgggtcgaatggcagttctgcttttagctctttgaggaatcaccatactgctttccataatggttgaactaatttacactcccaccaacagggtgtaagtgttccctttttttcacaacctcaccagcatctgttattttttgactttttagtaacaggcattctgactggtgtgagatggtatctaattgtggtttatatttgcattctctaatgatcagtgatattgagcattttctcataagtttgttggtctcatatatgtcttctttagaaaagtgactattcatgccctttacctactttttaatgggattctttttttctcttataaacttgtttaagttccttatagaggctggatattaggcctttgtcagatgcgtagtttgcaaaaattttctcccattctggaggttgtctgtttactctgttgacagttttttttttgtttttttttttgctgtgcagaagctcttaagtgtaattagataccatttgtcaatttttgtttttatcatgattgtttttggtgtctttgtcattcaaaattgacatagaaaattctcacattgttgcagcattttaaaaaatctgttactaagtataatatacactaagaccctaatttggtttactaattttttttaaaggaaacacaccatatgttgataaaggtttatctaggcagttaagattatactaacttttattttttctttgtatcacctaaattttcyacagtaaacaattttttataatctgctttttttaaaaaataaaacatagtaggaagtcattaaactcgggtctagtcttaattgtgccttaagctgtgtttctttgcattctctcttcrgccttatgtttccagtttaacttataaatttatcttccaaatttctgatccctctgaaatcttataactaacatatttagttttaccttttgattttgatttaaagaataagacaacatttctgattcactttttcaatatttcttatttgctattgccatatatttcagaaactacttgtggtttatttctgcagttcatgttctttggtggaatgagagtgcagatagtcgtgcagctgggagacataagtcccatgaggatcccagagttgtggcggctggtaagctgtttcactaagcacgaattatttttagaacaaatgtgattcaaccaataactgtatgccttcttatgaaatgtttttccagttcgggaragtgtcaactacctagtttctcagcagaatatgcttctgattcctgcatcattttcaccattgaaatagttttctactgaaatacaaaacatttcattaactgctctaagatgtgtctgctaatggtgcttaaattctcccaagaggttctcgcttttatttgaaggaggtggtaagttaattagttaatttgctgtgcttcttgcatttttgaaagttacatattctccactgctttaagaaataattcagttcactttcaccttggcatttcagtatctgttacacattagaagtagttgtcactatttcatcatcttggtttttcatttgttttagaatacctcttctgtattttgataactcattgctttatagcattttcttttactcaaataaggattttacatttccttgcctgacagtatttttgaattatttatataaaatatctatcttttcatcatgtctatagttcctgagattttaaaaaaatttgcttagtaaaggttattttgtgatataaaatgggatttataaaaatattagattgtttatttctttactgtggaaaagtasaatgtcatctgtattaattattgcttttacattcattgattattagtcattctaacttggaaaataatgcaattgggtcacagtgttaaaaatctagaaaagacttgttggtttatatgctgaaattgttcatttataattaattttactaatttctmcttagtttggatcactaacagagatcttgggacatttatttgttttaaagaaatatttatggttatggaaacgcttgccctaataaaaatcctgcatattcattgtttttttaaattcacattttatacttatatgatctctaaagctcttgctatgttgctataagacagtaatatagtgataatttaccaactttattgaaaatgttgttacatcaataaaatagcatgctgggaacctgagaaggaaggtttctttagtactgccacagatgtcctggagttttccttgaaacatctttcatttccattttacttgatgcctctacctactaaaactagatttggtacttccgatagtgtatatttacagctatattatatttacatttttacagactatcttctgataatctgtatttacagctatgttattttatatttttaaaatcttacagctataaaatagtaaattgtgaattagctgtccaagggcaatttggaaaacaaactgtacagtttcctctcatttatcaggctctaagcgatctgcagtttatctgggctattatgcaatgtgagatattatttatgagaggcaggcagtggcagcttaaacagacatacctcctcagcattcttttccatgcagagttcaaagaggcctaagacatctcacatttatgtgaaatagttgaggcacaagtatgtggttaactacacataaattaccaataaaattaaaagttaactaaaatactacagaagacatttaatattttgcttcagactgttatagtaccttagggttatgaacatcaattacctttgagccttactatatttaaagggaaggggaagctgacatttttatcttttttaatgggtacactctacgttaccttaaaggcttccccggtttaagcaaaaatagaattatgtggtttaaatcatataccttattcttcatacttagctccaagtagattatgacttttcctaaaacttaacatgacagagatttgccttccagggggtctaatttgaagaggaaagtaatttaaatgtataggtttatataatagcattgtatttttctctattttattcattctttcattctcttcgatgactcccagcacctgcgcgtccatcttcattcttagccaatgacctttccttttacttaacagagaaaataacaatcagaagagtcttcataagttcccaccccgtctgcccgctttctacagccaaccccacatgccctgccttctctcctttcactgtggatgaaccgcccgtgccccaagcaaagacaaaccctccacttgaacactcacttgctgaaggatgtggcttaggcagttttcctgtctcctgaagccacagtattccccttcaactggattcttctcctcagcatataaatatacttttttttcctatctttaaaaaaaaaaaagagtaaaatcaccccatttttttcctttacaatatgactcaaaagagtagttcatacttcctgcctccattttcttccctcacattatctcttaaacattctctgatcacgccagccaaattgctcttgtcaactcatttcccagttctcatttcacttgacttgttagcagttgacctctcctttcttctggaaagtttcttcgtttctccgaaacactcactgcacaagccttcatatctcctagtctccatcttgtctctttgacctctgatgtaaggactgagtccttggaccacttctcttttctatttatacttactccctgcgtcatcacccccagtcttgtggcttcaaatgctatctgtgtgtggatagctcctccagtccacacctcttttctgaatcttttttcaaattcacacatgtgaatttgaattccaggctcatcacatccaggtgtgttccccacacctccacctgaatgtctattagaaatctcacacccctcttgtccaaaactgagctcttgatctttaaccagaaactttatctcagctattggcaactccaggtttctgttttgctcaggccacagacttcagagtcattctcacactgccttttctctcatacaccattatgtacctgtcagcaggtcccaaatatctagaatttgattgcttcacatccctatagcaactctcctggttcaagcccatcatcatctggatttttgggaagtggtcttaactggtgtgctgcccttcccctctgctctcaaccctattttcaacatagcagtcagaataatctaaaatataaaccagatcatatcactcctctgctcaacaccccctcccaataccttcatgtcatcctcagagttattgtccaagcctctaactgtggtctacaagtctttacatgatctgtcctgttacattttccactctcgctccagacctgacctaagaggcttttctctgaacttgctaaacatgctcttacctgagggtccattcccactgcctctgcctggaatgctcttccccagacatgcatctgcgtggatcatttccatgcctcctcaggtctttgccctcatgaagccttccctgacaaccctatttaagattgtaatcccctcccacagtggcccctatctgctagagactgaatgtttttgtcccccccaaaattcctatgttgaagccttaatctcaacataggaggtttggcctttgtgagttagttttagatgaggtcatgtgggtaatagaattagtgcatttataagggcgtgaagagccctcactgtgaggaaaccagaatgtaagccttcaccagaacttcttcatgctggcaccctggtcttagacttcccagccactagatctgtgagaaagaaatgtttgttgtttaagccaccctgtctatggtactcttgttacagcaacctgaactaagacactatccctctcccctgctttctttttctgttatcaccataattaatgttttacttatatatgatttgttaatgtatgtctcttcccactagaaaccgaattctatgacagcaagggtttttgttttcattattgtcatattacctgtgcctggcatgtgataagccctaagtacttgttgactgaattaacatatgagatctgtgagtctgaaaaaagaagtacatcattccttcacatgtcattttgagccactgttaacagattacataactgttattggaagtgcctcactactccatttggaaagtattcctggaatacacgatgaatgactcagtagaagttctggctatgggggagtgccatcaataaataaaaataataccattgtctgttggttataagttgctgtcacagactatgaaggtatttgaattgtattttcaggaagagaaacagatatgcaaccaatctgatttggttccacaccctgccacagaagtcccaaaggagaagcaaatgccacttgtagactcaaactctggacttcattctcagcaccatctcttaacctactgagtaaatcctatgaacctgactagggtggcaactgaagttgtagtactttctgtcttcaaaggagggtgaacctggagtatgttggaagaagtgttaggttcattagagacacctctttcataactgctgtcacctagaatgtctattctctaagcaccttcttgaaagaagcacattcccccaggaggaggaaatggtttgttttctttagtgacagttggcccaggatcctaaggtaaaggagtatgggcactagacaaaatgagttttataatagtcgattggaaggaatggaagtttttgaatcacaggcttctgccttgaaagggcaagtccgtggtggtcatgaaccacccagagtgtgtacaaggctcctgccagaagaaatgcctgtaggattaaaagcaaaacagcagaatcaaaaaggaagggcacgatgatgcccaggtgcagcctatattattaacagacaaggaaagaatccaaataaaagttctgtaaaccagctgttgtcctgttttctgtttcccttcaaagcaaaaatatagatttgcatatatttgcagtctccccttccttgcctctcagtcttccctgaaaatctattccagttaggtctgcatccttgtcatgctgaaatgactcttatgaaggtcaccaaggacctctgtcttaacaaattcaatagccattcctgcctttactcatttacattccttactcatcttctcagcaatgttggatataattgacaacttctgccttcctgaaacaataattctctgagcttcaacatatggcattatactcttcagattttactctctctcactggccagtccctctcaatttccctggctagcttctcttctaaatgttataggatctcaggctcaagaatgttccctatcttcattctctctaggtaatctcattcagtcccgaggcttaaatatatacgtaccaataacttgcacacttttttttttagatggagtttcgctcttgttgcccaggctggagtgcaatggtgcgatctcagctcactgaaacctccgcctcccaggtgcaagcgattctcttgtctcagcctcccaagtagcttggattacaggcatgcaccaccatgcccagctaatttttttgtatttattagagatggggtttcaccatgttaggctggtcgcaaacgcctgacctcaagtgatccacccgtctcggcctcccaaagtgctgtgattataggcgtgcaccaccacgcccagccaacttgcacacatttatcttattttccatcattgcccctgagcttcagactgaaatacccactgcatttttaacacaaccatctacctagttcaggtcacaaactagaagtcaccttgctagctctctttccctcagcccttacatgcagtctgtcagcaagtcctgctggatctatctccaaagtggatactgaacattaccatagctccctatctgttgctaccatcttagttcaatccaccattatctattagtcttcctactgtcctttcttcccatagtagccagtgttctttctgaaacagtaggtcacaccactactgtttaaaactctccagtggctccttgttgcactaacaataaaatccaaataccttaaaaaggctggcgagatcctgtgagatgtggtccctgctatctctccagttccaccccctgccactcttgtccttgctaactcagtacaagagacattagtacagatagctcttttaccacctcagcttgccaagctttttcccactggggcttttgcaacacttattctttcttccgggaatatccttcgcacccaccttgaaaggctgctcctgctctttttattcgattctgagcatgtcactcctcagaaaaggccatctctgacttctctccattgttatccaattaccatgtcttattttcttcttagcacccattgctgtcaaaatacattagatgtgtttgtccacacatcatctttcaccactgaaatataaattcattagagcaggaattctattttcttctacattgtaccccctagtacctagagaagtatctggcatacagtaaagttcaataaatatttgttaaattaatgtatattgatgctgatgtgattttacaaggtcaattttaactgatacctaacttcaacaaaaagaaccctctgccacttgactgaacctgtacctttggacgagtttcttatccactgagctgtaatttactcatatgtaaaatggtactttttacctcatagggcaggtgttgagaattaaatgaagtgcatgacaacacagtaaacacttgaaaactgaagctaagtgggttttttttttttttttacttaatgtaaacattaccattacaaagtgccaagttttttgaatctggaaaagttcttttgggcttttctacagatagaagaatgttttagtcaaggctcatgggtagggccaggcaaggtggctcatgcctgtaatcccagcactttgggagcccaaggcagaaggatcaccttaggtcaggagtttgagaccagcctggccaacgtatagtgaaaccccatctctactaaaaatacaaaaattagctggttgtggtggcgcatgcctgtagtaccagctacttgggaagctgaggagaatcgcttgaacccgggaggcggaggttgcagtgagccaagatcatgccgctgcactccagcctggacgaca

SEQ ID NO: 94150 - DNA, 125395 bp, Homo sapiens
  misc_feature (1)...(125395): n = A,T,C or G
tccaacaattggcagtcagggtactggatgtttgatgtgaacaaagatttttattctctttgaaaggtactgatagagtagcacagttgaattgcttgaattggttttatgcatgggcagatttcagatacagggctgttcatccagtaacttttacaagtaccaaatttataaaagaagaaaaagaaaagaaaaaaatctccaaagctctgtaattgtctggcacacaattctcttccactgtgtcttctgagtatacattgaatataatgaaaataagtgagtcagcttgaacgatgcggctacatcccttacaagggaggggtgatcccttcaagctttctaaaccatcttgacagagacttttgctgccactcagcattgttgtttgttctaacaatgcatgcagggtagcctgtcccccactaagacaggttggattctctagagttttctgtaaaaattttaggaatgccttgtgtacattatgtaaataccaacagccacaacacttaagcatggtaaacacttacaatttcataattgtgtagccacacaacctgacatttgtatgagtcacttgatagataacatcttccccagtggtatgaaagtgaaatagaaaaggcatctttcaagggttctctctttgggcaaaggtgtggggggaagaataaaaatttaaaaataagaataattttgctgggcacagtggctcacacctgtaatctcagcactttgggaggccaaggtgggcatatcacctgaactcaggagttcaagaccagcctgggcaacatgacaaaaccctgtctttacaaaaaatacaaaagttagccaagcatggtggtgtgtgcctgtagtcccagctacttgggaggctgaggcaagagaatcactgagcctgggacatggagcttgcagtgagctgaaatcacaccactgcactccagcctgggtgatgggtgtgaaaccctgtctcaaaaaataaaaataaaaaaataataattcagttctgttagaaatctaaggtctttcatctggatgaaacttaacatccacctagagttgaatatacacagtggttggttctgtttgaattttctctccttaatttcttgggcctcccgtgccctgtctgattatacaacagaaatagtttgtatgctgtgtctgaaacactctgcatctaacaaagagttaatagactctacactgttcaccttggtcccagtttatctagtttctggatgaaagtgattgagtgcactgttgatcaattacaatggagaggtctcctaccgtttgtgcatatacatttaaaaaagccagggaggtccgagcgcggtggctcacacccataatcccagcactttgggaggccgaggtgggcagatcacctgaggtcgggagtttgagaccagcctgaccaacatggagaaaccccatctctactaaaaatacaaaattagctggacatggtggcacatgcctgcaatcccaactatttgggaggctgaggcaggagaatcacttgaacccgggaggcagaggttgcggtgagccaagactgcgccattgcactccagcctgggcaacaggagcaaaactccatctcaaaataaaataaaataarataaaataaaataaaataaaataaaataaaataaaataaaataaaaataaaataaaaagccagggagaacctcctgatgtgattcctctagcaggctttacactgggtcggggaaagaatctcactagagctagtagccaagaagccagaaaacacaatctttataaatattcataaataatgcaagcttgattgttaatgcatggagggggctggggtagaaaagaaaactagagattatgtgcttgaattcttagaagctgactgctataggcatggccccaccaacagccatttaccatcaaagagataaaaggaaaagattcactccctgtgtgtactctgcttttagctcagatatcacttccaggaaggcttccttgcccccagatggcttaatcctatcggctgtcccagaactgtgcgtttgtagcattgtactatggtttaattacttacccatttcttctactgtgagcactttgtggttagataacagctgcctctgtaatcataggcactcagaaaaagtttgtggaacagcaaaaatgtgtgtggaaaggaaaacagcctcaacatagaagctttgttggggacagactacaaaataaatggtaaagttctggcagaacctcttgggtacaattccactgagaaataaaggcagaaacagaaactgtagaagtagagaataaataaaaaggaagtgatagaggaggagaatcatcatcaacaatattaaaaagagaaaaagatatggaatgggattcagtggggtttggatggattgtctttgattattaacagatactatggacttagttggaaaatccaggatcataaactctgctaagttaacatgaatcatcaaccaattataccctataccttggaataatatattctatggcattccagtttcttgggacaactcactgaaatccagactttcctgagctacaatgtatatggtttgagataagtgtaaccctattttccaaaacctgcccttctgctgccagttgaagcagcaacgaagtatcaaaaaagcctccaagtgaaagcagttgtgtttttcctgtacactttttgtcttctgctgtgcttcctccactacccagagtgcaggggaaattccgctttttatctgaataagccggtggagtctataactgaagtttgtccttccccctattcctttctcctctgacatatgcctctgcttatagaatgtctgtaaatgctttcatttccttccttcactaagagaaaaaactggagaaggtgaagagaaacatcttttttttttttttgatggagtttcactcttgttgcccaggctggagtgcaatggcgcgatcttggctcactgtgacctctgcctcctgagttcaagcgattctcctgcctcagcctcccaagtagctgggattataggcacgcacaaccatgcccagctaatttttgtatttttaatagagacagggtttcacactgttggtcagactggtcttgaactcctgaacctcaggtgatctgcccgcctcagcctcccaaagtgctgggattacaggagtgagccaccacacctggcttttttttttctttcttttgagagagagagagagagagagagagagagagagagagagagagagacagggtctcactctgtcacccaggctgtagtgcagtggcatgatcatatttcattgcagcctggaactcctgggctcaaatgatcctcatgcctcagccttcccagtagctgggactactgatgcatgcacaccaggctaatttttaatttttatttttttaaagacatgggtctctctctgtttccccggccggtctcgaactcctgggctcaagcaatcctcctacctctgcctcccaaagtgctgggattatgggcatgagccactgtgcccagctgggaaatatatgtaaaaatattcatccactcaacaaaattttgtaacttgctgaagatgtgagcagagagatagtctggaggggtgatgtaggggctctggaatcaaacagacctggatttgaactctgattcaaacatttactaattgcctaaattactgtttgtatctgtcaaatgtcttaatttctcagggcctcagtttcttcgtgaataaaatagggataatagctcctgttccatttggtcttttgggtaattcatgaaaatggcttgggggcattctccatgatgttatcaaatggcaggactttcttcctctgcaagaagtagtttgcttgtctgtcattaagagcactgtaatagcaaagcctagaatcatctattcctaggagatattttaggcaggatatatccaacaatgtattaaaagctttaccttggaatggtctcagtctttacctctgtttacatctggtcatgaatcaaattgccagcttgctacttggcaatggctttgtcatagaatacaggaaacctggctttcaggtccccaatgtattcgtccgttttcatgctgctgataaagacatacccaagactgggcaacggacaaaagaggttcaatggagttacagttccacatggcaggggaggcctcacaatcatggtggaaggcaaggaggagcaagtcacttcttacatggatggtggcaggcaaagagagtttgtgcagcaaaactcccttttttaaaaccatcagatttcgtgagacttattcactatcacgagaacagcatgggaaagaccctcccccatgattcaattacctcccaccaggttcctcccaccacacaggaattgtgggatttacaattcaagatgatatttgggtggggacacagccaaaccggaagtagagagaaaacacactcaaagtagagggaagagctgtcattggatatcatggctgtgatcccccaagttgtgtccacagtgctgggcagtggacagatcttttggtatggttcccctaaactagtaagagactatgggagcagggatgttacgtgtctcttcctgaagttttaaattagccgtcatggagaaacctcaacatgggaaggctgataactccatgcatgttctagctgattattaattattcttatcttgagataaaaataatggaatttatcggaggtggggaggggaccctgttctgattgatgcctcttaagagttttcgattattgaaattactgttttctgaaaagaatctacttattactttgggagtttggcaggaacaaggctgcctccttgatctttggcccctcaattcccttacaggttactcggtaggattgctgtaaggattattgcggcaataaagttaacacatcccttgtttttgaaccattaccagctgtgtgaccttgggcaagccctttcacctctcagctagtttcctcttatgaaaaatggggaataaatttaaaacatgagatatgcaataaacgatctaacacccatgcctgctatacggttgcctgctatacagttaagtattcaaaagaggacgtacccaggggtagttactgttagcacaagtcctatggatactatgaaaaacagggacagaccacccaggctttctacaaacgagtcagttttttgcctttgaagttaacctctaaccttgtgaaacggcgacagataaggacatggggttcaagaaaacggggcatagtggaaaatcaggggcattagcacccaacgatgtgcgttgaaaccctagttgtttttctccttcccagttgctgaaatcagcccttctggccgattcgcggggttctcaccgggaagttggggctgtcgcgaccgtccgcggggcctcgggagctcctgtggggctgggcccgggacctgtccccggggaggccgcccagtttgggcggcccggagcggggcgcgccgctgggaaggggccgggtcgaggcaggcaggcgcctgggagctggggcagccccgggtggtcgggtcgcgcgccgaggcgcaggccgagggctcgcccgggcctttgttggccgccggagcggtccctgcacgcgccgggaggatctcagccagatgtggcagcggggcggcggggagcaggccggcgcccagagctgggacccgagaccgcggctccgctccggacctcgccgtgacaccgatgagccgggccagcctcccgaacgctccgcaggctgcgtggcggcgcccctaagtgacagtcgcgcgggccactggtggggcgcggggcgcggggcgcgaggcccgcggggccggccaatggctggcggggtcggggcggcccggcggggcggggcggggcgggcgctccagcggcggggccggagccggcggggcgggcggggcggcccgcagcggcggcggcggctacagcagctccgccggcagccgcgggagcacggcgacgccagcggcgggtgaggggctcgcggcggcagcggcggcgcgcgggggcgggagggggcgcggggcgcctcgcgcggagggcgcgggagttggggnnnnnnnnnnnnnnnnnnnncggcccggccggagctctgtgcgggggagctgttggcgcctctgggcgcggggccggctccgggagcggctgggcctcgggggcgggcggcggggcgcgggccgggccgtcctcccagcgtccctgcccccgcaccgcgcaccctcggggtcgcgcgccctctctgcggccggctcggcgcctggtgcgttcctggcgctccccggcgtggcggggctcggcgactttgggggaaagtggagcaaagtgctgatccggggggtgcggagggggagggacagctgcctgtgggacccgggggctgcgcgggagtcggcgctttcgcgggggccgcggggcaggtgggcggggycggacggtccgaggcgcaggggcaggggctgctcccgaggggaccggccgtgcagccttcgcagggaattttcacacaaagtgaagggctgcggggcccgcgtgaaagagcagcccccgtttccccaggcctcagctctctccgtaatgaggaagctgcagtaggaccctgaggctgggtctcggtgactccaccaagtgtgccaggtgacatctcggaggcgagcttttctgagctggcagtcgagccacttgcacacccgcctttattcctcgcaacagtgtgtttctctggagcggtttcattgcctacattccgcattggaaaatagaagcaggcacaatgtatgctttgaatgctttccacgtattttgctgttgtgcttttgctgttggacagattatttgataaaagataatgacagtcgttcgttggaacgtagactgtaaatttagaataaaaatatgcgttttgtggtttatgtttctttttctgaatgtttaaaaaacagtttgatgaacaggttatcttgacatagatttctttaacccacacgtgtaaacccgaaaacgcactgggcgatgacattacgtaagctgtattaaagaaaactactgacccgtttataaatggcaaataaatgaattttgccacaattgtggtgtgtaaagttatataggcttacgtcatggattttattgattccagatatcagggattattgtgcctttcattcttaagtcacctctaccctgtctgtgggatgctgattaaggaagatgccaaacgttcggcaaagtgttctcagccgtggactatattgagtatttcagagaacactttaaaataagtaaaggttttgtatccaataataaaatgaagactgaagcccttaaaggattgctaacaaaacagtctgatgtctagagttgaaagttccattcacctttgggagggtggagaaatgactagcaattttagccactacctttttttgttgttgttaaagattcaaacgtgttagattatagtctccgagaatattaaggggctagattaaaatttttgcaaatgtggacactaataaaaatgtgggtcacctgtgtcttacaagccagcctgtgaattatgtctcataattgaagagtgagtagatccttggttttactcttgtccgaagagtttcttcacttgtgccgtgcagttaaacttattagctgggaaaccctaattaaaaatgtatgactacattcttactgagtaaaacacgcatatttttcttgcaaaatttcagggcttatttgctagtagaatttattgtaagtatcttcagagtttcataacttactggatccagtattttttttttttcatatattaggggtagtatatcaatagtttactttggttttagagttcatttacttgtctctatgcatttctacggaatgtttttacaagctttatttgtatttagtaaaacttttaaaatatccttaactatatgatgtgcgctctacctccccgttattatgaattgagtgcttactctaataacctgtatgctttttagatcttttactagaacaaaattctttctcaagtaaaatagggctaagtagatagcagctgaaagttataagtattttaatataatgccacaccgggattaatgttccaagttatataattcatagaattatcacccgtgtttttataatcagaattcattattgggtgcttattgatttaagacaattagagcagtcttgctatgaagttttttttttttttcaaactgagtctctgtcacccaggctggagtgcagtggtgtgatctcggctcactgcaacctctgcctcccaggttcaagtaattctcctgcctcagcctcccgagtaagctgggattacaggcacctgccaccactcctggctaatttttgtatttttaatagagacagggtttcgtcatgttggccaggctggccttgaactcctgacctcgggtaatctgcctgcctcagcctcccaaagtgctaggattacaggcatgagccaccacacctggccactgtgaagattttaattctaaactgtagacgtgggcatgtttgatgttaacttgtcttaactgtagaaggtgaataagttcaatcttagagaacaatgataacttctgcatgagaatatttttagatctctttgtgttcaggtagtaaaagaggttaggtgcttctagaatattatgtggaaggtagagctgctgtctgagggttaacaggcatagtttggtggagggttgtggtgaggtattagccaaaagctacaggaagtggagatttgtttaaagttgtataaacatacactttgaaaatttccatgaattttgcaacttactccttagtagatcagtgtgtgttatataatttatttttttaatttacacttacagttgggtataattctgcagttttacctgatacttggagtatccctggaacttctcttcatattgccaggtgcaggaggcctcatttgagagggaaagtgtagcagctaagagcttggactttggagacaaacaaattmgagttctttctctggattcatttccttgtgtgtagaacagggttaataatgcctgcctcatakgaacgattttgtgaagatttaaaccatgtggtggatcaggcacataggaaacatttcataagttgtagtggctgtcattattagtactatgcccctgtgatctttctttactagggggaatttctagtagtgttcagtgttaagaagcagtggtggtggcaatttctgaattgcctgcaaatggctgcttgaatcggttgtgctcttccccagagagaattttcccttggaactgctggccatttttcgaggtatattaactcccccactacagtgtcagtatattaccaggtgcatcctgtggcacctcctgaggctaccaggaatctgttcacatcttggagggcctggcgtgcctccagggattgagactgaccatgcatagagtggactggaaccagtagctggctggttttgttgttgttcaattaaccaaaaaagtttggtttttagtacagttgacattttttgagaacctattatatgctgaatgctgtgcttaagtacttctaagacttcatttctttcccttttcccaacagctttgttcgatcagtggtgatttcccagatttcttgatttaaagcaatgcagagtgatagagcctaaggtgtacagtatcctggctggattgctgcattttctaaatgcttaaatagttccagtttacaccctgggagtgggttagtcactggaaaaacgacatttattttatgacagtgataaacagcagttataactgtaaccttttaataatttatgacaatatgtgaaagaggacacaggacagattgttacctcattttgtgaatgaaaccttgagacctagataagtggcatgccccaaatcatgtaagtaatgacagagctgggtcaagggtccaggtcttttgacccttatatattgtattctgtcaattttcttattaaaaaaatttcctattattgtgcaataggaaaactggagagagtgaagattatgttactcaggaaccattgtgtgatcattagagttctcatcttggaatctgtgagctccacttttccctttaaaatcagtcaccataactttctttttacagacaaaacaaaaccaatgaggagggaatatagtttgaagctgttttgtatttttttccaggaggagaaggaccatataattccagtatgttaaatgagtagtttcgatgtagggataatctttatagatgcaatttagccctgccaaaagtctgtttataatgatgaatagtaaatgaagaaacttacattttgcattaccgaatgagcttgactttctcttttcccctgaataggaagggaaaaggccgaggcatcagcgtgtgaagaccgcaaagacgatcccgagtacagttgtgaacagcattgctgctaggctcctcctgcagatcatctgaaatgaacctctcttattgatttttattggcctagagccaggagtactgcattcagttgactttcagggtaaaaagaaaacagtcctggttgttgtcatcataaacatatggaccagtgtgatggtgaaatgagatgaggctccgcaatggaactgtagccactgctttagcatttatcacttccttccttactttgtcttggtatactacatggcaaaatgggaaaggtaaggaaaatgactcggaaaatgtgcatgaaatgtactagggtttttgcttggttaaggtgcctaaatgcttaggtcaaataccctggcaatctgcatgttacatgctatctgctggcagtttctttctgatataaaaatgaaacagtattcttggacagaggacacagaatttctaattccagtggggcttgttttgttttcagtttcttataattgtacttggagaaacagatactgatcagtgttttatattctaaaagacagccaagttgaataataaagactttcgttttggcattttgttctttttactaaacataattaagtgtttaataagcttccttgtaccgagtgttgcataaaacacttaaaaggacacaattagtgccttcgtgagatttacatgctaattatgctaatgattgggtgctatgtagttaatgatttaaactgcatgcattgacagattactccttaggcaaaagtatttaagaagggataagtagaaattctgattggaatattaaaacatttttwaaaaattaattatgtttagactgttgaaccgtgtttatataattttaggataatggatttatttgcttttttttttttttaagagaaactacttgaagtaaattcctacccatacttcttacttgtctcctttcctttgattaatctaaggaatgttgatgatgagaagaaagatggaaatgttgaggtggttgcatatttggtttgttagaatatctgtcatcacctgggctatttgaagctgctgttgctgatgttgttttattgactcatgaagacaactgaaaagattgctttgtaaccttatttttttctgatgtgtgtttacatccatgtctatatatacatattgcatatgtatatatctgtatgtgcatgtatatgttaaaaatctgatataagtgaaaacatgctctgtgctttgagcaagtagagtcttttccccttctttgtctttctctgagttgggctctaattttgggggaactcttgggggaaaatgaatgaaaaacttgctaaggtcctttttgctttatatacaaatatgtacattttagaattcatgtttttattgtactaaatgagaaggcttaatcaggaggtgctttgtttttgtttgtttttgagacagagtttcactctgttgcctaggctagagtgcagtggcaagacctcggctcactgcaacctctgcctcctggattcaggcaattcttgtgcctcagccacaggagtagctgggactacaggcgcaggccatcatgcccggccaatcaagaagtagtttgaatagttaatcaaactattgattgtccctgacatgaacaaaacaaatgactggctattaaaagtctgtttatgaaataagagggttgatgagcagaaaagtatatgggttttttttttttgtaggaaacttacctattcagagaattatagtagtggagaaacttgacccttctcactgtgccttatttgaaagatggcaagtcttggaatctccatttaattttccttgtttcttatgtaaaggccttataataagcataattattaagctgtctttagaatgaaaattaattaaaaaaataaagattctttctccacgcagtgttagatgcacacatacagtctgttaactttgatcatcattctctgaatagctccataattcttctttgcaaacttctgctctgattttctacttggtgttttttccagactcttccaggtatcaacacaggtttctggttatggttacataaaatcttctgtgttaaatgttatcgtttctgtagccactcaaactgttgggcatttggattctttctagatagttctggcagtcagacagcctgggttttccagagaagtcctgatttgagagactcaattctaatatacccataaaccacgtgctctgatttttattttgaaagtgtggtttctataagctttgatgttgctaaactaatggkttttttttgttgttttttcattcattcatgggtcccttacatgtacctatcttgcacctagccctatattatatgctattaataagaaaagcaataagtaattttatgcctttgagcagctcagggactggtcagggaaagatgcatgtaaacaaatttaccatcagatagagttagatagaaacaataacagtgcttgcctgtaagtgtattatatgtattttaatcctcataacaacaattggagatattatcccctttctgtaaatggagaaaccaaggcagagtgactgagaaacttaccaaggtcatatgttaagtagtggagttaaagtttgaattcaggcagcctcattcaagagcttatgctcctagctattggtctgttgctcagaaaagcagaagcagaggctactaattcttcaggtgctttacacaggaggtagaatatgaaggatgaatgtgaaggccaagccaggcagagtggggaacactgggcatatcaggtccagggacctgcgtgtgcagctacaagttctgaaggggagtagagtattcatcctttggaattgtgagatgctcgttaataccagcacataggactcaggccctctcagtgtttagctggtaatcacagtactgcaaggttcttgtatggattcaaaccccaacagcgcaccaacagacaacacgaggaggtgtggagcaacatgctgttttaatgagcaggcaggctgaggcctaaaatggtgtcagccccaagcaaggatggggcaaaggttttatagtctcctgtaaataagaagtgtcctagtctgacgtaactgctacgttgtacccaggtgacccctctctcaatcttcaggggtacgtgtcttccggccggctctcctcctgcttctgctatcttgctggcgcatgctgctggcgcaagttgcaccttgggactgggcctgagaagggaggagttattcatctccttaagctttcaggccctggggagaatcttacaagtacagttcctagaagtactgctttgacatagtcctcattcaccacttgaaagaatacatgagctggtccatgggattggcataagttggggagtatctcaggaatcctgccagggaagctgtggtgcaagacagagtaacagtttcagcggggtatactggattcccacataaaaatgaggcagatttccaattatgtggaatggacaaattgggacagttgtaggtgggtgttgtgagagtggggcaggagtagttacgtgtctgtcttgccaggaggagcatggctcctgatggacctcctgctgtggtcaggcgcaatctagaccctgggtgagattgatgaagcagtcacgggtccctgtccatggggacagagactggtattatttttgcagtgcctgatccagtgatgcttagtaaacatgtagtaaacatttgttagatacatgattgattccttcagcaaaaatgtatttaaacagttttaaacagcttgagatataatttacatactatacaattcatccatttaaagtgtacaatcartcggtttttggtatattcacagatatgtatccatcaccacagtcaattttagagcatttttatcacctcaaaaagaaatcctataccctttagctattactgtcctaatccctacctccctcccctcccctcctaggggttaggcaaccactaatttttctgtctctatagatttccctattctggattttcagataaatgtaatcatacagtatgtggtcttttgtgactggcttttttcacttagtgtaatctatgcaatgttcacccgtgttgtggcagatcacttcacagtggggttgcttcacstacacagaaaggatgtgtgcttcctcccttcttacagctgaataatagtcccttgtatggatgtaccacactgtttatccatccatccgctggtgaactttgggttgtttctacgttttggctattatgaataatgctgctataaacattcaggtacatgtttctgtgtggacatgtgtttttatttttcttgggtatttaccaaggagtggaattgctgggtcctatcataactctattatgtttaatcatttgaggaattaccagactttttcaaagtgatgagacctgtacacattcttatacttttacttcaatctgtttatctttgaatttactgtgtgtctcctgtaaacaacatataattggatcatgctttttaaaatccagtctgacaccctctgcgttttgattgggttgcatatgcatacatacttaatgctattactaatataactggattcatttctgtcatctgattttttgtttttcctgtgccttatgtcttttttgttcctgtgttcctcccttattgctttttttttgcattaattgaattctaatatagcattttaatttcattaatgactttttcactacttttgagtatttttagtagtctctcaacagaatcagctttagatttatactagcttaattttagtaatatataggagtgttgctcctatgtargtctgttcctttttacccttttggggggtattgttgtacttattacatctgttaatgttgcaaaccaaacaatatattgttataattattatttttatgtgttattatttccttagcccattacagttttatttccacctacctcctctgtgctattactggcaattatattactgatatatttccacacgttatagacccagcaatgaattacataaatattttataccattgactttttaaatcgttaacagaaagaagaaaaaaatacattaatagtgtatattctaatttcataattattgctgctttttgtgtggatttgaaccaccatctggggtaacttcctttcagcctgaagaatttcccttagtgtttcttataargcatgtctgctaacaatgaattccctcagtttttgtttatttaggtatgtctttatttcacctttatttttgaaagatagcttttctggacataggattcttggttaacaaggacttttgttggttttgaacactgtgtgattgcattgcctttgtcctctattatttctgctgagaagtcagctattaatcttatggaagttcccttgtaagtaatgtcatttttctcttgcagctttcaagattttcttgtgtttgacttttttcatttccaccatgtgtttgtgggtctcttttattgaccctgtttggagtctgttgagcttcctggatgaatagcttattgttcttcagtaaatttgggaagtattaagtcattatttctttgaattattttcttctcctttctctctcctttccttctggtattcccattacacatgtggtggtgtgcttattggtgttccacctttctctgaggctgtgttcatttttcatttttttctccctcttgagcttatataatctctaccgacctgccttcaagtttgctaattctttctccattgtgtacaaatctattcttgaggcatgtattagttagggttcatcagagaaacagaacacacacacacacacacacacactcaaacacatgtgcacgcacacacaagatttattataggaactggcacatgtgattatggaggctgagaggtcctagaatctgccgcctgcaagctggagaaccaggaaagctggtggtgtaattcagtctcagtccaaaggcctgaggataagggagccaatggtgaaagtcccagttcaagttcaaaggcccgaggaccagctgggctgatgtctgagggtgggatatcctagctcagaccagaaacaaagttgcccttcctccacctttttgatctactcaggctcttagtagattggacgatacccacccacattggtgagggtcatgttctttcctcagtctacagattcaaatactaatctcatctagaaataccttcacagacatatccagaaataatgttttatcagctgtctgggcattccttagccccgtgagattgacacataaaattaaccatcacaaggtcctctagtgaatttttacttctattgtacttttcaactccagaatttccatttcgttctttcttaaaatttctctcttcttattaatagtttatatttgatgccactttgtcataccttcttttacttcttcaattaaattttcttttagttctgtgagtttatttataatggctgatttgaaatccttttaaaaataaatcctggctgggcatggtggctcatgcctgtaatcccagcactttgggaggctgaggcaggtggatcgcctgaggtcaggagttcgagaccagcctagccaatatggcaaaatcccatctctactaaaaataaaaaattagctgggcgtggtggtgggcacctgtaatcccagctactggggaggctgaggcaaggagaattgcttgaacccaggaggcggaggttgcagtgagccgagatcgcccccactgtactccagtctgggtgacagagctagactccatcttaaaaaataaaaataaataaataaatccaacatctagttcatctagttgtactcacaggcagtttctgttacctgcttggtttyttttccccgtttggtgtattggttgtatttttctgtttctttgcacatctcataatttttttattggaaactggacattttagagaaatgtattttagcaacctggggtactaaggtccccttcacctgttgttatttgctggtttatttgtttagtggctggccgcagcttcagctcttggtttgcccacactcaccctgggatacccctttactctttctaagactcctacactaattaccagctgattgttttattgtttacaccaatgccctggggcataaattctgctacaaactaaatggtggttccttttttttcttttccacctataatgtattctatgataaaattgtgattcctttgaagaaatagtttctaaggtcagtgtccgatatttttctgaccccaggaggactcctttccacctcttttgcaggttctctcctgcaagctagctcccacactctaggccgtatcttcactagatccacamttctccccattctctcaccacaagcccaaaattctccaggcgctgttgcaaatgaagccccttctttgggaagagatcaggaactgttttatggtaccaggcaggatttctgagtcttgaggtgggactgaggataatgacaggtttttctctgagtggcagccccactctaggggctgagcactaagtggaggggccaagaggttgaggttcttgtggctgtgctattccaggggtggaaccactgccttacaagcccaggaagggctgtcagggccctaatattctcagcacactgcatgcacccaatgtagagcctgcattccatcagcaggggttgggtagagtaagagagcccccacatctcaattgcacttgcctgggacttaaccttagctacaggcatttgggggcagcaggagaaaagttgaagtcctgcttctcccaggatgaaatcctgcagcttggagctggagagcaaagggagccctgtgttcttggctgctgtagtctggagtgaggtctctacctcactggttggggagaaaagaggggggaatgatcttggttcaaatactgtgctctcagctttctcactgaatttttatagattttctcatataggcatttattcatgtgctatttgtccttgagacagttttcaggtcctgttaagaggtttttaaaacaataattttcactagtttcacttcacaggggatcagcagagcttatgctgttgcgttggaagtggagctccaaaaatattttgaaaatgctttattcattaccagatttcatcaaatttaatacaccattagatgcaccatgattgtaaagtactgctaagcaggaaaagcagctgctgattaaactgacatgccatcacgtgtaagagtcaccttgatttcagatgttgaaatatgggagaaaatgtgtacctttgaatcagtagactacagtatattctgagaaaacacttactgcaagaaaagatcagattcatatcctgttagctataacagaaacaccagacgaagcattttattggaaactatgattcttatttgtaaataaacagtgaataaaagtttttagatttgtttttctttacagaataagcaaagctgctttcaaatacgatataaggaaaattaatactaagtctaggacttggaatacgccgtcatcattctggcttaccaaaattgtcgacctgtgttttttgagtgccttcggcrtgccaggcactgtttgtggtctgggatgcattagcattagaacatgttagaggaatatccttgccgtagtgtaggagaggagggaggagagagctgcagaacagtaaaacagtaaattaaacagtaagttgaacagcagtaaatgtttttaaaaactttattatgaaatacttttagagttacaataaatgtacaaaaatagtacacagatttcccttatacctatcctcccccaatattaacaacttatatataatcagagtagtataattttcgaaaccaaaagattaattttgatttaaaattattaactaatctacaaaccttatttgaatttcaccagagttcccactaatgtccttctgtgccagagtccaatctaggatcccatggtgcgtttagttgtcatgtcctcctactttcttccagtatgcaaaatttcctccatctttttttttttttttgagatggagtctcgctatgttgcccaggctgcagtgcagtggcacgatctcggttcactgtaacctccacctcccacgttcaagcgattctcctatctcggcctccctggtagctgagattacaggtgccctctactatgcctggctaattttgtatttttagtagagatggggtttcaccatgttggccaggctgttctcaaactcctgacctcaggtgatctgcccgcctcggcttcccaaagtgctgggattacaggtgtgagccaccatgcctggccctttctttgtcttttatgtcctcgacatttttgtggaatgccccttaatttgaatttgcctgatgatttatctggttagattgaggcaccgtcggccctctgtatacacagattcarccaaccacagatggaaaatgtggttaggtccacagtgtttgtgtctgtactgaacatatacaaactggttttttttggtcattattccctaaaaaacacagtataacaactatttatctagcatttacattgtattagatattttaagtaatctagagatgatttaaagtatacaagaggctgtgtgtaggtcatatgtaaatactgtgtcatatatcagagacttgagcatctgcagattttggtatcctcaaagatactggaacctatcccccatggatagcaagggacaactctaatgcatttttggcaagaataccacagaaatgatgttgatgttatgtcctttcttttctgagatggagtttcgctctgtagcccaggctggagtgcagtggtgcaatcgacaatcttggctcaccgcaacctctgcccactgggttcaagcaattctcctgcctcagcctcctgagaagctgggattacaggtgcaccccaccacacccagctaagttttgtatttttagtagagacagagtttctctatgttgtccaggctggtctcaaactcctgacctcaggtgatctacccgccttggcctcccaaagtgttaggattacaggcgtgagccaccacgcccagctaccttgttttttgaaactgggtctcactctgtcacacaggctggagcgaagtagtgtgatcatggttcactgcagccttgacttcctgggcccaatcagtcaccctcacctcagcttctgaagttgagggaaggcccacaggcatgcactaccatgcccggctaattgcaaaaattttttgtagagacagggtctcactgtgttgtccaggctggtctcgaactcctgggctcaagtgatcctcctgcctcagcctcccaaactgctagaattacaggcatgagccaccgcaccctggctgtattcttcagttagcacattatatcaggaggtgtgtgatgttgatgtgtcttgttactggtgatgtttgcttcgatcacttggttgaagtggtgtctgacaggcttttccattgtaaagttactatttttgccattgtaattaataagcattttgtggaagccaatatcctgtttcttatcatacttttacctacaaacgttaacatcctttgatgatttttgcctgcagcaatttttttaaacttttattttaagttcaaaggtacaagtgcagatctgttgcataggtaaacttgtgttacggggtttgttgtaaagattatttcatcacccaggtattatacccattaattattttttctgatcctctccctcctcacaccctccaccctccaaaaggccccagtgtgtgttgtttccctctgtgtgtccatgtgttctcatttagctgccacttatgaggacatggggtatttggttttctgttcctgcattagtttgctaaggataatggcctccagctccatctgtgtccctgcagaggacatgatctcgttctttttttatgactacctgcagcaattcttactgtggtgttttccaaatgtaactttctgtttccatcattcattctgtacttattagttaattggaattccactgtaaggaagagatgtctcttctccctcatttcttttttttttttttttttttttgagatgaagtctagctctgtcacccaggctggaacgcagtggcacaatcttggctcactgcaccctctgcctctcggattcaaatgattctcgtgcctccaccacctgagtagctgggattacaggcatgcgccaccatgccctgctacttttttttgtatttttagtagagatgggtttcaccgtgttggccagcctggtcttgaactcttgacctcaggtgatccacctgcctcagcctcccaaagtgctgggatcacaggcttgagtcaccacgcccagccctccttcatgtatttctttcttatttctttacataagtatgaactcatggatatttatttaattctggggttatggtcctttattacagtaacttattttgttgtttaaattgtctcagaggtggccattaggagcttcctcaagttggcttctgagccttttgttgtgcccctatcatttttttcaaatttattgaggtgaaattaacataacgaaattaacccttttaaaataaacaatttagtacattcacaatgttgtgcaactaccacctctatctagtctccatcatttttagagccattttttcctttctggtgccatagcatgctccaggcttgtcctgtattttctctacccctgtcctggaagcaatcatttttccaaggagcctgtagttcctttggagaatagagtcttgctgtgctcattcctaccgtggcatcatctttccagtccctctcagtgcacagagcaaggggatacatgtgtgcgtgcatagcatcctcagctatttccacgtccacctgcgtttcttgaattcctagtgatcccttggattttaattgaatactgtggtgtccatgctagtctcctcttttcctcatttgtaagtcctgcctccgacagtaaaaaatatggctctggcaggatgcggtggctcatgcctataatcccagcactttgggaggctgaggcaggtggatcacttgaagtcaggagttcgagaccagcctggccaacatggtgaaaccccatctctactaaaaatacaaaaaattagycgggcatggtggatgtgcctgtagtccagctgtttgggagtctgagacacaggaatagcttgaacccgggaggcgaaggtggcagtgaggtgagatcgcgccactgcactccagcctgggtgacagagcgagactccgtctcaaagaaaaaaaaatatggctcttactatcccaatatagttgcttatgctcaatcccagtatatatgtacagtagtttcagaattctaacccatacacaaatgaaaagtaaatttactagrgttcaatatttgtgcacagttctttttgtatttagtcttgtaatatacagatgctattttctaaagttacttaggttacattttagtcacttcctcttccgtgtggttatgttatttatttataatctgttaggtcaatatattactgtttgtattctgttttgggtttctcccatgtcatgctaattgcaattatttacattttggatatgtgaaacatgttggttctgagtcagaacagtaaaaaaggtatgctgagagatgtgtctcttctcattcctcctgtcccatttctattccttccttgtttctacccatccatcccttgtaggtgttcagtctcactattttctgatttatgcttcctggatttcttttgtatttttagtgtagacagggtttcgccatgttggccaggctggtctggaactcctgacctcaagtgatccacctgtctcagcctctcagagtgctgggattacagatgtgagccactgtgcctggcctacgggtttgtttgtttttttttttttttaagattagatttagccttaatttttttattcaaaccacggtaaagcaagaatttagtttttgggagaaaactctagttgccaattatgttgtaaacatgaaagtctggggatagagttgatttgattaacatttagatttaaataacttatttgggaaaagtagattctgtatctttttttgctgaagtatattttgcatgtctattaatatttacttttcaaaacctaaagataaamggcttttttttttttttttttttttttgagacatgatcttgccctgttgcccaggctggagtgctgtggtgtgatctcggcccactgcatcctccatctccaggctcactgcagcctctgggctcaagcaatcctcccaccttaacctcttgactagctgggactacaggtgtgtgccaycacaccaggctaattttttaaaaatgtatttttagtagaggtgaggtctcacagtgttgccaaggctgctctcaaactcctgagctcaagcaatcctcccacctcagcttgctaaagtgctgggattacaggcatgagccactgtgcctggcccaaaagggcattttttaagaagctctgttctgtgtatttccactaggaagctagaaagtaacttaaagcaaattatagtcagtattcatttggtaaagtttgtttccagcttaaataatagtaaatgttcacatgtcagggttttgtcttccctccacagttgagatgagataatatgattttctaaccaagatgaggggttggcgtgtgaatccgtcttcagttcagcaggtttagatatttattgcattcagagcagtttctcttaagtaatgttttaagtataagaaagatgtaaaaagtgcacaaatcataagtgtacagctctatgagttgtcacaaaggggcacacctgtgtaacaaactccagaagtacaacatttcagcatttacctgtctttcctgtattttggtgcacatattggtacacaactatttcagttgtcgggtcagcagctttttaaaaaggagtctttctcatggtgcatctctgaaggacccagacaagtgatgagaatcagtagtgttactcatgcattcatggaggtgtgaacacagtgctatgatagcactggggtaaaaacagcacattcagatgagggattctggaaaggattctcacaagaagcggtgttggagttggtctgaaaagaagataggaatttaatgggggagaaaggtattcgctgtgttaatagggaaggtggatgttggattgaaccaaggagtgggcacgtgtagtgtttggtctgatgaatacaggtccagatgcacgaaggatggagaagagtggaggagactgagggaatgaggaggggacagggactgttagagctgggagcagggatggtagcagtaaaggtgacgagagatctgaagggctcggcaggaatttctggtgaagagtgtcattatgttactactttatcctaaattttacttgctataaaatatcctgctgtgtgtggtgactcatgcccataatcccaacactttgggaagttgaggcaggaggatcccttgaaatgagcctgggcaacaaagtaagactccatctctacaaaaaatgtaaaaattagccgagtgtgatggcttttgtctgtggtcccagctactgaggaagctgaggcaggaggattgcttgaggactgggaggttgaggctgcagtgagccatgattgaggctaacgtggtacttatgcacgtgtgaacacatgtctttttttctcttgtaagttacttaagtggttagctgattttttttttgaacttcaaacacctcaatcaatataaaaacaagcacaaatattgtaaaactaccatatttatatttaaacttattattaattagcaatactatgggctttttcattaatttcttcatctctaaaccttcctaaagttaatagtaattctcatttttatacctttctgggattttagaaatctcatcaagctggaaaataaaaaagtgagtgtcttctgggaccattcgtgtcaaatgtgatcaggattattgactgagcattgagtaggggccaggaacctggttgcttcccccgatgtaatttaaatctaggttacttgttgtctgggtccttttttttttttttttttccaaattaacttgttagtttaatgaggccttttgagctcaaatttatcatatagattttagttttgcccaggctggtgtttcccctatggaatagcattccttaccgaccacttgtcattatatcgacttagtagagagattgcaaacttaagcatttcttgttgggatcttctgattagaaggccacttagagtttttttcttcttctcagacaagaggtctagtctagcatcttggttattttacgacagatcactgatttttttttaacccaacttctttatgtgaccactgtgcttatcttcctccccacccgccgttcttcttatacttcttattttgctccaaaactgtgggtttgcacagaacttcctttttccttccttcattattgtacacacagatagacaaaattttctatataagcagacatacttattagaggaaggaaataacaaatgtattgactgtcttctacttattcaaattcagaaaaaaattactgggcacagtagctcacgcctgtaatcccagcactttggtagatcacttgagttccggaggtcaagactagcctgggcaacatggtgaactgtccgcctccccgccccccatctgtactaaaaatacaaaaattagccaggcatggtggtgcgtgcctgtagttccacctactcaggaggctgaggcaggagaatcacttgaactggggaggtgaagtttgcagtgagccgagttcgggccactgcactccagcctaggtgatggagtgagactgtctcaaaacaaaaaacaacaacaacccaaactgacacaaaattaatcatattccttgtctttaaatttttgcatttcaacttttttggaataactttttttgttttcaaatgtatatccactaaatataatttgttttcttttaatatctacattgtcacaacctggctaccggataccatgttaggctgttttctttgcctcttctgcattctcccctgacatccttgaaagcactcttgcattcttaccctgtttccatgcttgcagacccatcctggtttttattttcctgtctgatgatgtggaattagctatgtcttaagatcctagttcctttcacgaggagttgttttagagacttcaaaatttgggtgtctatgagggttagtgatggacaaaagtgttcctgttgtttttgggaaatggtcattgattgtttttttttccaatttaaccagtcatgttgctctactctccttttcagtgagatttcattgatggctaagactttgctctgtgttggtgaactccagctcactaaagtgaagttctaataggactggagttttatagggaaactgggtagcctgaatttcttacttaaaggagaatgtgaaaagtgttgtgggctagggaaagagtttgccaactagtttatctcttgctttatgctgtggcagatggccagtcatggcttgaatttacccctttgtttgtcctggcaagcttgtgtgtagagaggcttctgttggcagcttggttgctgtttcaaagtaccaaaaattttgaaaaacattcttcacaaatcctgtgtgtgagttgtggaaaaaggaggtaaatgttccaggaaatctcatactcctgaactggatgtccagtggttggctaccatgttaggtttttcccttctactgggttgttctttcattaagttggtgtaagttaaacttaaaaacttgaacttcaagacttgtaaaatgtcttatttttgttgcgcctcataatatgcatttatcttgttgcctcttttgtaattctgcaacattctccctaaaatagacaaaatctatcctttgtccattcctgttttcccctttttaaatcagtaataaagtcccatttgtttgtagacagttgtgcagagaaataatagaaccgattggacctccattattgctgtatggtgctgtcatttcaggggaaataagcctgtagcttatagactgaaaacaagcttagagttggtgtttgggagcagtgaagagtaccctttgtagaccgcctttttctccgtggtctcatttagtccacactacagctctagggaaggaagtgagtattaatatccctgtttgacatgaagacactcaggcaattagcaaagtacttaatccagctatatgagatgactagaaagtgaattcagaaagaaggtctgaacctaggtgtgtctgactccatggggtgtacagcctgaatcggctctcagggaatgcccactgcctccagggcagtagagccgtgttctctggatgagtcctccacagatgagcttctgggatgctcacgttgtctgtcacccaatgtgatttctttgtatactttttacaaaactgtatcttcttagctagtatttaattatattctcaccctattgtttatgttgcatttctttttaagtgcacagtttcaatttaagaaagctggcaaaaaactagtttaacctgatggttaaacaaccagtttaactgttgtttttaggttgaaaaatcagttcatgctgccattagttaaaggatacttgaatcatgcaaaaatctgttgtttactccagcaacgttccctttaaatggaagcatctacattactggttgctggtatttctggaagaggcacgtgttaactggagtgaggcagtggatctttgttttgttactaagtgtaactgctgaagtgtcttcctagcaaaatatatgccaaagtttacggcaggtataactttttttttctagaaataattacacataatgttagactttaggatttcaggtttattgttttgatgcagaggagggtacttataaatctcatggcttttcattaaaataaaacacattatcagcgagtatatctaattagtaaatctcattaatcttataatattttccttttatcacggacctgaaaagcagcttgttgtcagctgtgctcactggcggggtgcggtggctcacgcctgtaatcccagcactttgggaggccaaggtgggaggatcccataagaccaggagttcgagaccagcctgggcaacatagtgagacccatctcttaaaaaaaaaaaactgagctcactaaaatacccctaacattgactgcatcataggggaggatgtcgtaggcttaacttatatattttggtctattacagttgattaaagtaaacttgaggcaactggcaacaaatttataaatagccagaaaatgtagattcacagtgtggaacttaagttactttgaaaccattttctaaaagcgagtcctgttgagggttaggtatgttgtggaatggtggaattcaaacagatgtctcactgtttggattaagtcatagagaagatccagaaaggactccggagattacacatgagcagccttgctctggaatggtaggatttggtcccttctcagaagggacaggcagggtggttgtggaagtgattgacctctccagatgctgttcatggttttcttttcctgaggaataatggctgtgctatcactggggagacgctagagtctggagaccttggttctcttgtagcttgctctttcatcttgggagggtcattttagctctcatgagactggtatgatttttttctcccctctcattccgctgttgattgtagaggagctgtaacatcgggagaagtgctaggaggtaaaataaaggcagataccattatgattgttattaaaggacgagaaagtggctattgcagatggcagagcttgacatttggggacagatattcattgggtgttttgtgagcatgagcacttataaaaagaagcagtgattgctagcagccagcaaaaataaactaggctagagtttaaacaatgagcttcttaaggaggcagaggccatgcctgcatgccaccctaccccatttaaattttaaaaaattatacagaaaagtatactaaatgatacagaaacacctatattcctattactcagatttttcattttttaaaaaaatggagacagggtctctctctgtcacccaggctggagtgcaatgacgtgatctcagctcactgtacctctgcctcccaggttcaagtgattcacgtgcctcagccttccaagcagctgggactacaggcacccgccaccacacccagctaattttgtatttttagtagagatggagttttaccatgttggccaggatggtctcaaacttctgagctcaagtgttctgcctgccttggcctcccaaagtgctgggataacaggcataagccaccgtgcccagcccagatttttcatatttacttctagtctttttttttttttttcatttttaatgaagaaagcatggcagatctccctaaagtctcccagccagtttccatctctgctgccctgcctagactgaggcagaccacatcatgttgtgtactcctgtaatgcatttttatatgttgatttatggatgtgaatattcactttttatgtatgtatatatgtacatatataattttatgtatctaaaaaatttacacagatagcagtatgccatgtatattctacagcttttttttttttttaaattcacatcaggccgggcacagtggctcaatgcctataatcccagcactttgggaggccgacgcgggtggatcatgaggtcaggagatcgagaccatcctggccaacatggtgaaaccccgtctctactaaaaatacaaaaattagctgggcatggtggtgggcgcctatagtccctgctacttgggatgctgaggtagcagaatcacttgaatctggaggcggaggttgcagtgagctgagatcataaaaataaaaataaaaataaaactcacatcattttgatacttctgcggagggacacacctcggtggcccctcctctaccatttttgctgatgtcactctgaagccactttttacaccattccgttctctagttcctagcaagattctggtccaaattcatccaaactggctattgtctagaattttcattcttcttcactcaaaagcttaacttttagggtttaggtcatgacataaaagagtagaaatagcttttttgtccctacatacatggtggatagcatttagggcacaatatcaaaacctctgtgttactatttttatcaatcggttcagcgtctgcattggttttctcattttcagtgtttgggcacactgagctgtgttcaataatgggaattttattgttagttgattttctttttttttttttttttttttttgagacggagtctcgctctgtcgcccaggtcggactgcggactgcagtggcgcaatctcggctcactgcaagctccgcttcccgggttcacgccattctcctgcctcagcccccgagtagctgggactacaggcgcccgccaccgcgcccggctaattttttgtatttttagtagagacggggtttcaccttgttagccaggatggtctcgatctcctgacctcatgatccacctgcctcggcctcccaaagtgctgggattacaggcgtgagccaccgcgcccggcctgttagttgattttcattaagttcggactactccacaatcacctaatcaattgttccactatagatacttttaaaatggacaatattaatttcctctgtagctagggtgatcatatgatttactgtccagagcagggcacttgagagtaaagggagtactgttgacagtcatgctggggtaacagttgtaaattggaaccgtcctaggcaaagatagcatgcagtcaccctgttcatgaagtgagaggcggtggtagagaatgactggccatgatcaggtggaacaaggaacctgaatgctgctgctgaactcgtttaggcatgctggtgaatgaagctccctgcgatctagaaccatcatttaagatcattatgacctctgtacctgacagagtccacgatccaatgaattaatcacacctgtgaaacctgcacagcattgcaatccgtgcttaaaatggggagagggcaagcatttccggaggtggtggcaggcatttgctggggcagtaatgaaaggtaatctttcagtgtgctgattaagatctagaagctcaataaaccctcttctcaggggagcttcttggaatcaaggtaagtaacttggrtttccttatcggaaagctagggttaatgataaggtagaaatgcagcactccagatgtcctcctgtcacctgccttaagggatgtttgttcccaatgtcagttgcgcctctggtgtactctccagaagcatgtttgctcagctgtggaggagtaattgaacattgaccttattggtctcagcacataaactactgcaataacaaatttgatcttgagggaaatttgctaatcctagttacaggatattagtggtttattggcatagtacttttttttttttaattgaggcaggatctggctctgttgcccaggctatagtgcagtggtgtgatcatggttcactgcaacctctgcctcctgggctcaagccatcctcccaccttagcctcccaagtagctgggactatacaggtatgtgccaccatgcctggctaattttttcttttttaagacggggtctcactctgtcccaagctggaggaccgtggtatgatcactgctcactgcagcctcgggctcctgagctcaagcagtcctcccacttcagcttcccaagtagctgggaccacagagcatgccaccgcaccctgctaagttttgtattttttggagggtagagatggggccatgctatgttgcccaggctaaatggctaatttttgtagtgtttgtagatatagggttttgccatgttgctcagactggtctcaaactcctgagttcaagcaatccacctgccttggcctcccaaagtgctgggattacagatgtaagcgactgcttacatagagcttttacactttttacataggccggcatagtgcttttgatctgaagtagctttcttcgtattgctgctttttctctcttcagctcagttatttattcattcacctagtgtttattgagcgtgtactaggtggtgatccactaggcactggcgatttcatggtaaacaagataggtaatgtccttgccatacagaccctacttacagagatgttaagttggaggatgttacacagtcgtagttgagcaactaggcagactgagttatttcagagagggatgaatactgacaaccaaacaagctaaggcgatgacaagtgactgaggtgggaatgacggctgtttagatgcgagtggtcacagaatgcctctctgaggaggtgacagttgaactgagacctaaataataagaagccagagagttggagtgaagaggggtcctggcagtatcacagcaagtacaaaagtcctgaggccagatgagtgtggcacattaggagagtgtaaaaggaagctagtgtggctaaagcactgttaggggtagggagtgttgggggtgtggtgggagataaagttggaaaagcaagcaggggccaggtcacactggatatggaggccacagggacatctttggattttattcctcagtgggaagctttatgccgagggtgtaccacagtctgattgacatttttcagagattcctctgcctttaaggaggtgttctttatccagttgaggaagttcccctctgttcctagtttgtagaaagtcattactttttcatatatttttttctactactttttctctatttccttctgtgaacgcttgggggtatcctatactctggggcctctctgttcagtctgttcagtttgttcagttttcctcaatcttttttctctctgttcttcagactcgataatttctattaatctaacatcaagttcactgattcttctgttcttctgccatctgaaatctgctgctgagcctctctagtgaattttaattttagttgctctaacaactaaattccattttgttttatatttcctgtctcttcgttttctctattcattgagtcagtttcctcacatggtcctttagttctttaaacttggcttcattagttcttttaacttatttatagtaactgtttcgaagtcttcatctgctaaacccagcatctgggaatactcagagaccacttccactgactgccagaattttatttttcccccgagtatgagtcctggtttctttttcctttgctgtcttgtgaatttttgttgaccaccatatattttaggtaatatattgatgcagttctggattctttacattttaactcaagtggatggtgattgttttatttgctatttgtttaagtaactggactggactaaatctcaagtctgtctctccggctgtatctgactctggatgtctctgtacttccgttttgattagttcttatttttaagcctggtttcctagagaggttgcccctgtgtctgcatagcatagtgttcagtaaagattggtcagtgcttgtagtcaaacacctcgagccggtagggctcccttctctgctcaggacctgttggactgtggagcacacggtactgcaagctgtttgcgagtgcgccccagctgtactttgccctggtctccttttacagctcctctgtgtgtgtgcatgcatgggctctaatgaccaggtgtgcatgggtggtgtgggcctgcactgctgtctgctgtgcatgctcagagcctccagtccacctgggatgtgtgaagagctttataagccccctacagccatctcattttcaaggcctccctattaagtctccagctggtgtgccagtccattgcttgtcccagatagaacagcagcctcatggcagcaggcctctggccctccgtgctgcttgcctgcctctgggcttgctgctctcactgacaacactgcaaatccaatgagtccctgccagcagtggcagtgagtttgctagttttcaaggcctgccccacgcctgttaaacttctgaattgacagagctgagggcagggcagatgagggcagctcttggcaggaaaagtcacagacttgtgctgttctcacctggagtccagtgggtttcatgaataaacacttctcagtttgttgaatgtcttgcttgctttccagagcaccaactaggttgtttttgactcttgaccagctttatagttgctttgtgggaagaggatttgtgagccttctcactctgttaygctagaagttagacatcccctgggaagttctcgaacgtgcccctaggtaattctgattggcagccagggttaggcaccagcacacctgggactctttgagctgtaaatatacacatacaacatcagggcataagaaagtttttgccatattgactttctaaaaagaagagtcttgaatgtttcaggtgttataaataaggacctaattttaaaacaggacctaactagggtctagaatgtagacctagcctctgccaaattggtcagcagcctttcttgctgatatgttaaagtttgccgatttagaccttgcacttggcatggtattattttattttatgttcagcttagttggctagcatccatttcctgaaacagactcctaatctaatttttccaggttggaaagcttcttaagcagtacatgtgctgtgctcagaggttgtctggaatctgtttgaggtattcttaactctgaaaggatattattcatggccgacatatgagaggggactacactgagaacattgggttattacagaacattaactgatttttttgtgctgcttcagaaacattactaatcaggttttggggatgtgagtaattgtccagttctagacccattgtgcaatggatacagtggataaagttgcactggactctgaaaccagtagtggacaagaatagcataaaaaagagactaatagatcagccttacctaataggatgaaatcttaaataaaataccartgaactaaatctttagagcagtgttaaacatttttggtatattttctttcattttttctggattagtggttctgagcatgtgatccaaggacctgtggggatctctagaccctttcaggaggttcatgaagtgaagaccatttttataatagccttttccactctcataagaaatagcagaagcagatgagaactcagctgtattctattcagctgaattaaagagatgtgagcaaatgtcactcttttcactaatttttttaagaaaacaattatttttaataaaatgcattatttatgctaacatgtaatagattgttttttttttttttttgagacagagtcttactcttgttccccagactggagtgtagtggcgcgatctcggctcactgcaacctccgcctcccgggttcaagcgattctcctgcctcagcctcctgagtagctgggattacaggtgcccgccaccacggctggctaatttttgtacttttagtrgagatggggttttgccatgttagccaggctkgtctcaaactgctgacctyaggtaatccacctcccttggccttccaaagtgctgggattacacgcatgagccaccgcgcccagccaacatgtaatagacttttaaatgaattttaaatacatctttaaaaagttaattggttttgatttgcaatatggtaaatgttgattgatataattcacataaacaaaaggtctttggggttgtctaattttgaagacagtgtaaaggggttctgagacctaccttatagatagatagatagacagataatgcaatatatactaatataatatagagtatatactaatatgatatcatatatagtaaatactcatatggtatttatagtatatatgaatatattatatatagtatatattatatatatagtcaactaaaggaaaaaatcaagcttttaaagaattaaagttaattttactcagaagtcttgctaaggactatagcccgaggctggcagcctgggagtggtcctttggagaggtcttgtgagatggcccctgcacagtgttccagccactgcttatatgcaggtagtgcaggaccattccaggtaaaatcatatcgcacttgctcagaaagttccataaaagcggaatcatgaggtttgggtatgagaggatatctggttatagcttgcagaagcatactcactaaccccgtcagatgttatctcacgtgcagaaaaaggcaaggacgggtcacgtatcctataagaaacatcgtgactcaggcaagagatgtggtgggccatgtgctctaccctattttgtcttcaaaacattcttccagggagcawtttgtcacatactcggggttcaagcggaaatggcaaacatggcttcctatgtttgctaatttgtctcacagtactacatatgtgtctccctcaaaaaatgggattggcctcatactgtgcatattgtataatgtacattttttgcttaatatcacaaatgtttcccataccatgaattgtagtgggtccataatattccattttacaattaccataattagcttaatcttataagtaatggtataacaaattttatgcatattattgatcaatttttaaatacatttttttagtttaagaggatttgcctcttgttacttattgcttggcattctgtaaggcaatggcatttagggggaaaaaaaaaagactaaaatatgattcctgctgtgcagaaaagagttaacatggcaaatctgagactgctaattatcagaaagcctggcttgaaaggctggtcctcggctggcctctgggaacttggctgataaaccctgataataacctttccctatatgagaagagtggctcagtgtgcctaaactatttgtacaagttgtgtggttatgctgaacacctggtttccttattggagtctgaaattttggtatgtactaggcagcgggtgcctatgtgaccagcccgcagtaatagcctttgacattgagtctccaatgagctttcgtggtagacaacacaacacattgcacgtgttgtcagcactcgctrctgtgggaaggaagtgtgtcctgagtcactgcatacctggtttcttccaaacttctctccgtgtgtcttttccctgtgctgcaactcaatggtgagtcctgtgagtccttcaagtgaatcactgaacctggggatagtcttaggaactcctgacaaacctgctgttaaggaactcatagctgaggagggaaaaagagataagtatgtaattatagtacagtttgtgttgatataaaatagtgtagttaacaagataaaaaggagctaaagagaggatagaggtcagagaaaacttcacaggaagacaatgaaagagtattttgaaggatgcatggaattttttccagtaaagaaagagaaggtggatctggtaggcagacagcatgaacgtagagcaatgaaactcatagtaagtgggcttggagcactccaagcagcttggtaatactgaagcaagaaagatcctgggcaacgtgaggagatcatgttggagagttaagtaggtagtcattgaagggtttccatttagaaatgtaaggtrcagaggataatgaaggggaaaatgaaaaggcatgggtaacagtttcgtgttcctggtcaggagatgaataaaaggagcgttgatactgggatctgtgtaaagaagagaggattaatgagcattaatgtaagcaaatgtgaggagatttcagagcatatttatttatttttaattaattttattttttgagacggagtcttgctctgttgcccaggctgcagtgcagtgatgcaatctcagctcactgcaacctctgccacctgggttcaagtgatttttttctgcctcagcctcccaagtagctgggattacaggtgcacatcaccacacctggctaatttctgtatttttagtagagacgggttttcaccgtgttggccaggctggtcttgaaactcttggcctcaaatgatctgcctctcttagcctcccaaagtgctggaatttttttataggcatgagccaccacacccagccagcttatcactacttctggttcttctgcacttgaatcatcaaatgcaaatatcagtttttgaaaactgacagctaacaattttgaaaagagaatggccatcttttcagttgtaaaacattttattaggtttataaacagcaattagaatgatcaagtcaatgaaaaattttttaacattcgctctctttctaatcacttttgtgtgtacatcaacctttagcatttgtcttcttatgaacccatccagttaatcttgttgtatgaatacacagtagacaaaagagtactgttacacatcctcttagtaaggcagtgttctgggctcctctgacaaacgttgtggtgaagtcctttcagttgaatgacccactggatgaacatgccctattttctttttgcccttaataataattatttgttcgttggttcttttctgctttgctttttcaaaaacctatttaaaaataattgtagaactaaaggaagctgcaaagacagagagatacagtgcaaacttcacccatctttccctgacagttacttcttgggataacttatgtgtatataatgtacaatatcaaaatcaggaaattgacattggtattatgagtgtggatagttctgtgtccttttatcatgtctagattcttgtaaccaccactatagaacaattctatcaccacaaagatctcccctgtggtgtcgatagtcacaccaacccctgcatcccccatcatccctaacccctgggaacctagtctattatccttcactataactttgtcattttggaaatgttattataaatggagtcatacagtgtgtgagagattggaattttttattctgcgtgacgcccatgaggcctatccaagttgctgggtgtttgagtagtttgctttgttaccttgctgaggaggattccatggcatgggtgccaaccttttatatggcatttaatgggatcatcttctaaaatctagtctctcttttaattggtgtatttagactatttatattacttttagttttaaaatgtccactttattccatgtaacacttcaccagagatcatttacatctgaggaagagatggcccatgaaattgatctatagtaaaatactctaagaaatgcagtccaattctgtacatttccaggcacccctaaaaaagtggatcacaatgcagaaatataggcattgttactacaatttacataagataaaagggagatatcaataaaccttagaaagtaataaattcacccgtttcttaatgtatgggtatgcagttgttacaaagccatagtaaatggtttataaaatgagattttattttgtgttcctctgctgtttcataggggatagcatttttacaaggctcttttgggactacagccagtgattagcagcacataacagtggtccacccctaaagaacaatcactagacaggctggataccctctgtcacatgtgcacaaatctgcatggaaaaggactaaacttttagacttggacttgggtacttatttcccctttctagtgtattaagagatgacatgcgctttaatttgccaaaagcaatgcttgtattctggcagcaacatgctacttctattacatagtaaagtgaataccagaactgcaaaggcaggaggtgtaagtgaatttgtattgggaagagacgtcaacttagacagcagcaaatgaagagtgaataggaaaactgcctgttgccacagacgtacatgacctctacaatatgtgatataagaggcatttcaaatttatggcctccagcccagagatggcaagtgcttttccattcagtctaatacttctgcgttcctactaaaaaggaatatattaagagcatagaaaagttccttactgaaaggaaatctcaaagagcaagggagggaatgtagaaattaggaagttggctgggtgtggtggctcctgtctgtaattccagcactttggtaggctgagttgtgcagatcacctgaggtcaggagttcgagaccagcttgggcaacaaagtgagacccccatctctacaaaaaatagaaaaattaggcaggcatggtggtgcatgcctgtaatcccagctacttgggaggctgaggtgggaggagaatctcttgagcctgggaggcggaggttgcagtgagctgagattgtgccactggactccagcctgggcaacagagccagatcctgtctcaaaaaaaaaaaaaaaaaagaagttctgtggaacactctttaaattgtaattaactacattttcatatatttacagtaatacaaaacacagtcacttgcagacctggttaagattaaataccagatacaaatatgtcctctacataagttttttcaagttacttttgtttatatggaatgaaactgttaatacttttctacagcagtaactgcacaccaggaaggccaagacaaacacaaatcagggaatcaggttttctcaaagctgcagtgtggaaatactataaacagttggttccatacacataaataggtttctttgctacaggaaatccaagtggaataaggaatggacatggtaaaaaggtttcttgaagggaagaaggataacaccctgcatgcatttagtgttcagccccttctgctgcattgcgttcttttcctgcactgtgtgatgtccacagtgttattaggttgtctctcagcaactgcatgatgagggggctgtctgagtcttcagtgtatcaggttctgcagtggcttcatcaaaggctgttttagggctgggtgcggtggctcaggcctgtaatcccagcactttgggaggcaaaggcgggtggatcacttgaggccaggatttagagaccaggcaggccagcatggtgaaacctcgtctctactaaaaatacaaaaaattagcctggcatgatggtgagcacatgtagtccagctacgcgggaggctgaggcacaagaatcacttgaacccaggaggcggaggttgcagtgagctgagattgcactacagcactccagcctaggagacagagcaagactctgtctcaaaaaaaaaaaaaaaaaaaaaagccattttagccagtgggcaggtgagctcagggttgttaaggatctcacagtaaaatatagaaaagttaagagccagccccaggcagatcggaaggggggggttgcatctctctcttgcttatcaaattgtcaaatgtgtcttggtaagctcctgggaattatctaccatctgtgttttttgtttgtttgttttgttttgtttttattttgagatggagtctcgctctgtcacccaggctggagtacagtggtgctatctcagctcactcaacctccgccttctgggttcaagtgattctcctaccttagcctcctgagtagctgggattacaggtatgcaccaccacacccagctaatttttgtatttttggtagatgtggggttttgccatgttggccaggctggcctcgaactcctgacctcaggtgattcacccacctcggcctcccaaagtgctaggattataggcatgagccactgtacctgacctaccttctgtttttgatcattaccacatgcaacttcagcaagatactggaagtaatccccctttactttcagatagaagacggttctctctggattagttgcattggctattgaatataatacttatcccaaaattccaagaccatggtgtatccaaaaattccaagaccatgggacaggtggatctcagctcagactccactttctccctatggtacttaatcagtagcagcttcatgtcggaggtgtcagtttcctgctcagtgcccaaaatgtccttccaggtggacctgtagtccctgaccccatacttgtaggccactgagagcagattgcgctccttgctggacagctgggtgccccacttggtcatggccttcgtgtaggtggccatgttgtcacagtgcttagcctgctgggccagctctgccttcaccatggtgggtgggtggctggggctggggctggggccaggctggagctggggctagggtggaggatgaatcgagagaacaagagctctagaccatttacatttaatgtgattattgttacgttaggcttaatcaagtctaccattttatttttctttgtagtttgttccttcagtgttttaattttttttcctgacttcttgtgtgttcctgaaacagttttcaaaattccattttgatgcatctgtagtgtttttgagtgtattcctttgtatagatatttgagtggttgctctaggtatttcagtgtacatatataacttaccgtggtctacaggggttgacgttttatcagtttgagtgaagtatgaaactatttcctttaaagtcctttgccctccccagttgatctttttttttttttttttgagagaagctctcactctgtcacagctcactacagccttaacctctaaggctcaagcaattttcccacctgagcccccgcaagtatgtgggaccacagatgcgtgcaaccacacccagctaattctttaatttgtctatagaaatggggtctcgctttgttgcctagcctgtttataattgttttaaatatttcttttacattgagaaccacatcagacaatgttacctttttgcctcaaccatcaaacataatttagaaaactcgagaaaaggaatgtctccttgcatttttttctctttttcagtttttcccttttgatgttgcaagattccttcctttatcatttcctttcttttttaagaacttcctttagccattcttttcagataggtttgctgatggcaaattccatcagttttcttttttataagaatatcttgattttccctttattccttacagatagttttgccagagatggtatttgagattgacagttctttttcttttcttttagtgcttaaaaaatgtgccatttccttctgatctccatggtttctgatgagaaatttgctgtaattcaaaatcttttccccagtaggtcatgtgtgttttccctctggttgatttcaagatttcttctttgtctctagttttctaacgttcaattgtggtgtttcttttcatgggtttcttcaggtttatcctgtttgggttttgctcagcttcttgaatctttatgtaggtttatgtgttttaccaaatttgggaaattctagctattatttctccaagtacagtcatgtgtcactaaatgatggggatgtgttctgagaaatgcatcgttaggtggttttgttgtgtgaacatcatagggtatacttacacaaacctagatggtacagcccactacacacctacgtactgctcctaggctacaaacctatatagcatgttactgtactgaattccataggcaattataacacaatggtaagtatttgtgtatctaaatatatttaaacatagaaaagataaagtaaaaataccgtataaaaggcgaaacagtatacctgtagagagcacttaccatgaatggagcttgcaggagtagaagttgctctggatgagtcagtgagtgagtggggagtgaatgtgaaggtctaagacattactgtacaccactgtagactgccatagccttcacaaatactgaactaaggatatactcagtttataaaaatattattctttcttcaaaaataaattaacctggctaggggtagtggctcacatatggaatcctagcactttgggaggctgaggcgggaggatcacttgagcccaggagttcaagaccagcctgggcaatatagtgagaccctgtctctacaaaaaaagaaaaaaaccacaaaaattasctgagtgtagtggcatgtacctgtacttcagctactctggaggctgaggtgagatgatcacttgagccaagaaggttgaggctgtggtgagccttgatcaggccactgcactctagcctgggtgacaaaacgagaccctgtctcaaaaaatgttaataattaatcttagcttattgtaactttttaacttaaaaaaatttcaactgactcctttgtaataacactaagtttaaaacacaaacacattgtataaccacataaaatattttgttttttatattcatattctataagctttttctatttaaaatttattatttttttactttttaaacattgttgttaaaaaggaagagacatacacattagcctaggcctgcagagggtcaggatcatcagtttcctagtcttccacctccgcatcttgtcccactggaaggccttcaggggcggtaacacacatgaagctgtcatctcccatgagaacagtgcctccttctaggataccttctgaaggacctgaggctgttttccaggtaactttttttcctatgagcagaaggagtatactctaaaagaacaataaaaagcatagtatagtaaatacataaaccagtaacagttgattgtcattatcaagtgtgtactgtacataattgtatgtgctagactgttacatgactggcagtgcagtaggtttatttacaccaacatcaccacatccatgtgagtcatgcattgtgttatgctgttacaatggctacagtgtcactaggcgataggaatttttcagctctattataatcttttttttttttgagacagagcttgctctgatgcccaggctggagtgcagtggtgtgagcatggctcactttaccatcagcctcctaggctccagtgatcctcccgcctcagctccctagtagctgggactacgttacccagctaatttttgtattttttgtagagatggggtttcactgatttgctcaggctggtcttgaacttctggcctcaagcgatcctcttgcctcaaccttccaaagtgctgggattacaggtgtgagccactgcgcccagcctccattataatcttacaagacccctggacatatatggggcaggactgtacttttcccaccccaccctctttctctatgttgcttctctatgttcttctgtgttgctgatgatagccctctttctgtatgttctgtgttgctgatgatagcagtgttagatctcagatcttttgttacagttccaaacgtccctgaggctctgttaattttttccttagtctatattctctcttttgactagattgggcaattgctgttgtctttcttgaggatcactgattctctccatctgctcttgagctcacccattaagttttttttgtttcaattattatatttcatattctgaaacttccatttgtttatttatattttctatttctttgcttagggtttcagttttaaaaatttgtttaatgtacccattgaagcatttttatgatggctgctttaaaatccttacaaggtaatttcaacatctgcgtcatcttggtgttggcatctgttcatagtttgttctcactgatgttgagattttcctggttctcaatattatgagtgattttcagttgtgtccaaggcattttgggtgtttattataagactctggcttttatttacattgtctgtcatagctggccttttctgacatcattttgggagggtacgggctgtgccacctcattatgctggtgggaatgggatgaaagtccaaagcatccatcagtacccagcagggagggattcctccttccagctgtgcagggttgggaggtcagtttcccgwaagtcctgtgctgatgccacacttgctaagaggggagaagggaccctgctactgcttctcctgtggcctccactcacacctcaccaggaggctcattactggtggagggtggtgaaagtcccagctccctcactcagtctttcctgaccccatccacatattatgggtgtcagggggcctagtaacagttgggcaagggtggaagtctaggctccctgcctggccattgctgatagagtggggatgggaccatgtgttttcatggtatatggctggagtagagtggtgattgtctgacgttttctgtcctgctgggttgccctttactgagtcctttgcatagrgttagcaggcttttcttggtccttttttttttgtgctcctgttggtattttcaggttgccgacttttctagttcccattctaggatatatgaggcagaaagaaaattcagagaactcactactgtgttgtttcttgggtcccagtgactctaccctttctgccttctgctttccacctttcaaagtcttcttattttttattttttgtggtggttgttgagacagggtctcactgtgttgcccaggctggagtgcactggcacaaactcagttcactgcaacctctgcctcctatgctcaagccatcctcccacctcagcctcccgagtagctgggactacaggcgtctgccaccacgcctggctaatttttgtattttttgtagagacagggtttccccatggtgccgaggctagtcttgaacttctgagctcaagtgatccacccgcttcagcctccaaagtgttgggattatggatgtgagccatggtgcccagccttcttatttataatatctgggtttataattgtgtttagcaggatgcatagagagaagtgtgtctattccatcttggtctggaactggaagtctcatctgaattagagaaagttcttcaaggatattgtcatctgaagactcatagtctgagattttgcttttatgatcaatttcaccaccattattagagtctatagtgatactacctgctttctacattcattttctgatttgtcctacagttgtcagatgtctttgctgtaacttttcttctttttgccattttgggtacaaaaaggaaaaatcctgaattcccagttgttttcagcaaaggttacagaagactacaaagtagtgtttttgaacttcttttatgctatcctgaaagatgatgccagtagtcttagaaacacaataagaaaactaaaagatgatataatagtggtgatttatgtcactatgtaccatcctccaggtggttctatcattcttccattttatttagttttttttagcatgattaggaatgattgatgaataattataaaattgtaaagtaattcttaggacaataaaatagcaaaaagttttaagatatagaaaaaataggctcactgagatcctatatctgtattatttatctatttatgcataataaattaccacaagtttagtggtttaaaatgatacatttattatctcttattttctgtgggctaggaaactgggcatggcttaactgagccctctacctgggctctcaaaaggatacactgaggtgtcagctggactacactatcatcttgagacctgactcgtaaagaatacactcccaagcttatccagactgttggcggaagtcatttccttgtggctgtaggactgagagcccaggcttgttgttggctgttttctgggatgcagctctaagctctttgtcacatgggcttttcggtttagttgtttacttcttcaaagtcagctaggaagtctatagacaccatatattatactatacactatagatgttatatgagatggagtcctgtgtaatataacataatcctggaaatgacgcctatcacctttgccatattctgttcattagaagcaagtcattgtgtctgcctgcactcaaggggcagaggttgtggaagtctgtgaataccagaaggacgagggtcactggggtcactgcagagtccgcttgygacagtgtcttagatttataaaacagtctgagggactcatatggtaattgctagacagaatgagttatattctttttttttgttttaaaaaaagcccagatgttccctttatcctttgggaggtttctaagaaagactaaaagccatgaagtatcagtccttaaaaatagaagatttcaaaaaagaaacgatagctaaatttgggtgcggcggaccttggtgacatactgagggttaaggaggagtcagatgggatgggaagataaaatcttgataacctatatcctcacctgtctcatcatcagtggactattggaagagtcagacaagggtggaggaggctgtagctcacattctcactgctgcctcacctgtagtgaggcaggttcatttgtttttttcctttttcagtctgaggcatcttctggttcactaggcccctttcataagaccacagggtgagtctgtcaagttcccacagttaaagtgggagtgccgcagcctggaagcactagccggtgttggaaatggtgtcagctgtgattttggtctgggcctgcagggcaagtgagtggactgtttaaaccattcacatggagaaataaagtcctcagtaatttgaaacaaagaaaaaggagacagggctattgtggggtgggtggggggagcatgaataacatgaaaagaaagaggtgagagcagtagtttgattgaaaataagtccagaaaagaaacacagaagaatttgaaaaggactttgcagaagaatattaggagggggaaggtggaaatgaatgagcaaaaggaaagtgagaagagggaagaaggagaaagcatgaaataggtcatacaaggaatatccagatctagctagggacatgcagtaagaggacacgcttgttagtagagctactccatagtgtgtgactggttaattatcagtaccctgctttttagttaaagatagttctaatgaagaactatctacatagtacacttagctatatgtttgtaacagttacaactatctacatagttctacattagataactatgtagttatctttgtagttctaatgtagaactacattagaattctaatgctgtgtcttgaggattcttcataggaaaatacagcgcattatagctttcagaatacaaaatgttcttaattttccttttagaatgaaatacacctttatgaagaagtgtctcccagtaactttaaagtacttaaggaaaatagtttataaccacctgataatttttactccaagctccttgtggttgttgaattttaaaaagtcaggttgaatacaatcattgttaatatttttagaagtgaagagctgttataaacatatagctaagtgtactctaatgaatgttatcatgagttatgaatttttatagttcctcattttattattataagggaatttgggacttcacgatgaacttactgaaaagagattgccctttcccaagggaagtcaaggaaaattattacgtctatttagatttgggaggccgaggcgggcagatcacttgaggtcaggagttcaggaccagcctgggcaacatggtgaaatcccatctctactgaaatacaaaaacttggccgagtgtggcagtgtgcacctgtaatcccagctctttgggaggctgaggcaggagaattgcttaaacccaggaggcggagattgcagtgggctgagatcatgccactgcactccagcctgggtggcagagcgagactctgtctccagaaaaaaaaaaacaccaaaaaaccaaaaaaaaacctgtgttataggtacatgcagcatcgtttgtttgtcttaaggtgttatgtttattaggtcaggggatagattttaacttattaaacctctacctggaagtttgttttgaatgacactgttaatgattatattagccgacagcttagagaaatagtggttgcgttccagaaaatatttcaaccatagccgatttggtattcactagtcactgttttgtaagtatactgaaaacataagggagtaaatgaattattttcattattttaatttaaataaagtgtatgatcctgtatatctatgagccccattttcccttttgaatttagaagggtgcagctattttcagaatccatgcgtatgtgttggatcctgactggagtactccaaaaccagaataatcttgataatgccatgtaagagacctttgaaactggtgttcactggatacttggaaaaccctctctgtcccaagttaatcttcaggattacggccctaaacattttaatgagcgccccctgtccctggaacccttaacctgtgggccagaggaagggagaggagaaggaactggtagactagaactacataaacttctaggttgctcgagtctagaactaccccgaggacaatgctggctacctctgggcttctccgctcatggacctgggactggcacatcagcatcacctgggagcttgttagaaattcttgggccccacctcagaccatggaatcaggatccctggaagtgaagtccagaattctgtgttttaatgagcccttttaggtggttcttatgcatgataaattcaggaaacaatgagatacttggtctcgtttgtaagttttagctatccattctaattagaattgtctgttcaagttctgttctttcagcctgtttcatttggactgctgttcactgtgtcttttggctttttatggcattagttctcctaaaccaccctctgaatccagttcttttatttttttttctttatgcttaagaggtttataagtgggaaattttctgcaatttcatctaggccatcttctttctaatttaaaatggttgtgtaagagtgatgcatgtgaaatctttaaaaagtgaaataaaacatttttcaaaggcagtggcttcctgagaagtaaagcttattaaattttggaatcttactaaaaaccttcctcattcatatttaaaaaaaatttatctgtggaaagaattgtatccgttcaatgtggtactgaggttgaaccagatgactactttttttttttttttttttaagagacagggtcttgctctatcacccaggctgcagttcagtggcacatttgccactcactgcagcctcaaaccctgggctcaagggatcctcccacttcagcctcctgagtagctggggctacaggcatgcagtaccacactggctaatttttgaaaatttgttgtagagacaaggtctccctattttgcccaggctggtctcaaactattaggttcaagcaatcctcctgccctggcctcccagagcactgggatttcaggtgtgagccaccatgcccggcccagaggacttatcaacatttttttcagtgccagaattttattatctaataaatattaaaatgttttaaattaagaaataaagagtgggtttaacttttggtagtttttgtttcaatacaaaaagccagtttttaacactagctctgaatttagtagtatcttgtacatcttgctgataagaagttactattgtttaaaaaataaagttctctggtctgtttttattcaccacacattagatgtgacttattggtgctttttgtttgtgttaatcattcatttatactgttgaacaatttcatatgaaattaccatttttgccaaaaaggatcaaatatcagcaattttatacggtttagccttgtaagtctttgaaagcccagagttacccttttcactggaaactgacctaaatatttgagttgaagaatcaaagtggtttctctggaaattttgttttagaatcttaggttcacaaaacacaatttgtacaaaacataatttgtactttcattgtctaggctgaacatataattttctacaattaaaaaagttagattttgtctacagtaaaaacaaaacaataaacaaaactgggcacttcccagtaagatggtagtatgaaagttccttcagtttcccaccatgacccctcatacaaaccgattgaaatgattctaagaaaagcaaaaataagaatttttctactaatgttgacaatagggaattatcaaacatattaatttggaggaattttttcatctgttatgttaaagtgaactgaatgctggaagcagataaacaattctcttccttaagaaagctgtatagtattacgggaaatataaatggagaaaagtctagggaaaattctagaaagttctagaaagctgagttggctttccagatggaatatgaagttgccctgttgttgtggagaactcttttaatgtggcagaatggagttagaaacaaaggacggatgtgagagagatcgaaaatggcccctctggagccttttcatagctgtgggtcttggactaagaacagcaatagcatccgggctagaaactaaatacctgtgacattatccaatagtccatgggcccccagggactttttctaagctaactttccaaaagcatggacagttcccctcaaagcagggaagcattttagaattaggggtgcggcatttctctactgggactgcttattcttcctacttgctgaagctggcctctgggagggtgatttgaaaacataacaagaaaatgcatgtggagatggagactgccctcagactcctatccctttctaccactcaggagctgatgaaagactgagcctatatctgccattcaatctcctgcttactttaaagcatcattgtattaaaaaaaaaaatgatgaaatgaagagttgcaaggatagtacaaataagttctctacacatttcacctattgtgaacattttgcctctatcatcttcctttctacagatatttgtttcttttcagaaccatttcagagtaaattgcagaaatcgtgcctctttacccctaaataattttatgtttatttcctaagaaccaggacattctcttacattaccacagttcgagtgtcaaattcaggaaatttaacattggcacaatcatacccattctgtagtctgtgttctgttatttttccagtaatgttcttgacagcatttatttmttctggtccaggatccagtccaggacagcgctttgcatttagtttctcttactcctggtcgtttcctcagcctttgtctttgatgaccttgacacgtcttaaagtggaagccatttattttttttattttttttgtttttttttttagacggagtctcgctctggctcctaggctggagtgcagtggcgcgatctcggctcactgcaacctccgcctcctgggttcacgccattctcctgcctcagcttcccgcatagctgggactacaggcgcccgccaccacgcccggctaaatttttgtatttttttagtagagacgggggtttcaccgtgttagccaggatggtctcgatctcctgaccttgtgatccacccgcctcagctcccaaactgctgggattacaggcgtgagccatcacgcccggccgccatttgttttatacataatcccccaatttggatgtgtccgatgtttccttgagattagaatcaggttatgcattttgggcaggaatcccacatgaggggtgtcctctggggttcacttcacgaggcacgtgatctctgtcccattattgccaactttaactttgatcacttgatgaaggtggtgtcagctaggttttatcgtttccctctttgtaaagtaacgagtactttgtggggaggtattttgagatgatataaatacctgtttcttattagactttcacctgttagttttagcatgcatttttgatgcttgcctgagtcagttattgctatgatggttgcaaagtggtggtttttttttttttttttttttttttgagatggaattccactcttgttgcccaggctggagtgcaatggcgccatcttggctcactgcagcctctgcctcccgggttcaagcgattctcctgcctcagcctcccaagttgctgggattacaggcatgcgccactatgtccagctaattttgtatttttagtagagacgggatttctccttgttggtcaggctggtcttgaattcccgacctcaggtgatctgcccacctcggcctcccaaagtgctgggattacaggcgtgagccaccgcacctggcccaaatggcagtttttctaatgttcattatttcttctacatttagtaattggccttcttctgtaagaaacactttcccctcatttgttcattttttatttatttattgttgatacggactcatggatttgtattttattcaatgggttataatccattaccatcgatatttattttggttcttaaattgttccccatttggctagtgggggcctctccactgcctttctgtgccctttggagaagtcctgtcatttttttcttttggtaatactttcttgctggcagaagaatattctaggtttatcttaaagttatttctctaaagagttcttaaaaaaactctttttttactagagttggggtctcgccatgttgcccagggtggtctcaaactcggctccagtgatcctctcgccatggcttcccaaagtgctgggattataagggtgagctatcacgcccggcctccaaagagttctattttattttagtggcaaatggtgttgagaaaccagtatctaggcactgcttaagtctgaagggtaggattctaatgttgttcacataaagagggaagaactcaaaagatctgttttggacacatgctgtgtttggacactgtgtttatgctgatctgcccttgtccacactctctggactgaaaccatataacacatggtttcatatatataacatatatggttctgaaaccatataacgtattctgatctcagagcaagttcccccatattatcttctagatttttcttggccctttaaaaacattaattcttctagataaatattagaattatacatcaagttcaaaaaatttgttactttgaaagatactgaattgggccaggtgcggtggctcacgtctgtaatcccagcactttgggaggctgaggcgggcggatcacaaggtcaggagatagagaccatcctggctaacayggtgaaacaccatctctactaaaaatagaaaaattagccgggcatggtggcgggcgcctgtagtcccagctactcgggaggctgaggcaggagaatggtgtgaacccgggaggcrgagcttgcagtgagctgagatcgcgccactgcactccagcctgggtgacagagcgagactccgtctcaaaaaaagaacaacaacaacaacaaaaaaggatactgaattgaatttcttttgcttagggtagaattaatctttttgtaagactgagtcttcttatttaggaataagagataattttattgattctattatagacttcagtaaaaagcttgtacttttcttcacataaaacttatgtgtctcttcttataattgtttaatagaattgtttatagttttgtgtttaggaatagtatctctttcacatttcttatattgtgaatttacacatgcagaaaatgcttaaaccatgagtgacacccagatcgagaaatagaacctagccggcaccctggagctgccggtatgccctttccctatcacagccttctctgtcctacctcttctcctttccttctgagcaaattaacgcaaatacggtgacatacatgcttttgttattccatgtagtgaagcatggcagttaagacagagagatatttttttctgctatggaatcttaagaggtgtttactgtaaggatctttatgtaagggacaaggaacagaataattgagtgttattaagactgcagattcatttttcataagtctgtttttactgcttctatccatgattaaaacagaaattataatgttaaattaaaaacagactttctggctgggcgcagtggctcatgcctgtaattccagtactttcagatgctgaggcaggtggatcacctgaggtcaggagttcgagaccagcctgaccaacatggtgaaaccccatctctactgaaaatacgaaaagtatctgggtgtggtggcgcgcgcctgtaatcccagctacttgggaggctgaggtgggagaattgtctgaatccagggggcggaggttgcagcagtgagccgagatcgcgccactgtactcaagcctgggcgacagagtgagactctgtctcagaaaaaaaaaaaaaaaagcctttctaaggtttgtttaggtgtcaaaatagtagctttagcttgctatagaagttggaagcacgcttgcggtttatcttaatttaatgaggttgtggacattgtgcataacattcccgcagcctccactactattcagtacctccaggcaagtaaatgaatggcttcttccaccatctctcaggtgttgctgtccagttctgtgcttgagcctcttctactgtacactttgtgctgattcatttctactcattgtttcaatgcctacgtttatcctcatcaaagcccacttttatttcctagaccaggtttttttgacgcgtgattctctcaaattattcaaatgaatgacttttaacaagggtcattgtacatctagctcagtggatttttattctactgttttttgagacaaggtttcactctgtcgcccaggctggggtgcagttgtgtgatcatagctcactgtagcctccaatacttgggctctagcaatcctcctacctcagcctcttgagtagctgagactacaggcatacaccaccatgcctagctaattttttattgttttatagagatggggtcttactgtgttgcctaggctggtctcttttttttttttttttttttttttgagacggagtcttgctctgtcgcccaggctggagtgcagtggcgcgatctcagctcactgcaagctccgcctcctgggttcatgccattctcctgcctcagcctcccgagtagctgggactacaggcgcccaccaccgctcctggctaattttttgtatttttagtagagacagggtttcaccgtgttagccaggatggtctcgatctcctgacctcgtgatccgcccacctcggcctcccaaagtgctgggattacaggcgtgagccaccgcacccggccatctaggctggtcttgaactcctgggctcaagccatcctccaccttggcctcctagagtgctgggattacacgtgtgagccaccacgcctggccactcactgggtttttagggatcagggctttgaccaaagtctagcctagggaaatctttgaggactaggaagttcagaggaaaagtttggtctatggaaattaatgattatgctataaaatatgttatattcattatattattatataaattaccatcagtttttgcctcatctctctatctggttgatgtgaatatggtctttatagttgtttgtaccctttgacagatgctgtttagtatgatgctttaaagtgtttattctaaaaccttttatcattttatccatctttaattatatgaagtgctggagactgctcacatttttaccaataataagagcataataataataggcattaacagcattcttacaaataataagagcatataaactttgttatataacaagtcagaaccctttttttttcagttctgtatcaatgaatattttcttctgaaaaactcaactttaaactttgtaattttacakttccattgagattatattgtttatttgttttaagacatatactataactgttttggttttgcttctagaaaaactgattgcttatcaacgagaattccttgctttgaaagaacgtcttcgaatagctgaacacagaatctcacagcgctcttctgaattaaatacgattgtgcaacagttcaagcgtgtaggagcagaaacaaatggaagtaaggatgcgttgaataagttttcaggtacaaacagtattttttatattataaaaagattttatatatatatatatatatttttttttttttttttctttgagacagagtctcactctgtagcccaggctggaatgcagtggcgcaatcttggctcactgccagctccacctccagggttcacaccattcttctgcctcagcctcctgaatagctgggactacaggcgcccgccaccacacctggctaatttttttgtattattagtagagacggggtttcacgatgttagccaggatggtcttgatctcctgacctcgtgatccaccccctcagcctcccaaagtgctgagattacaggcgtgagccactgcacccggctgaaaaagattagatttgcaaaggggcatgtggaatttttttttgaaagtcatgtagaatagtttataagccagccctttcagagagaaaaaccaccacacaaaactttcttttctagtaaattacaaaaaaaaaaaaaaaaaaaaaatttattacctgctaaatctgattttaagagagtcatattaagttaaattggctgggtgtgttggctcacacctataatcccagcactttgggaggccgagacgggcagatcatttgtggtcaggagttcaagaccaggctggccaacatggtgaaacctcatccctactaaaaatacaaaaattagccgggcatgttggtgtgcgcctgtagtgccagctacttaggaggctgaagcaggagaatcgcttgaactcttgaggcggaggttgtagtgagctgtgatcctgccactgcattccagttctgcactccagagagagactccatctcaaaaacaaaaaaagttaaattgcagtggaataaatttcattggcactggtgaagaatgtgcatcttttgaaaatgagattaaattattcaaaatgagattaaaatttaatttttcgtgtataygtgtttctgtgatgacttatgtgtggacttcagatggactctggagaaatctttgagctatttgaagcaattcgtgctcttaaaccttatttataatacagaacatacatagyttcctagtggatacttkaggagtatctggcctgtttcttctctgagaaatcctggtcagagtaagatgagggcaagtgatctctctttctgtgctcttctttatctgataattaaattgacatatgtatctaattgattgcctctaaatttgcataatttttctagattagcatactttttcatttagcttcacctgttttaaaaacacatgaattcctctcatctccagatccactgcctcaccttatttataaagttgcgtgctccttctcctcctgctgataaactttgcattatgtcaccctgatgttgaaactcatggactagtgtagataaaaaataaatcaccgataaacctgatgccaagtgatttctactaacattttttgtttccttctagtattttttccgtgaatgtttttcttcaaaattgttattgtgtatgatggcctgattttcactcttgaaattatactatgagcattttaaaactttgtcattaatcttcaaaatattatttttagtggctgtgaatgtgccagctatatataccacaatatattaaacatttttttctacagttattcaaatgggtttttctgggttgtttttcccccctagtttataactctgatgaacatatttgtatataaagcaatcatatttctggtaacctttaagttattttcattagattatgatcttcttagaaataggatctgtgttttgatgacttcatttttgaacaaatgatacatttgctggaataaaatagataatcactaaatatttgttgaatgcatagaagctaaattcttaaaagggaaattactgagtaataggacagaaatgttttaaggtttttgctgctgttttgaatagttggaacatttatcttgttatcaccaatatttaatatatttaatctgctaatttcataggtagaaattgatataatttgtaattgtttctttacgcatgagattaaactttaattttacatatgacagtcatttgcatttctttcgtgaatttttggttcttctcatatttttaatgaagttgaggtaacaaattcctactgctagcttgcttttttctaaggttaaattcaaatttaatgaaattttaaaacaatattatttctactaccaagtttttatttcatatcattaaatgattcattggttcctctaataaaaacagaaacatcctatgtataaaatggagtgagaaaaaaaatgaaactatttgaaagttgtgatctgtactggatattctcaacttgtgctgtttatattattttacttgaagttttcagaaaaaaaattccttccatgtgaaattttgataacatgtaatgcataaagaaagtgaatggttgagcatgatagctcatgcctgtaatcccagcactttggaaggccaagacaggaggattgcttgagccaggagtttgagaccagcctgggcaacatagtgagactcccgtctgtacaaaaaaaattttttttttaaattagctgatgtggtagcatgtgcctgcagtcccaggtactcaggaggctgaggtggggaggatctcttgagcctgggaggtcaaggcgacagtgaaccgtgattgtgccagtggacaccagcctgggctacagagcaagaccctgtcacaaaaaaaaaaaaagaaaatggaagtgattgatggttaatgtacttattatttattacattttcataagccaacagtatatttagagtctgtttggcaaacttgagttctaatacattatagaggtgagcccttagcatcccaccttcttacggtcctctagctggccattttggtttccttcagccagttttatcaacatcatgacctgtgagactttggctttgaaagtgtccttttcatcttaaatggagatctcattcaccagagtgtgaaactaggaaagaaaattctttagttctagttcttattaatttttrctgctggttttataaaatcagcaacttctgtaaggtaattcttgtatattaattatacttctgtgtttcagataataccctaaagctgttaaaggagttaacaagcaaaaaatctcttcaagtgccaagtatttattatcatttgcctcatttattgaaaaatgaaggaagtcttcaacctgctgtacagattggcaacggaagaacaggaggtatgtttattttgtttcttactgcagttgtactactgctgttaaatgtgttttggactattatgttgaccatcagaagtctgggaggtcaaaaaatgaaagttctttctttatctgtgcacatcagatcattctaaactccatgttgaaaggaattggacattttccttcatagaccaaagtaatacagctgaaagggatcatgtgaaatctagttcaggccccatcccaggcagacaaatgttgacacctttgtcatttttctgtttaagaaacttgggaagtacagagatgacttgccttgtatcttatttcaaaattaacagctcttttggtcatgtcataaaggtttttcttatgtctgccccacttttcctacagaggtgtaagtagatagtaacttttatgtaactttttatggagtagtagaaatactttgatttgcttcttttttcctaatttattcaaaagataatatatagcttatttttctcttcttgtcagaggcaacagaacttcttcagttttccttatagaaactatttaccactctttttgtttgtttgtttgaagcaacgtaaggacagatttattgaaaccaaagtacactccacagagtggaagtgggcttgagcaagcagcccaagagccgtttaccactcatacatttgattccgctgttttgactttgttaatcttttctttgtagattttaaaatgcagagggcagaatattattttgttcttctgtaagtttttaacaagtgatgaaatgataacttcatagatatcaagattcatttttgggttagtgtttttgaaaagctgggtctacttttgattcaatgggattcttaagtattttgctgtcttatttgggggatcacatcttctcattgatctataaatgtaagcttttacattcatcttgtcttagttctgctgtctttctatttcattaatcagttgaaataatatactaccttccttcttaaggaggtggaaactcttaaaatagcatgttgagacaaactccatctttcctttctctaatgattcaaaaaatatttattgaagccaggcattctgcaggtgccaggtatacagagactaacaaggtgtgtgtggtactttgttttttgttttttttagaatgttgattgttaattatttttgaagctgatatcatctctccctttaatagtcactttttgggtaagatgtcttaagtagttgtgggtttgtttgtttacactatttcttcattcataagagtatcaaatgaaaagaaattagaagtgtttttaaagtcatttaaaatgtccaaggtctctaataggtttttattttgtaaatgtgacattctctttcttttgaagctatgtattccatcccatttgtttacatgactttatccattataaatataataaaatcttggtcaaccagctttccaatagttaacattcttataaagctgctactatttttgaaaggtagaaaaaacagcttggtagaaaaaataacccatatttacgttaaacattttcctccctaaatcattaggaaaagctcttaatatttttagttacaggaccttttggatattctaggaaagctgtcaatctctactttggaaaatgcccatagaaaatataattttatttgtaatttctggggttttatggaaccccagaacttatctagggcttcatattcagaacttctgtttcttagataaagaaaaacagcttcttgctaaaaattctgttttccagtggtcaggctgattaattagggaacagcacttagaatagctaagccattgtaaggctgaagaggaaggacagtgctgccggtggctgctgaccccaggggagcggctgggattctcaatgcccagaacagaaaactgtcggcgcaccacccagcaccacatctgtatccttccaccacattctccaaggcaggctgcggcaaacaaacccagcgactacaagcaggtgcaagggcgacttcagcaacaaggggttgctgaataatttaggaaaattagtaccacgaatgacttaatactaaagaaaattgagtttgcagaacaaactgaatatgatttaaaaataaagcatcaacatatttttagaaatgagggaggagaacttgcccataacacaataactgaccattatcaaaggatccgttagaaatttttgtgcttatgatttcaatgattatatttaaaaatcctacatcgagggactgatatggaattttagctagacatagctaaagatcaaattagtgatcagaaagaccgagctgtgtatttcttccagaatgcagcataaacgcataaagaatggaagtagacaaaagttttaatgttcatctggtagtcatttcagaaggagtgaacaaagagagtgaaaagagggaattacyagcttatagaagtaaatttctttgagttgaagaaaccttcaggttttcaggttaaagggcccattcagggtagagcaagagggctgagcaaagactctcattgggttatctaccaaaacggcacaactgcttcgtagaggataacagataattcttgaagtatttgctgcaatgaaagtccatgagcaattgctatgggccaggcaccttgccagatactttggtacacaaaattagatgtggttccgagtcttgtggagcttcagcccagtaaagaaaacacgtattagtcacatagtcaattatacaaacaactgtataattataactttaattaccgatgtaaaggatgctttgagaatgtgtaagagggacttttggcctaattagggagtttaaggaactctgagaaattacgtttggcctgaggctggtagaatctatcatttactggtgaagatgggtgtgttggtgttctattgctgttgtaacaaattgccacaaactcactgtgtttaaaccacaacacagatttctcatcttacagtttgggaaggcagaagtcctaacaccaggttgtcaagaggggtgtgttccttctggaatctctaggggaggatcctttttttttttttttttttttttttttgccttttccacattactttgtggcctcttccttcatcgtcaaagtacagtatcttcaaatctctctgaccatgaccctcttgattctgttgttccatctctttctttcactctgaccctccctccttcctttcataaagacgcttgtgattatattgggcccactagctaatccagaataatcaccccatctcaagaactttaatcacatctgcaaagtcccttttgccatgtaaggtaacatattcagaggctccaggaattacggcatggacatctttgggcgactattattctctccatcacaatggggaaaaaaagaatattccagaagacggaaagagcaccacaaaagtcctgtggtggaagggagtgtggaatgttctagaaaatgaaagaaggtcactgtagtttacgtgtagagtgaggaagtgtgtggaacaagatgaggctagagatgtaagttgaggccagaccatgtagggcctcctagaccatttatgggattttggtttctatcctaagagcggtaggaagccattgaagggttttcaacaggacttattaagaatgacttgataagatttaaattttacagagatcacatttgctgcaatgggaagaatggttgaggatgtgggaagaggaatagataatgaaaaaccagataggccgtttcagtgatccactggagagagggtcaacttggaacttggacgaggtagcagtggtagttgtagagatgggaagaagaagatggacctagagttgtttggaacatatgagaatgtatcagggaggacatagtcatgttctggatttgtggactgaggtagaggagtggtcaggaatgaacccagggtttctggattgagtgactggatgcatggtgggccattcagtgagataggggacaatagacactgttttgcatcattggtttgcaagagaggtttatagattaaatttgaatatgataatttggaggtgattttgagatatcacagtggagatgttggagtaggcagttggatatttagatctgggactcaaaggagagatctgagttagatttaattttatgagtcattgtttgagaataagtggttgaagacgcagaaatggatgagatctcctagggcctaggactgagacttgaaggttttccagcagttaatttccagggaaagaggaagatgaacacaaggaagacagagacagagaaagggcaactaggcagtggaagaaaaaaaactgtcatgagatataaggaaagcaatgaggaataaatgactaaagtgaaaccataaggaaacatgataggctaaaaatatttggctagcaatgaacatttttaaagggacataatttagttataactaaaggtagattgagttactgaagattgagaatgccaagatttttcctaattctttttttactttaaaggaaatacgaactagaatttgaaaacttcccgggaaagtggaagaaaatgaaataatcacaattgatagctctgtcaaattataaataccatgaggtaggggccttacctatctcatgactgtatttcagactgtctagtacataatagaggtactacatatgcacaattactgcttgaattggaaatacaaggtggctaatcagtggaactcttgcactcagaattaaaacaaaattagtgatcccagtacctagcccaacccgttggctctgtttctgtttggtttccttggtccatcttactcctgcctaaaaggatgatatgaccatattcttcactttgctgacatatttcttcttaactctaactcagtagaatacttacattttctggattgtaaatggtagaagaacattgtatcagataggacaggctgggttatgttgtggtaactaacaactccagagtctcagtgattgagataacaaatgtttatttatttttttgctcatagtacgtgtccaccaaggttgaccagtcatgcagggatccaggctgacagagcagttgccatcttgaatgtttctggctgctctgccaaagagaacaatctcaaggatttcacactgtagttatcagtgctcagcccacagattacacatgctgatgactcatgggctattaataattatatcccctttgccccacagtccccaaccataaggggactaagaagggcagcccccaccatgggctcagaaggccaaggaaactacccttttttggtggtaattttgcaaattaccataagcatggtcactcttaattttgtaggtttggctgaaattacaagtttcatgtttagtgcttttgaagtctttgaataccctggtttaagctaaataatttaaattttaactctaaaatagtataattagggataaaatggtttattctctaaacatgctgtattagtccattttcatgctgctaataaagacatactgagactgggcaatttacaaaagaaagagatttaattggacttaacagttccacgtggctggggcggcctcacaatcatggcggaaggcaaggaggagcaagtcacatcttacgtggatggcagcargcaaagagagagcaagcttgtgcaagggaactcctccttttaaaaccatcagatctcgtgaggcttattcactgtcaggagaacagcacagcaaagacttgcccccatgattcaattacctcccaccgggtccctcccacaacatgtaggaattcaagatgagatgtgggtggggacacagccaaaccatatcattccgcccctggcccctcccaaatctcatgtcctcacatttcaaaaccaatcataccttcccaacagtcccctgaagtcttaactcttttcagcattaactcaaaagtccacagtccaacgtctcatctgagatgaggcaagtcccttccacctatgagcctgtaaaatcaaaagcaagctggttacttcctaggtacaatgggggtacgggcattgggtaaatacagccattccaaatggaagaaattggccaaaacaaaggggctacaggccccatgcaagtccagaatccagcagggcagtgaaatctcaaagttccaaaatgatttcttttgactccatgtctcacgtccaggtcacactgatgcaagaggtgggttcccatggtcttgggcagctctgcccctgtggctctgcggggtacagcctccctcccagctgctttcatgggctggtgttgagtgtctgcggcttttccaggcatgtggtaaaagccatgagtggatctatcattctggggtctggaggacggtggtcctcttctcgcagctccactaggtggtgccccaatagggactctgctgggggggctctgaccccacatgtcccttccgcactgcgctagcagaggttctccataagagcaccgcccctgcagcaaacttctaactgagcatccaggcatatccattcatcctctgaaatctaggtggaggttccccattattgacttctgtgcacctgcaggctcaacaccacatggaagctgccaaggcttggggcttgcaccctctgaagccatggcctgagctgtaccttggctccttttagtcaaggctggagtggctgggacacaggtcaccaagtccctagactgcacacagcagagggaccctgggcccagcccaggaaaccatttttccctcctaaatctctgggcctgtgatgggaggggttgccacaaaggtctctgacatgccctggagacattttccccattgagcttaaccattcagttcctcattacttatgcaaatttctgcagctggcttgaatttcacctcagaaaatgggattttcttttttatcacattgtcaggctgcaaattttccaaactttcatgctctttccgtcttaaaactgaatgctggccgggcgctgtggctcacgcctgtgatcccagcactttgggaggccgaggcgggtggatcacaaggtcaggagttcgagaccagcctgaccaacatggtgaaaccctgtctctactaaaaatacaaaacttatctggccatggtggtgggcacctgtaatcccagctactcgggaggctgaggcaggagaatcatttgaacctgggaggtggaggttccagtgagccgaaatcatgccattgcactccagcctgggccacaagatcgaaactctgtctcaaaacaacaacaacaacaacaacaacaacaacaacaacaaaaactgaatgcctttaacagcacccaagtcacctcttgaatgctttgctgcttagaaatttcttctgccagataccataaatcatctctctcaagttcaaagttccacaaatctctagggcaggggcaaaatgctgccagtctctttgctaaaacacaacaagaatcacctttactccagtgcctaacaagttcctcatctccatctgagaccaccttagcctagatttcattgtccatatcattatcagcattttggtcaaagccattcaacaagtctctagggaactccaaagtttcctatattttcctgccttctgagccctccaaactgttccagcctctgcctgttaacccagttccaaattcacttccacgttttcaggtatcttttcggcagcgccccactctcctggtaccaatttactgtattagtctattttcatgctgctgataaagacatacctgagactgggcaatttacaaaagaaagaggtttaattggacttacagttccatgtggctagggaggcctcacaatcatggcagaaggcaaggaggarcaagtcacatcttaaygtggatggcagcaggcagagagcaagcttgtgcaggggaactcctctttttaaaaccatcagatcttgtaagacttattcactatcacgagaacagcacaggaaagatttgcccccatgattcaattacctcccactgggtccctcccaccacacgtaggaattcaagatgagatttgggtggggacacagccaaaccatatcacgtgccatctaaactttagcaaagcaaaacggaaaccaaaaaccctcgagagtatggtagggatagagaatttgcattgtgactttatgccattcttgtttgcacactgtggatcaccatgggctttgctttcatcatagtgaagtctttgtactccatgagttagcattttctaggaatgctcctcatcctagttgttacgctggtaattttttttttttttgagacagggtcttgctctgtygcccaggctggagtacagtggtgtgatcacagctcactgcagcctctacctcccaggctcaagtgatcctcccaccccagcctcccaagtagctaggactacaggcatgcgccaccatgcccagctaagtgttttattttttgtagataccaggtcttgccaagttgctcaggctggtctcgaactcctgggctcaagcgatccttccgcctcagcctcctgaagtgctgggattaaaggcatcagccaccacacccggccttaaattctgaggtagattattctatggaattttgcttccattgtaactcatcctgtcttttgggatctcagagtaacatggtcagaagagaaatctggattggaggccctctcctcaagtgtgttgttctgagtgaaagttgcccccgtccagttactcaagtcacccttgattcctccccttctcttgtctgccagctgaagccctatttgcragggtctccatcatccactcatctccacctcttcaaacaccctacagcctcattcaaaccaccatcttttccttcagttagtacattaacttcctaaccactcttccaaagtgcttttactttttgtgaaatttggtaatctcttaaaattacaaattggataatgtcattcccctgcttacaaccttacaatggctttctcttgcactcagcattaaaacaaactttgttatatgcaatgtgacccctgactgattttctcaatctgggcttattctgctttcgatccaacctgctcttggtatttcttgactatgtcaaaatcattctggcttcagggccttgttgcttcctcttctgcagtattcttcatcagctctttctcatggttaccagctcagctgatatcagagaggccttccgtgaccacacgacttacaggggtaccccctccccattcatcactctgacagtaccaacctatacatagcagcctgtaagatacatatattttaaatctttttcccctttctagaatgtgcgttccatgagggcagggaccttacctatgttatttaccattgtatgcttaacacctagaatagtgccttgcagtaaatatgtgcaaaacaaatagagcaaatatcttttttkggggggrcggagtctcatagagcaaatatctttttgagtgcttgagaactcttcttgcctaaaatggaagagagggttgtgtcacgagaccttggggcagtcccttaaacctttcgcatcttagtattcttacctcaagaatcatggtggtagatccatggtctttacgctcccttctggcattagaattcttttttttttttttttttgagatgagatggagtcttgctgtgttgcccaggctggtgtgcagtggcgcgatcttgactcactgcaacctccgcctcctggatttaagcaattctcctgcctcagcctcctgagtagctgggactacaggcgcccgctaccacacccagctaattttttgtatttttagtagagacagggtttcaccgtgttagccaggatggtctcgatctcctgacctcgtgatccacccgcctcggcctcccaaagtgctgggattayaggcatgagccaccacacccagcccctggcattagaattctgkgaattataagtattttttagtatctccaaaaaattgttgcatgattaagactaagttgtttttaccatatttaaaatacttctgtattgatacatagcgtactaagactttaaggcataatttttaaaaatttactttgaaatacctctataatgcagtataagtgttcctaaaaatcactgtggtatgaaaatggtgcaaaaaaatgagagcaagggggttaggatcacaacactcaaacactttgtcagttacactataaaaaaggataagaacctaattataatagtggcacagtttttcgcaagttaaatgattaagaaacacataaatgtggcattccatcttgaaaaagccctgagatttgcttgttgaagtgggttgctgaaggattgcagcttgtaagttattgtgaagggctgtgaggtaggttatttgcaatctgatggaaggttgcaacacccagtgtggatgggtgtggttgatagttgtggtgaactgagacagctggtaggtattttgaggtgcgtgcattttgtatgcagtatttctacatggttcggtttaattttctgaactcaattcagctgggtacaattttctgttgttcacctggtgtttgtctcagaggacaaattgcacgtaagctaatgtgaaattcatgtgttatgccccagtttttccctaatatgttaatcatgtagaaacaaatttgcattgaaaacaagcattataggaacattgactgtaattttagtctttaaaaatgttgcacaaatagtacacaaagttttctctttttttttttttttttttttttttttttttgagatggaatcttgctttgtcacccaggctggagtgcaggggcacaatctcagctcactgcaacctctgcctcccaggcgattcttgtgcctccacctcccaagtagctgggattataggtgtgcgccaccatgcccagataatttttgtatttttagtagagaccgggtttcgccatgttggccaggctggtctgaaactcctgagctcaagcagtgtaccacctgtacctcccaaagtgctgggattacaggcgtgaaccactgtgcctggtcacaaagttttcatatgcccttacccagtgtccctacatgaccatagtatagcgatcaaaaacyaggaagttaacgttgatgctacactgttcactaaccttagctcttactccgattttgtcatgtgtttcattgttgctgtttttctctttcaggatccaaatcaagatcccatatttcacttaattgtcgtggttccttagtcttttccaatcggggaccattcattactctgtctttcatgaccttgacactttaaagagtactgttattttgtggagcattgccccagtttggatttttctgatgtttctttacggttaagttgaggttatgcattgttggcaagaacaaccacagaactgatrttgtgctcttctcggcatgtcacatgcttgaagtcgagagataagacattagtttttaagatatgtttagtgtttttaagttttagttgtaaaatacagtttgctgtttatacttcgcagccattcattttttagtgtgaagtttaatgtctttcatttttatcagttctttttttcttatggttaagccatgtgaaaatgaattacagtattacaggtatgcccttgtattctttatttttcttcctgaaacttaatatattttgatccatcagttattcctatcaatttgagagggtataatacttttgaaatagaagtgtttttctgtattgtccttgtacagttttttaatataattactatttttttttccagtttcaatagtcatgggcattcccacagtgaagagagaagttaaatcttacctcatagaaactcttcattcccttattgataacctgtatcctgaagagaagttggactgtgttatagtagtcttcataggagaggtaattatttaattgttgttatgtttttaccaaatatagcctataagagttgaaactctaattgaatatttgaatatgcttttaaaaacgctttttaaaaaatgtgatgagtaaagcttaggtaatatattctatctggtagtttaatgtaaatygaactcacttctgtcctgcaattacaaaccrggaatagtaatatttgttgtcaataggatgttacacccgtagatctttaagaacgtgtgcctatttctagctctaagacttaaatttggagatttgcactgatgatctttgggagtcctgaaacctgaaaaaggtttaggctcagctggggttttatcattcttttattctctccatcccttctctgtactcctaagaaatcatgtgaatgagaaataccacacttcttgtattttagtctcctcaaaagatttagagaaagaataaatcttgagcaagttctttttaaatcatgaggaataagaccctagagtaaatattttcttaattattgtatagaatttcagaatgggaaaggatttaggacatggtctagttctggcccactaattcctaactttttagagttccccatgtctttttaaatgaaaatggtcttgatgatttccttattagagaagtaaacaaatgcatactgttcaaaacaattacataaatatataatgaaaaattacctgttactcctctacataaatataactatttcaaattatatgttaagactttttgttctgaaataattttagatttacagaaagttgcagaaattatagagggtatctccttcactcagcttgctctgatgttaacaacatatgtagccatattatagttatcaaaaccaggaaattaacactgatataatactcaaccaaactacagactttatttgagtttcctgtttttccgcctgggttcgcctttctgttccagcatgcactatggaacaccacattgcagttagcggttctcatgccttagcttcctcctgtccatgtttgtgtctttcatgaacttggacatttttgatgggcactggtcagttattttgtaaaatgtctcagtttggatttatctgatnattatattttgactatgcatttttggcaagaataatatgacttgcctttttaaaaaggatcctgctgtctgctttggtaagggcaaaagaaaggagactacttagaaagctgttgccataatcgaggtgaggcttggactgggagactgttcatggaggtgatcagagatgggtaaattatgaacatgtttttaactaaatgggttctaataaaaaatgagaaccattgctatagcatcaacatgctattaaggacaaagctccaattaatgaacttaaaatagcccttttaatgttttctgtttagttttgtacatttgaatagaaatatgtatcaaatttaggcttaaatgtcaagtcttcagagagattttctctgaatgtaatgtttaagtaggtcatctctgtttttcctctattattgcattctatttttataacacaatattcagttatatatacacatacatatgtgtacatatttttgtttgtttgcttatgaactgcttctctcaccagttttaagttctacaaacagagatcttctttatttaccaacctatactcagagcttgataatatggatacagtggatccatgtatgtatccagtatggatacagtgtatatatccatccgtttcttttctccacattcttcctaatacttgttatcttttgtctttttgacagttagccatcctgacagatgtgatgatatctgattgtggttttaatttgcatttccctaatgattagcagtgttgaggatttttcrtatatctgttggccatttgtatgtcatcttttgggaaatgtctgttcaggtcctttgcctattttttcagtgttttttcttactcttgagctgtttgagttccttatatattttggatattaactgtttatcagatgtgcagcatgcaratattttctcctaacccataggttgtcaggcatgctgttaattatttcctttgccatgtagaagagttttagttagatgtgatcctatttgtctatttttgttcttgttgcctgagcttttggggtcatatccaaaaaaccattgcccaggccaatgtcgtgtagtttttcccttatgttttcttctggtagttttagagtcttcttttgttttcaatccattttgagtttatttgtatatttcacgtgagttgaagttccactttcattcatctgtatgtggatatccagttttctcagcaccatttactaaagaaacttttttcattgagtgttcttggcacctttgctgaaaatcaattgaccatacatacatgagttcatttctaggctctatattctgttccattggccagtgtgtctgttttttaaaaatcaataccatactgtttacattattatagcttcatagtatagtttgaaataataaagtgtgttgcctccagctttattgtttttcctcatgattaccttggctatttgttgtgtgtgtgtgtgtgtgtgtgtgcgcgtgcgtgtgtgtgtgtgtgtggttatatatgaattttaggatttttttcccatttctgagaaaaatgtcattaaattttttgatagggattacattgaatctgtagatcactttgggtaatatggacatttaaatgatattaattcttccaatccatgagcaaagatatctatttatttgtgtgttcttcaaattatttcatcaacattttataatttttggtgtctagttctttcacttcccttggttaaattttttcctaagtatttttttggtagccattgtaaatgggattgttctcttgatttctttttcagatagttcattgttagtatatagaaatgctacctatgtttgtatattgattttgtatccacaactttacagtatttattacttctaacagttttttagtggaatcattagggttttctgtatgataagatcatgtcatcagcaaacagtgacaatttcacttctttttctatttagataccttttatttctttatcttggctaattactgtgtcagggacttctagtattatgttgaatagaagttgtgagagtgtgcttccctgtcttgttccagatattcaaggaaaagctttaatttttcaccaygcagtgtaacattagctgttggtctctcatatatatggctttcttgtgttgaggtgcattccttctgtacctgagttagtgagaactttttcaccatgaaagcatgttgaattttgtccagtgcattttttgcatctaatgagatgatcgtatggtttctgtcctttattttgtaatgtgagttatcacattcattgatttgcatatgttggaccattcttggatcccagggataagtcccacttgatcatggtgaatgatccttttaatatgtagttgaatgctagtattttgttgaggatttttgcatgtatgttcatcacaaatactggcctgtaattttcttttcttgtaatggccttgtatggctttggtgtcagactggcactggcctcattaagaagagtttggaagcactccctcctcttccacatttttgaaatagtttgagaaggattggtatttgttcttcttccctcctagaacttgcttttgttaaatttgtaatttatgtaaagtgacacaaattacagttgtttaagtgaatcttttactagatacatgaactagaaggcaacataggattttgtgtagtagtacacgtggattactttgttttgtaaatttgattacacattacataacaaatctatgttcacataagcttattcttcttggttcccgttttggacggccagggacctggaactggtcttactcacctttgtattcctgtttccttaggtggacaaatcactgtccttcatattaaatgcttatcaaattgaatgtcaggttgttaaacacagtaaagttcataaaaaccatgcttgttcatattctccaaaattgtagattgatgagtggttaaatactcattggtcaaatttgtgaatgataatttatttaaaaagaaatcactaatgtttgggcttctatagaggaaggacagagttttgagctatattccaattgtgtctccacagtttgttaagactttgaaggatttgatctcatgaagctatcttacacatgagttgttagacttaacaacaaaaattagaattactttcaattacagaaattaaaataatttttggtgtctagttctttcacttccttggttaaattttttcctaagtatttttttggtagctattttaaatgggattgttctcttgatttctttttcagatagttcattgttagtatgtagaaatgctaccgatgtttgtatattgttttccagaaagcctgttataaaaactttttataatttgatggttttgtaatttccaggattaagctataccttttttgtttgtttttctcaagtattaagtgctttgacagtctttataacatagattatattttatatatcattgagtcttttaacaattgagcatttttataagttattgctgtatttaaaattgataggtaggtgtattagtccatttttatgctgctgataaagacatacccaagactgggtaatttataaagaaaaatggactcacagttccacatggctggaaaggcctcacaatcatggcagaaggcgaaaggcatgtcttacatggcaacagacaagagagaaaatgagaatcaagtgaaagggggaaaccccttataaaaccatgagatcttataagccttattcactatcacaagaacagtatgggggaaactgcccccatgattcagttatctccacagggtmcctcccagaacacatgggaattatgggagctacaattcgagatgagacttgggtggggacacgccaaaccatatcaatagggctctggctggctcaaaaatgtggctatggccctgtaacccagcctgccatgtccctggcctggttgtcccttgggcttcctggggtccttgaaggggcaaggatctggagttaggaggaggatgatgtctggacacacacaccggagaaataatgctcataattatttacatttgcccatcacctgtgctccaccctgtttgtcagtccttacagctagcctagaaagtggtttcactttgacccaatttcacggtctttgacatagcatcagagacagactccgtttacctcttagaggagaaaagctaatgatgtttatctctgttagacccctgggagccagagccctggaacaagccaattcttactgttgaacgtcacctcttccaggcatcctcttctgatgcttctaccctccatgctgggttagatctgaacttggttgaaaatgtctgtttaaaacatgcctgccatgcttagacttgttcactgcagtgcagcctggcctagagtaggcattcagtaaatgtttgtgaaatgtgaatatgtgattcattaaatcaataaagaaaataaagaaaaattaataagaagtattagaattttgacttgttcataatttaaaaatatgcagatctgataaatgtttatttctaactgattgaagtgctcttgattcagttctcagtgtcagtgtaatattaatatggtgtaataatagcagtttttyattacatagttttatcatttaatctcataatctgtaaggtatttcctttttttcatagaataggttgaaactcagagaaatgactttagagtatgcagttcagtagctacagrggcaaaccttgaacctaggttttatgattccaagtagaaaaatctttcttcatatcgtgcagcatctgtcactaatgctattcacaatagtttggatgttttgatagaagtagtttttgtgttcagttttcctagtgaatgcaacacagacaattaaaataataaaaacttcaatatctgcttattagcaagtgctcagtgacattcagtagtacaatagaacaatacagaaatgcaaatttaataaattgtstaaaaatttaatgtatggttttaatgaatgtttttatcattcatttaatttcgagttcagtattaacagttaaataaaaatataaaaacttgaatatagatacattttttttctttcccagacagatattgattatgtacatggtgttgtagccaacctggagaaagagtaagttcttcttaattataaacatacraatattttggttactattatctcttgggtttcttgctaaaagaaaatgccttccttgatagttcatttctctgtggagttcattgtttattagatcacctctgattggtatttgatattgtcccaaagtaggtgcatatatatctagttatgtgatgggataaattggtttatttcattatagaaaagacttgaatgtcctatgtatgtaacactattaaataacagtctttaaycttgaagacagtgaatacagagagagtcatatgagattaaatctttcacactgtatttaccaggcaaaatcttcctgctctcagggtagatatttaacgtagtaatttcagacctcaattttaagctatgtcttaatctgttgtattctgcaaagattgagtagcagtttactatgagcgaggcacatggtaggtaacagagggaaagcttagtaagtttcagatattattttttataatattgccttaatagtttcaatagcgtaataaaattagtcttgctatgaatttcttcattaaattgtatctgttttttgtccctaaaagatataccttctacttaaaaagaaaagacaaaaaagaagcaacaattatttgctaaccctacatttaaaataatgtggctccttgtctatcaaaatgttaaaattgaatatttaaaaacattatagttcaggattaaattgttatttgtttggttttcctgaagtgctgagtttcttggaagtccttatagaaacaaaatttggcatagacttcttaaggaacagggcagtaatgatyggtcccctttcccactgacctcaggggcaagtctgtgggcttatgcaaggattctggtgatttacatcttccttagtgtgtagaaaaccaagctcagacaaaaagtacagttaaacattaagaacatttgtgcaaaggcaggcagttgcactagcattttgtggagatttgcaaaaatgaatcaagggagaatgcaaatgcaaaagaaattgcaattcagtcagtacagactaattaaaaactttagaaagggttcttaacctcagcccaatggacattttgggccagataattttttgttgtgggggctgccgtatgcattgtagaatgtggggcaggatccctaatgtctacccactaggcgtcagtagtactgatcacagttgtggcaaccagaacgtcttcagacattgctaaatgtcttccagagggacagaatcacccccagttgagaaacactggttgagaatgacatgtggtctrtaacccacaagcaaagcttcttgaagatgtaagagctttggtttttgcaaaatatacgtatttaaagacacatacrtacttatttgtttttcttcaattttctattttctgtgagaccttgattttttttttttaattcagatacattttaggaacgttaatgcctgcagttggcttaggatttctatgctactttaataagagcagtattttatagtttttaaagcattactttaaaaaaaaacttttgctattggaaaaaactgtattttctgtaaatgaaatcagtgatgagctgctccttttaacaccttgcggccataacattatacgttgctacaaatgattactgatgtgttttatgttaaacacagtgtattgagctttaagataaataaaatcccacagaacttaagtaactcagctaactttctcataatagattttctaaagaaatcagttctggcttggtggaagtcatatcaccccctgaaagctattatcctgacttgacaaacctaaaggagacatttggagactccaaagaaagagtaaggtgagcatgtgcygtttaaaatcctccacacttgtgagtgtaaatatttaatacatgtagtttttatttatcgaagctgaaaacattttagagttgaatttggtaaaatattctaggtaagtctcattaagtccaggaccgcttggaaataatgtagagttttcttagaatatgtaaaaacttaatattagcttttattttactgtgttttcttaaactagcttttagatccacttctcttatgtgtttctgtaggctaccaggaattcactgacagggtttaatactgtaaatttaaatatgaattttttaaagcattcagtacctatttgtgaactttgatctgcgtgcaaacagtcctaggcaccagaatagggaccctaaaagtgtaatttttgaagcactcatttgatgaaacattaagatattactgaaaaaagggtctgtggtcaaggaagtttggaaaaatatgtattaagaatttttttcccaataaatgtctttaccgttggatatttttgtgcctcttatgaattaatatgtttctagaaggggaacatgtatacatacttacttgatattagactcatttttttcctcaggacagcttgagaattagtgttcttgggaatacattttgataaagtcttcattagaggaaagtgaattttctttgactcttcgtcctaagtgagtgtgtgtgtatgtgtgtgtgtgtacacatatacatagatgacatgttatgtagacatttgacrtttatacatttaatcttattttactaaatttgagtctgattcctaacttactttttgaaaatgtttatttcagatggagaacaaagcaaaacctagattactgttttctaatgatgtatgctcaagaaaagggcatatattacattcaggtaagtgtagtttttcctttgtttttcatgcttgtaaagaaaaagtgttatcaarggtatgttttcattaaaacaggaagttttgaaagtgcaaaccctctgagatctgacaaatcataactatctcagagcagaggggtctccatggtaactgagcatgtgggctctgatgtttctccactgagtagggaagccrgccctccacttagcgggggacctgcaactcacttatctttttcctctttttctcccattcccccatcttctcttccctcttccctctctccactgtcaagaagaactaagatgtcattatttggcagattttaaagaggaattttcttacaatttttctttagtggtcttacaatgaactaatttttttttgtaggccacaatactgttaccactattttgaagataataaaattgacatttaattctaacagtccaattatttttagcagcacaacagtccaatttttaccaagaacacaatatgtcatgggattacagacacgagctgctgcacctgacatgtagcatgttttaaaattaggaagtatgaggcctccaactgtgttcccttttttttaagactattttggctgtttagggtcacttcagactccatgtaaatttgaggaggatttttttctatttctgtaaaaaatgccttgggaattttggtagggattgtattgaatctgtagatcgctttaggtagtgtggacattttaatattattaagtcttccaatacatgagcacaagatgtctttccatttatttgtatcttctttgatttcttttagaaatgttttgtagaaaaattttccacctccccagttaggtttattcctaagtattttatcttttttgatactacagtaaatgrcattgttttcttgattttttttttggattggtcattgttagtatacaaaaatacaactatttttgtgtgttgattttgtatcctgaaactttgctgaaatcatttattgcttgtagtttttggtggattctttaggtttttctacatataagattatttcatctgcaaataatgataattttacttcttcttttccggtttgggtaccttttactttttttacttgtttaattgctctagttaggatttccagcactatgttgactagtagtggtgaaagtgggactccttgccctgcttctaatcttagagggaaagctttcatttgtttgctgccaagtgtgatattaccgatgggcttttcatatattacctttattttgttgaataagtttttttctatttctagttcgtcacattttttttaatcaagaaagtgtcttgaatgttgtcaaatgcttttccataccaattgagatgatcatgtgtttttttcctccattttgttaatgtagtatatgttacactgattgatttttgtgtgttgaacgatccctgtattgcaggtataaatcccacttggttatggtgtatataattcttttaatgtgcattttaattccatttgctagtgttctgttgaggatttttgcatcagggatattggtctgtagttttcttgtgtctttgtctggctttggtgtcagagaaatgcaggcctcctagaatgtgtttgaaaagtgttccctctgtttcagttctttggaagatagctgtttgaggaagattgatgttaattctttaagtgttcagcagaattttccagtgaagttctctggtcctgggtttttctttgctgagaggtttttgattactgctttaatccccttagttattataagtgtgttcaaagtttttatttctccatgattcacccatggaaaattgtttttagaggtttatccatttcttgtagattatccaatttgttggcacataattgttcctagtagtctcttgtaattcttctatttctgtgatatcagttgttatgttccctctttcatttctacttttagttatttgaatcttctttttttcttagctaatctagctaagggtttattaattttattgatcttttcaaaaaccaactctaggtttctttgggtttttttctgcttttttttttctatttatttatttttttctatttatttatctgatctaatctttatttttttttctcccttctgctaattttgggtttagtttgtttctttttttcaatttccttgaggttgaagttaggttgctgattttgagatctttcttcttttttttaatgtaaatgtttactggtataaacttccctctttgtatggcttttgctatatatcatacattttggtatatttttttttttgttttcgtttgtttctggatttttttctaaatcccttgtgatttcttctttgacccattggttgtttaggggcgagttgtttaatttccacacatttgtgtattttctgggtttacttttctgctattgacttctagtttcatyttgttgtagtcagagaagatacattgcatagttttagtcttcttaaatttgttggtgggcggcactggctcacacctgtaatcccaacactttgggaggctgaggtgggcaggtcacttgagttcaggagttcaagagttcaagaccagtctgggcaacatgacgaaatcctgtctctaataaaaatacaaaaaattcactgggcatggtggtgcataccagtagtcccacctactcgggagtctgaggtgggagtatcagttgagcccaggagattgaggctacagtgagccttgtgctctccagcctgggtgacagagtgaaaacctgtcttaaaaaaaattgttggctgggcacggtggcccacgcctgtaatcccagcactttgggaggctgaggtgggcagatcacaaggtcaggagatcgagaccatcctggctaacacggtgaaactccgtctctactaaaaatacaaaaaattagccgggcgtggtggcgggcgcctagtagtcccagctactagggaggctgaggcaggagaatggcgtgaacccgggaggtggagcttgcagtgagccgagatagcgccactgcactccagcctgggcgacacagtgagactctgtctcaaaaaaaaaaaaaaaaaaattgttgagatattatggggcctaacatgtggtctgtcttggagaatgttccatatgctcttgagaagaatgtgtattctgctgttgttgggatcagtgttctttatgtctgtcgggtccgtttgattatagtgttgtttaagtccgatgtttccttattgatcttctgtctgatctatccataactgaagtagaatattgaaaccccctagtattattgtggtggtgtttgtttcttctttcaattctgtcagtgttgacttcatatatctgagacctctattattaggtgcatctttatttagaattgttatgtcttttcagagatttgactgacccttttattattgtacaatgtccttctttgtctcttgtgacagtttttgtcttaaagtcttattttgtctaagtatggccatccttgttttctttcagttctggatttcatgaattatcttttttcattctttcacttttaacctatgtgtgtcttttgatgtaaagtaagtttcttgtagatagtatattaatagatctcattaaaaatttccatttggcctaactgtgtcttttaattgggatgtttgacccatttacatttttagtgattactaatacagaaagacttactattgccatttactttatttttttgtatgtcttggaactttttgtctatcttttcctctcttgctgctttcttttgtgtttcgttgattttttaaaatagtgacgtattttgattccctttctatttccttttgtgtatattcaatagatactcattttgtagttaccattgcaattacatatcttaaagttataacagtctatttattacttcartgacaaataaaatctctactcttttacatctctgtctcccctgcactctattttaccaatgacaccagtgaccgctttttatattgcatatacattaactcagatttataattattgtttgtgcttttagtctttaagaagtgattttaatgtgatcaaaagatttgaaaggggtaccagattttaaagtgattcatgcacctgcattaccttactacgtctatatttatctgtatatttacctttaccagggagttttatatttttatatggtgctttattactgcttattgacctttcacttcaacttgaaaatgttccttcagcagtagggcaggtctagtggtgatgaactcactcagcttttgtttatctgggaaagtcttaatttctttctttctttctttctttcttttttttttgagatggagtcttgctctgttccccaggctggagtgcagtggcacaatcccagctcactgcaacctccaccttgctgcgcccagcctgaacattctttttttcttttccttttttttgagatggagtcttgctctgtcgcccaggctgaagtgcagtggcgcgatctcggctcactgtaagctccaccttccgggttcacgccattctgcctcagcttcccgagtagctagggttacaggtgcccaccaccacacccagctaatttttgtatttttagtagagatggggtttcaccgcgttgttcaggctggtcgcgaactcctgacctcaggtgatccacctgcctcggtctcccaaagtgctgggattacaggtgtgagccaccgcgcctggccttctttacttttgaattacaattttgtcagatataatattcttggctggccagtttttgtttagtatgttttagcactttgaacatatcattccaccctcttctagcctataataaagtttcttctgggaaatctgctgataatctaatagacgttatcttgtatttgttgggtcactttcctcttatggctttcaggattctttgtgacttttgacaacttcattatgattcttcttggtgtagatcaatttattgtagttggggttctttgaactttttgaatttgtatgtccatttctatcctcatatttgggaagttcaaataggctctcttctccttgtagaactctcataatgtgtatgttgtttcactttgtgctgtccataggtcccttagggtatcgctatttttctgttattcttttttctttttgctcctgtgcctcagtaatttcaaaagtcctatctttaagttcactgattcttctgcctgctcaggtctgctgtttagtccttctagtgaaattttcaattcaggttttgtattcttcagttttagaatttctgtttggctctttatagtttctatctctattgatattctcattttgttcatgcatcatattccaaatttcatttagttgtctgtctctgctctcttttaatttactgagcaatcttatgacagttattttgaattactgggcagttcatatgtcttcatttctttggggttggtttctggagttttaacttgttcctttggatataccatatttttgtttatttgtatatcttgttttttgttgttgggatcttggcatttgaaaaatcagccacctctcccagtctttgcagtttggttttgtagtggaaggattttcttcagtcagcctagttaaagactctggagccctttgagccttttctggggccatgtcctctctgcttgtgggtgtaatctcctaattgaagttgactggtttctagtcaggakctctgcagcactgtggccttgttggtattgtagtaagctgcagtactggagctccacctagtttctgtctctggtactgcagcctctggtgccaactgatggcctttgttcttagctcccaacctggtgccctgttcctgacactatgatttagatgagacagaaatcattccctctggctgcactcgaaaaagtcaaaaacactgggtatacaccaacttctttctctccttagggagaagtcgggaattgagtgtttcctcactgtggtctgtgcccaagagagggcctctggctgtggaatgctcagattttaaatctgtgtctcgtgtggggaatgtgtcttgtgtgtctgggtttcctgtttctgtctcgctgatgtcactctcacacagccctcttttacagtagaggatcatgctgtatgtactgtctgataaccttttttgctgtcacttaacatactgttgataggtaccttgctatgcsagtaaatacagattggtgtgatttttaatcccttcttgaagtcctgttattcagatatcataatcaaccttcttgttggtcatttagattgtttctaattgttcagttctttcgaagtcaaattcaatgaacattcttttgtttttcagagacagagtctgactgtcacacaggctggagcgcagtggcacagtcatagctcatggcagcctcaaacacctgggctcaagtgatcctcctgttttagcctcccaggaagctgggactacaggcatgcaccaccatactgggttaatttttgtatttctttttggtagagatgggagtattgctaagttgcccaggctggtcttgaactcccggcctcaaatgatcctgctgcctctgcctttcaaagagcaggggttacaggtttgagccactggtccactggtgtcagtgagcttttttttttttttkggagacagggtcttcctctcttgccaaggctggagtgcagtggtgcaaacacagttcacagctcgctgcatccttgacctgggtcatatgatcctcccacctcagcctcctgtgcggctggggccacagacatgcaccaccatgcctggctaattttttttttttttactttttgtaaaaacagggtctcactttgttgcccaggctgtttttgtttgtttgttcgagacatagtctccctctagcccaggctggactgcaatggtgtgatctcagctcactgcaccctctgcctcccgggttcaagtgattctcctgcctcagcctcccaagtaggtgggattacaggcacttggcaccaggcctggctaattttttgtatttttagtggagacagggtttcaccatgttggccaggctggtttcaaactcctgacctcaagtgatccacctgtctcagcctcacaaagtgctgggattacaggtgtgagccaccacacccagcctgaacattcttaaaataatcacatttgcccaaaaattatgcctcaggaaagagggagttgctttatattcaagtcttcacatacgcttattatgtggaattctctcagtgagttcattgtcatctacagagtattagtgggaaaaacatattagcctaaaaagttctcagttaatggtagttttaaatgttcatacaggttagattttacctgtgacattttgttgaagactaagatgagaggtgatgtggcaaaggaatttattccagacgtcataattatccccttgggatatgactccaggtttgcatggtttgggaatgtatcacatccatgactcttaaagaatgctttccaaaaggcagtagagtcaggggttactttgtgattgtcatagacatacccctcaggggaaagggagatgctgtggcttggaatggagtttccactgacagcatcatayggtttcataaagtgctttattgcaaaaaactctgagttgaacacggtgccttctggaaaactgatagatgatgcaggcacttcacaggtggtgcttgagtaagtcttacggtagcgcataagaaagcgcgttatgggccgggcgcagtggctcacgcctgtaatcccaacactttgagaggccgaggcgggtggatcacctgaggtcaagggttcgagaccagcctggccaacatggtgaaacctcatctctactaaaaatacaaaaaaaattagctaggcgtggtggcgtgtgcctgtagtctcagctacttggggaggctgaggcaggagaatcacttgaacccaagaggcagaggttacagtgagccgagattgtaccactgcactccagtgtgggcgacagagggaaactccatctcaaaaataaaaaataaaaataaaaaaagagcacattacatcaggcagtcccacctccagcgaggctgagagtaatcagtgggttccatatgcctgcctcattgctgcattataaatttagctctccagcagctgttccacttaaggtttcagcatccattgattatttttccctagatcacttatttcattagcggtttccaagtggtgctttcctaattctgtaattgctaatgctcttagcttagttctaaatgctatgttgagttcttctataaagaatttttcttcctttattagattaccttgaaaaacagttcttaaagaaaggctggagtaaatgcttgatttcatgctcttactaatttttaaagttggtgccttagcaatctacagtkgtggctgtttttaaagtatsattatgttacctattgggtactatgttcaccatttggatggtgggctcaatagaagcccaaaccccagcattatgcaatctatccatgtaacagacctgcacatgcatccccttaaaaacaatgtatcgttatgaagtgatggatatttaaaatacatttgatttgccacagtccattgcaatcattattcttattgatgctttcattggtacatcataatccagtgggaaccccttcaaattggcttttgtatcctttctatataagtccagcaatctttttgggggctcaagtgatcctcctgccttagccttccaagtagctagtattacaggtacccacccccatgcctggctaattttttaattttttgtagagatgaggtcttgctctgttgcctaggctcatcttgaactcctgggcaactcaagccatctacctgcttgggccccccgaagtgctgggattacaggcgtgagccactgtgcctggcctcagtaattgtgattgtttctttgatgattggcacatcttgcgcatttcctatcccagatctggaatcgatcattgaggagtgctattcctcttcagggtgtgtggtatatagaagcacaatctgggcgcttaaaggtgctcattgctattgtcttgtttttgcttctaggactttcagcaagaaaaagtgtattttattttacagaggaaaaaaaaatcacacgtttgtattgatagttccaattcaaactggattaagatgtaagattttagggttataataaaattataggacttttacttagcttttcaaatttttacgtgtatttattttcttttatattgaaagccttggttttcaataatatcctaataatataattttttattctgtaatatacgtaaaatagcttcacaatatcaataccattatcactactaacagtaagactactaaattcagtttaaactttctttgtgctttctaccccatagaatgtatcctgatatcctccttctctttttccccctccctccccataacttctgctgtgataagacctttatcttgtgctctctctgccccatccactcacatgtcagcatcattccagctgtcttacttggaaaggatgtcctcattttcctcattgttatttcccatagaaaggagtggcttagttgacttacgatgtatttcttccattttgttttcttcactttcttttaataatatctagctttatatttttattgtttttaccattgtcttcttcattttcatgataaaggtatgcttgtatttttccataataatatccttctctcaatacctttctttttttgatgtattaatatgattgttcaattttctctagcttgaagatgatattattgtcaaacaaaattattttaataccataaaaaattttgcacttcaactttcttctgaggaatggatgattctagagttttcccagctgggcttcattggtaagaaaaktgtcacacttacctacttttcataaataactgtgactctcagaatctaaaaccaagtagctacttgtcctaaagatgtctttttttcctatggaaatgggttgttttagagaaaacttaagttaggtaaacctctttgtatgacatgatgaaagtcaacccagaatagaatttggagacttctaagattattgtatttactgtagcgttcttcacaatgccaaccgtggtgctggtgagcatgtttgattttttcttctctggcatttccagctcctttgttaacataagattgcagttcttttaaaaacaataccacaaagagttttctcatataaattcctagtattttcatgcaatgcatgaagtcctaattcagtgattaatttttattcgtttttctcttaactagttggggcactcatttctaaatggtttttggctgatgtttcaaaattagccagcttaagaatatgtttaaagttagccaggcgcagtggctcacgcctgtaatcccagcactttgggaggccgaggcgggtggatcacctgagctcagaagttcaagaccagtctggccaacatggtgaaaccctgtctctactaaaaatacaaaaattagcctggcatggtggcagacgcctgtaatcctagctccccgggaggctgaggcaagataattgcttgaacgggggaggtggaggttgtagtgagctgagatcgcgcccctgcattccagccttggggacgagagtgagactcaatctaaaaaaaaaaaaagagtatgtttaaagttgaagaattgaaggaaatttacagggttcaaataatattgagaggttaacatttcatctcctatggtactttttaacactttaagcatttagaggctggacctttgacaatcttgatcatttaactcaaaacttaaaagtcaaaaaccatctttacttgcaaatgctttagtgaaaacaaaattaggagtccttattttttgcatttattgattcagataaaattttttacctaaacctctcaatgttaaatgggaagaatcttagtaagacacgaagggaaaatctctgacttgctttttgaatgctttgggccagtaggtatacgatagattattatagtaacatcgggaatttactatatctgtttacacccaggtgacagctcaagagaaagtttagccgaagcaactttgtttaattttgataatacaagtggggaaattgtttatgatgatttatagttgaaagcgcaagcctcagtgtatgtcgtgggcaagatttcatgaatgtaagccattttggtgcttggtttcttcattgcagctattgactgggaatatcttttcaggtaaaatgtttcaagcgccggatcttactctgattgtagaattcatattcatgttttacaaggagaaacccattgattggctcctggaccatattctctgggtgaaagtctgcaaccctgaaaaagatgcagtaagttaattcctcaccagagtggagggagtttcacttctgtatttcgtgaaagtgacttttagagattttgcaaataaatagttaaataggtaggtgatataaaacttctttcctgagctgataaaaagtttctatattagaagaacttttagatagcagtggaagatcctgtaaagcaggaagctgttacaagatgacgtacattctttaaattgctgataaatgtttctagtgtttgtaagccctggtggtttactaacattggatgtagatgttggtcatatctgttcttggcatgggataccatttcagtttgttttcttcatatttcctgttcactctctttttccttgtatactggggacgatattagaccctaacacatctgtaaatgaggaataaaatagaagtaatattttataccaaaacaatgagacgttaaagtacctttcagcgtgttacaaaaagccagtgttcataataatatgattacctttgggataatagttgcagtcaagtaagtgaataataatttttgctttgatcattcagatagcatgttattaccatagagatcttattgttaagagtaattaggccaggtacagtggttcacgcctgtaatcccagcaccttgggagcccaagactggaggatcacttgagcccagaagttcaggacaagcctgggcaacatatcaagacccatctctacaaaaaaacaatgatttttttttaaaaagagtaattaggtatgttttccttgtccaatttgaattgtgtctctgaaaaaaaactatagcttttaatttatttgatgtaagcataaacaatatgtaaaagtacaaattctttaaaatgtccattttgatgtgtaatgataagtattactgtaagaacatgtcattatagagttgacttaccattcattgtaacaaataagcattagtttgacttcatgaccttctactccctagaatagttggatcctcatacctgctaggttttaggatactaccttctggtgtctgtaggctmtcattgcattctgtttaaaaaaaaccacaaaaattttaaaaaaccccaacacattcttagttagaggaaatcatggaatctagcaatggcagagtatctgttttccsacaattagttgaacatataaattgttttaaacaaatcattttttagagatctcagtccttatgcacattttcactgtgacttatagaaatttttattgtaggacacagaaaaagttaacgtcatctttaacctcctacaatacacttgcattccattcgtcctgtgcaattttatttaatatgtggttaggttctaaaatgagcctgtgaggtgaaaamatctatagtagaaattaaaaccacaaaaaccctctaaatcctccataaatttgggtacatgaacttttggacgatttcatccattccttcacycttctgtagtccatgtttttgtgtggcctctaattcttcagttgcttcccctagaatctcgagggtgctgtcgccacatccttgacagtggcctgggaaacccttcgaatcatttatacrttgtcccaaagggttatcagcgtgcttgggcccttcggccagagtccttccattgccactggagtgacaggctgagttccagacactgcctcggtggttttgctctctcctcaaccttgcgctccccagtcttctctctctcttgccctttgcccttccctttgactcttcctccctttctttctccttccacttgagtatttgtgcaaagaaaatacactatttcacctttattgtagtgtcagtaataatgccagtgaagtgaaacctcttgagaagtaggcattttagcacccagtatattattagaagtcttctacagtgtaaatttcttttttttttttttttgagacagagttttgctcttgtcacccagactggagtgcaatggcgcagtctcagcccactgtagcctctgccccccaggttcaagcgattctcctgcctctcagcctcctgagtagctgggactacaggcacgggccaccacgcctggcaaatttttatatttttagtagagaccaggtttcaccgtgttggccagaatggtctcaatctcgtgacctcatgatcccccaacctcagcctcccaaagtgctaggattacagacgtgagccaccaagccggctgctaatttttgkatttttttttcttttttttcttttgtgagacggagtctcgctccgtggcctaggctggagtgcagtggcgcgatctcggctcactgcaagctccgcctcccgtgttcacgccattctcctgcctcagcctcctgcatagctgggactacaggcaggcgcccgccaccacgcccggctaatttttttttttttttttttttttgtatttttagtagagatggggtttcaccgtgttagccaggatggtctcgatttcctgacctcgtgatccgcccacctcggcctcccaaagtgctgggattacaggcgtgagccactgcgcctggccaatttttgtatttttagtagagacagggtttcaccacgttggccaggctggtctgaaactcctgacctcaggtgatccatctaccttggcctcccaaagtgctggtattgcaggcgtgagccaccgtgcccagtcaagtgtaaatttcttacaaagatgtgttttttgattttttttggccccaaacttttgtaagttattgaaaatgaaaagtctaaataaatatttgtcaaggtggccctcggtgttgcacagccttcacacgccaggcccatgcatgaggacaggttgagatggaacgtctggaccgtggggcactacgagttgaaacataggtgtcccttcctgtgttgacagagattgtctgtggaatttttaatatcatttacttgcttctaggcaaatgattgcctcacattttcaagttgctttcatgcaacaaaatgcgccatttataatttgcaaattcattatattattaaataaaaaatattttgtatatttgaactaaccccctagtctatagtttattcattttaatattaaaagtcaaatctttgttgacatgtgttgaaggatggttgaaattaaatccttcactcttcccttaactatgcttattttaaatttctggatcatgactatttatcaaggaagtagcaaatctattagtgcctcaaagactagaaaaaaatatgatttgtaattatgacttgaagttgttttcttttcaattttgttgttgttgttttgtttgtttgtttgtttttgtgacagagttttactctgtcacccaggctggagtgcagtggtgcgatctcggctcactgcaacctctgcctcctgggttcaagcgattctcctgcttcagccttccgagtagctgggattataggcttgcacacctggctgatttttgtgtttttagtagagatggggtttcaccatgttggccagactggtctcaaactcctgacctcaggtgatccacctgccttggcctttcaacatgctgggattataggcatgacccaccgcgcccagcccttcttttcaatattttaataaaggacttctcattttccaggtgagggcaagatttcactttatgatgcaacactaacgtgattttttttaatatttagaaacattgtgatagacagaaagcaaatctgcgaattcgcttcagaccttcccttttccaacatgttggtctgcactcatcactatcaggaaaaatccaaaaactcacggttggtgacttaattttattttctcatgaacatacaacttgttatttaagttataattattgtttttcttcttaaataagctgtgtattatttaatagcatatatgtctttgctcccaggataaagattatatgaaaccattacttcttaaaatccatgtaaacccacctgcggaggtatctacttccttgaaggtctaccaagggcatacgctggagaaaacttacatgggagaggatttcttctgggctatcacaccgatagctggagactacatcttgtttaaatttgataaaccagtcaatgtagaaaggttggtgattattgaaatgtatgtgatcttacaatttggatctcttattcgtaatgtgatttataatagatttttgtgtgtgtgcctgacagatgtggggacacagtggggcccaaaatgttgggctttaaattacatgtaaaacaactccataataaaacgagtatgttgttttcagatgtaatgtcaacatttaacacgtttggtgaacttcattggtatttctggacttagtatatctagtataattttttaatacttttttgcggaactctcgaaaatctcaaattagtgtttatgtctttatcctggtatgtcccttgaaaattgatctggagctagttgattagcccagcaatttggttgaaatgataaatttgacagagtatgactattcttagtcaatagttttacaaatgctaggttattttyggtacaccagggagaaatttacagccattttatgtttttgagcatttatgttcattttacaaaatttaggactttcttccttttttttttttgagacagtctcgctctgtcgcccagactggagtgcaatggtgcaatgtagctcattgcaacctccacctccttggttcaaaagattctcctgcctcagcctccgaagtagctgggattacaggtacctgacaccacacctggctaatttttttgtatttttagtagagacagggtttcaccatgttggccaggctggtctcaaactcctgacctcaggtgatccacccatgtctgcctcccaaagtactgggattataggcgtgagccattgtgcctggcctgtttttaatttaatagtcgtgattccttcagtccttcttcaggtttgggtgtgttccccagattggcagtggcatacttaaaggaacatagttccccactctgtggtgtttccttttatgtgtcccaatgggagggccaatttgatttttagaatccaccagaaatcattttcagtaattctatttgaggtggtcagaaacaatttagagctgtgatacaatgttactaattttcttttgttactctaaactgattccaaagaggaattcaagttttaaaagtgttttaagcattgggaataccactggaagaacatacagaaatagttttgaataatattttgcacttgcatgagcatttatttgttttgctgttaaagttcatttttatactattagtaatactctgcactttgagatattgtttaccactcagagagccagcatagaattagaaacagcatagatgtccattagtatgtgtttggttaaataaaatgatattgccacgcagtggaatgctgtaagcagtcatcaaaaatattgacgtagattagtatgtattgacatgaaaactttcttagatatatactaagtggggtgaaaagcaaattttataactttatagaatatccttatagatcattttatagattatggcattatatgtgtataggattctagaatatatagcattctatatagagagtatagaattatagattatagaaggattttttgaaaaataaaaacaatgttttacatatattatgtacatagaacaaatctgcaaaaaatctattaaactgttaatagaggtgagataacagggacagtttcacttgacttgatacatttattttgtgtgctttttccctcaacaatcaatttctttttcttagtctttgacttttgagaaagtatagattcacacgcagctgtaggaagtaaaactgagacatcctgtgtacccatcaccccacttgcccaaggggagcatcttgcagactgtggttttgacacagtatatcaagataaggaccgtttctatcaccccaagaattcccacgtaaccttttacagccatatctactggcccaccgctgtaactgtatcgtaaccatactgtgactggctgagcattttgaatgtgcgggggactttttgtcagttctcctgaactgattggagcagtcctctgaggtagatgggactgtctgcattatagaagaaactcaggctcagaaagctgaggaaactcgtgaaaggtgacaattctagtaactgagagacccaggatttggacccaggtctttctgactcctaagcctaaacttttaaccatgcaactgaactagagttaggtttagattcagacatactttgcatgtctgacctagtttcctcccttccccacaccctgagaacgcataygcatacttactagtttgttttcagagtatcaaaaacagagtattatactcacacccagaaagtattttagatctgtcaccatatatcgataattagtcattcttcaaatgcttttttaatattgatattcagatattttaagaggttaatttacttttagtctactaatattaaagttatttgtattggatagaactagtctttgtttcttttattattattatttattactattattattattattatttagagatgagttcttgctgtgttacccaggctggagtgcagtggcacagtcacggctcactgtagatgagaccttccaggctaaactcaagcaatcctctcaccttagcttcctgagtagctgggactacaggtacataccaccatgcctggctaattttttaatttttttgtagcgacgaggtctcactgtgttgcccaggctggtcttgaacccctgacctcaagtgatcctcctacctcggcctcccaaagtgctgggagtacaggtgtgagccaccacgcccagcctagaactggtctttggacatgccatgactactggttgtcctagtgaagtttttttctgatataagatacagcagtattatataggtgttataattttctgggaagagggttaaatatttaaagcattatagacagtgacataaaactcatcctttttgaaaatatctaggtacattattatgttaagcagcaaacataattgtttctgacagaaggaatgaacttatcacctaggagtcatgctcttaagtttctaagttccctacaaccattcagaacacatactgtgcagttattagaagctctagcgttgtcaactttgcttgcttagagtcttgtgtagaaaagctgactctgaggtaaggtcattttcttgaatctttgtaaaatctagcccracttgtgtttttattttgatgtttgtattttcagttatttgttccatagcggcaaccaagaacatcctggagatatwctgctaaacacaactgtggaagttttgccttttaaggtatgactgctatttcctcttacctttccctaacaactaatactagtagacttagcttgaagcttttcttgtttttaaggggaaagaaaattctcatgatttgcaggactcaatggtgaataatattaattttttttgaaatatgaagcacttttatatttgacgagtgcatttgacccattcatagaaagagccttcattttgttttatcttggaaagtaacaggccacacccggtggctcacgtctgtaatcccagcactttgggaggctgagatgggtggatcatttgaggtcaggagttcaaaaccagtctggccaacatgacaaaaccccatctctactaaaaatacaaaaattagccaggaatcgtggcatgcgcctgtaatcccagctactcgggaggctgaggcacgagaatcacttgaacctgggaggtggaggttgcaaataatatgaacgtttctactagaaaaagaaatgaatcgtattttattttattttattttattttattttattttatttttttgagacagagtctcgctctgtcactggctggagtgcagtggtgcgatcttggctcactgcaacctctgcctcccaggttcaagtgattctcctgcctcagcctcccgagtagctgggagtataggtgcgtggcactatgcccagctaatttttgtattttagtagagactgggtttcagcactggccaggatggtcttgatctcctgacctcgtgatccacccgcctcggcctcccaaagtgctgagattacaggcatgagccactgtgcctggcctgaatcattgttttctttagtgtttacttgctgtttgtattttgagtccaaattctatgtgtttttaatgcctgttaattaatacacaatttaatttattggtctctaaggaatccttagatttctttcaagttaactacacagttcttctatagttttaatagaaaatactgttctgtttaattgatttaatgtttcatttccaaccaccaatatattatatacagattcaaacgatggcttaagaaaacatcttttattattaatctaataagttttttaaagttcaagactgagatgatatttctctttttagggatagctgtgttacaaatgccacttcatctatattaagatatattaataacttaggttaaatagaaagaattatttttgaaattaatgcttttgttttattttagagtgaaggtttggaaataagcaaagaaaccaaagacaaacgattagaagatggctatttcagaataggtaatatctactttagtwaaatggcctttatttttctggacttactcctaaagtacttttcagttcttttcagatgttaagcaacttgaggattacaattaccagtgtcctccaggttttatgtgtgctgtgttgtagtacttgcttttattatttgacccaagtaggatttcatatcacagattgggctgtctttctcgctscttccgtgctgtgtgtcatgctcttgttgatgctccctgatagagagtctgcctgcactgcctcctactggatgsgtttagctcctctccagcctcagctcacattgacaggccagaatctgtgcttcgggccccttccctcctccccagcgtcacatctgtgttgagatgtccactgacatagccttatacctggcagccacatagccgtctaccacaagcgtctgtaacacacacatttctttattgatcgccagtttttgctgtccctatccatctagttgcctaagcctaacctgggaggcaccctgaagactgccctcttcttgctgtccattagcacaaatctgtcggtttttcatctgaaagtcttgagtcaccctgtctgtgaggggcaggctgctctgtgcctccaattcagagccaggggagggactgcatctcgctgtggctttcctgtggctttctagagccactgcagttacttttctgaaatgtaactagaaccctgaggcctttttgttatctgatcccttagctcccacccaccttcacatctgtgactttctctcattctttctctccagccctgagactgttgttcctctgatgaaggccccacactctccgggcagccacatctctagccattttctctgcctgaaatgattggtcaattatttttccttctaataaatgcttttgcacccttaatctgcccatttaatggcctcgcttccctgctcttcagatccccccgtatgtgcctttgctgtgtggttgtgttgttccatagctccgttctgtgtgctcccctggagagggaggggccgtgtctctcctgtatgtcctgtagttaacacagggcctgtcacttggtagacactgactcaataactaactgtacattttcttttgtttaaaacaaatgaatgcttctcttagtattagacaagagcaaatattggtaaattgatattgtaggtctataggataaatacatttttaagccctttctagaacagttttacctttggtaagtatcattcagccattgctaagaggcttgcacaataaccctggctactttctttatagttttggtggatgaatgatttttatatttgggctgtatcttagcccatctctagaaatatacacaaaatcagctgagtatctgagacatttattaccccattacctgtcacttattaaatttctgaaaatggtatgttctagattatgaaagtagcataggaaatagagacatctatattaaatatctctatagtaattgaagaaaatgaccatctaaaatatcaactcatatgttcttagaatgagaagtgaacttctgcatcatcagcctaggaccttgtgtaatcaaacagaacagaactaaagagcaactgatcttttttcaactgaatgtagaacattctgcttccttaagaagtcttctttaatggaattgtgtatgaggagcttccttgaccctctcgttagcaaaacaattataactggtgaaaattatttttaaaaaactattttaaatctgtgaagattgtcctaagggctagcagcaaatggagcaacatttattcatgagaatctcccagatctcggggagggagccaggaccagccttatcactcacagtacccccagctcggggagacagaagctctgccctgtgcaggtacagccaggaacactggactctcctgccagcttctagtctagggctgtggcatctgcccaggagggtcaggctgccagcatctgtccttacccccaactctgttgcagaagctctgttccagacaagagcagctgatgaatctgggcagaactctgccctaggcacagcagggtgagaatacttggccctgatcaccgatgtcctagctcactgccccagtccagtcagtagcagaagccagccaagaaaaccaaggcttggctgggcgcagtggctcatgcctgtaatctcagcactttgggaggccaaggtaggcagatcaccagctcaagagttcaagactagcctggccaacatggtgaaaccctatctctagtaaaaatacaaaaattagccaggtgtggtggtgcatgcctgtagttccagctacttagtaggctgaggctggagaattgcttgaacccaacgcaggaggtggaggttgcagtgagccaagattgcaccattgcattccagcctgggccactctgtctcaaacaaaacaaaacaagacaaaaaccaagggctactgccatgaccagtgctctgatcctaaagcaaggtgtcactccaagagaaggggctgctgtccttgccaaggacccagagcagtggtgcagagattgtgcccaatggagaggcaggccagaagaacagagagctctgtagttctccctaaagaggagatgacttacttgaaccagaatgtggggaagttcagcctaagggtgctgtggaatacaatggaaattttagtgttaagcaattagagatgttagctacagacaagcaaatttggatcccagtggaaagtttaacagggagaactagggaaagagatgctagtaagagccctcttggcgtgcaaacaagctgctgttgagacgggaaaagttcccttacccacctttcagggcgtgtgatgggggtgtggcttgcttctttggtgccctactgctcaaacccctaggggagcatgcagaagggcaggctgtggggctctgaccccatggcagtgtctaggggtgaatgtttacagctcctgaggtcccagtgggcgcgtgttacagggtgctcttttagtttagctgtccataggtggcttgtgtttgttagctcaattagaccccctgcctttttatttatttatttatttatttatttattggagacagagtctcgctttgccgcccaggctgaagtgcagtagtgcaatcccggctcactgcaagcgccgcctcccgggttcaagtgattctcctgcctcagcctcccgagtacctgggattacaggcgcccaccaccaggcctggctcatttttctatttttggtagaggcggggtttcgccatgttggccaggctggtgttgacctcgtgatccactggcctcggcctcccaaagtgctgggattacaggcgtgacccaccgcaccagccattagaccccctgccttatcacaaggacagaagctttctgtatcccggggtctcttgccttggtgtaccggatgaattggatcacacgtgggcttggagaatgagtgccaggttttattgagtggaagtagctctcagcacatgggggagccagaagggagatggttttcccctggagtcgggctgcctaggctctcctccgactgccctggccaaattctgcgtcattccgcccatcgatggcctgccagcatccgcgggtgtgctcttccgcccgcccgtgtgcttccttcccctccacgtccagccacttgtgtgcctgcctgctagggtctcagggcttttataggcacagtatggggacgtggcaggccagggtggtcttgggaaatgcaacatttgggtgggaagacggaaatgcctgtcctcacctaggtcggtgggcacaggcccgaggttggagctctagccagggctcatgaccttctctacccagcacttccctgctccccttgcatgtcgccaagactggccctggagaggggcctgaatttaaatgggatcagactgggtagcaacttacgcgtgaaggcattggcaagaacagtagaccatcagctggccatcagtggagacccgagggttgatggcgtgggggttagaagagtagagcgtgatagctaagaatggtcttgtggaagaaatactagttctatttcagtgggttaaagctgcgagacggcagaagaaccttctgcagagacccagtgggagaaggaaagggccactggtcaggcatggcgggcggaggggagccacggctgtagcccttggccgtccctgtcaatgccaggagtgtggggttccagtcactctggtaatttccttcactttttctcttctttcctgtcttaatacttaccttccagaccattgggttaaggacaaaggttaagtttgtagtttgaaaagtcattacacacacacagtaccaaatacaaatttaaaagggtagtcttaagtcttcttcccttttcttctcctacccactgcttctgagaggcagttcccgtaatgatttgtgtcccttcgggagtattgtatgcataaataacaatatctgggtatgttctctaagaacaacacatcgtcacacacaaatgatacgccctataatccagttttacatctctttttttcatggaacaaaatgcctatgtacgtatggaacatgaacatttaaaaatattttaataataataatatgctgagtacctgtatccaccctccagcttaagatgtgccaattcagctgtccgtccctaatagcttctcttctcttccccttctccccaaagctataccctaatagcttctcttctccttcaacacctgaattttatggttaccatttccatttttactatgtatggaatatattcctaagcaatgcacagtgggattttgcctgttttcacgtttgatataaatatctttctgtggtctacagtttggtttcttccccctcacaattgtgagattcatccacgtgagtgtgtgtgtttacgactcattctttttcactcctctatggatggattctgtggacagcacgatctgttctctggtcataaagtttgtgtacatgtttttgctgtaataaacatggctgctttgaacacttgtgcacatgtatgagagtttctctacaatatagacttaggaagagaagcaaatcttcaactgcattatcttcaactttttcttcattatttgatttatttatttatttatagatggagtcttgctctgtcgcccagggtagagtgcagtggcacaatcttgactcactgcatcctccgcctcctgggttcaagcatttctctctgcctcagcctcccaattagctgggattacaggcgcaggccaccatgcctggcttaatttttgtatttttagtagagacggggtttcaccatgttggctaggctggtctcgaactcctgacctcaggtgatctgcctgcctcagcctcccaaagtgccagaattacaggtgtgagcgactgtggctggcttattcttttttattttttcttcgactgaagaaattggctgcctaaaattcccttgtatcagcatattgtaatttatttggccaggctcctagtgatggatacttaggttgtttgcaatcttttgcggtagtgtatgtactgttcttatacatgggagaggataaattgctgggcaagagtgttttgatgaactacttatcatttggtaattatttttctaatgaaatgagctcatcaggtgacagtattcaatgtcacattggttaaaatgttccaagttttgcaatatttttaagatctgaatcccmtgcctaattcaatattcaataataatttttggtagcacctacctgctacccaagtccagcaccaagtatggacaaacttctatgaaataagtttattaataatttttgaataaaagcattactttggaggctcataggttcaacatttacaatataaattagtacaagcctgctctgctgtggttttcaatctgaatgtaccttattttattattaatctattaactatgctgtgagactggacaatggattgcataatgtaacagcatgtggtcagcaaactacggtccatggggcacatctggccctccacctgtttttgaatagtctgtgatctaagaacattttttaaaaagtcatctttttctttttttgtttttaaatggctaaaaaagtaaaaagaatacattgtgctatgtgaaaattatataaaattcagatttctgtgtccataaataaagtttttttggaagacagccatgctcattttctaatgtagtgtgtgcgtgtgtgcttctctccaacagcaaagatgagtgagtaggtgcaggagagatcgaggtcatgctctcccggctttgcactgctgcttagagtactgcagatcacaatgatgcatttataattggacagtattttgagagccacacatatcatggcactctgacttaaaaaaaaattacaagtacttatccatcatcaaaacaagaaaagtagattttgagcattgtggcttttaacactgtagaatgtgggttatgttacaaaattgttggcaagtcattgtagttattgtgcagttatgtgagagctgtacgttattaggctaaatacaatgatactcccaactcacaggaaagcagtggtcagaaaagttagaaactttagaatggaatatctcatcacagcagaatttcttcactaaaaataaaaatgaggctgttcccaaagtggtatttcaagtggcttattttttagctaagcaagaaaaaccacttaccaatcacgagttaattaaatcatggttaatagcagcagccaaagtaatgtgtgcagagaaagtaaacttatttaaggataggaggctttcagcaataacaattgtttgaagacttaaggacattgggagcaatatcagtattcaaaaaacaaagcagattattttgagtgtttttcttggctcctgaggaattgacggagttgtcactggtactgctcagttattacttggaatcagtgccatggttgaagacactgagggttggcccctgtaaatagtctgtttagaacaactacagagaagagtattttcacacaggctgagaaaacacaaattcagtacaacctgaagtagaatctgctaagatgtgcttaaacaaatggtgctaaaaaaaaatacttgtggagaagatggcttagttgcattaatttataaagcttgaaaaaaatgtaaggtatttaaagcctatggttatttattttattattcatcagccaggtactttgcagaaaagatttgaatgtgtcatatgtcattgaacaaaagtgtcaacagtgaaccttattcactctcatggacttagccatcacaaatgctgtgaatttttgtcagaaataggaactgaatatcctgacttgccctgccacacagcagttcagtggcttagcagtggtagagatttactgcagtttttttgagttcaggaccaagattgaaattttcccaaatgagaacttccctcaacagctattatcactttgaaaattcgtttttgctaaactgggcatggtggctcacgcttgtgagcccagcactttgggaggccgaggcaggtggatcacttgaggtcagaggtccaagaccagcctggccagcatggtgaaaccccgtctctaataaagatacaaaaattagccaggtgtggtggcacatgcctgtaatcccagctgctcgggaggctgaggtgggaggatcatttgaacctgggaagcagaggttgcagtgagccragatcgtgccatcgcactccagcttgggtgacagagtgagactctatctcaaagaaaaaaaaaagaaaactagtttttgctgcagacttaatattgtttcttaatgaattcaacctaaaattacaagacaaaatggtgcttatatgcaaaactaacattgcagtcaaatcattttaatgacagttaacattgaacttgaagcaccatcaagctctttatacatttctcatgctttcaaaagttaaaacaggaagcaagatctccatcccacacaagtttacggcagatgcactttccaagctcaaactatagtcccagcagtggttttggacctcaatacaaatgaaagagaaatttccatatctcaaaatccatttaattgaggaacttcacctaaatctcaattggaaatgattcatctgcagtgtaataatataccggaaggctaataatataccaaaaggaaaatcaaatagaattccataagtgcctcccaagggatgcatgtgccccattaaaatcgtgtgtttgtggattgatatcagtattaggcagcacctaggctgtgtgaaagaacgtttcaaagatgtatataaaatatcattatcaatcaacaataacaagggaacatttgcagtcagttttgattatagggaacactaactttgaaccccagttaagtgaaatgttatactcccgaaaggaattatgttcttctccttggtatacctatattaccaaaaaatatatattgtattcagttatcattatatattgaatttccacctcagatttgtaaaaatttgttttctctcttcctgtatatattaccctacatagtaatctcaaatttcctcttggcccacaaggactgtcctttatagaaaaagtttaccaaccttggcttaaagaaatttggcccacaatgaaccattttcttgtcacttttctgacgacattttttggttttaagatggatgttattcctgatagcaagaaaagtggtacacagcatgttaccttttatggttcttggtccttatttttataggagagcctgttttagcttgtcattatagtggagttttatattgaactgtgtagaggaggcattatttcttaattccttctaaatgtgcctttggaaagaatacacttgtattgagtccctgctcaaggtgaacaactgtgtgcgtatttaattaacaaatcaaaatttgttattgacttaacattcaaagcaatcagactgcgtgatggtacagattatattttggtaagatttaggtaaatcacaatttacaaaaaacctatagtttaaaacatggttgatataagaacaaatatatttttgttttttaatttgtagtgagaaaaattatagctctgcctaattaagtaaattgtgaagtttttaaatatgcacttcttcatgaaaaatataaaagctgaatgaaagtagaaagaagggggaaagaaattacctgtgccctgtcaaaagacatctactagaaatattttggtgtattcctttcctgccttaactcagtgatattttatgtttgcttatctcggtgtatccaacaagtattgatttttattttgaaggaaaatttgagaatggtgttgcagaaggaatggtggatccaagtctcaatcccatttcagcctttcgactttcagttattcagaattctgctgtttgggccattcttaatgaggtaagcatatatcaaatcagtgaaacaacttagaaactacatttttattatgtttttattttgtatttaaggcctttttggaattgagaattaacagctttatcataccttttatgattttgtatttcagattcatattaaaaaagccaccractgatcatctgagaaaccaacacattttttcctgtgaatttgttaattaaagatagttaagcatgtatcttttttttatttctacttgaacactacctcttgtgaagtctactgtagataagacgattgtcatttccacttggaaagtgaatctcccataataattgtatttgtttgaaactaagctgtcctcagattttaacttgactcaaacatttttcaattatgacagcctgttaatatgacttgtactattttggtattatactaatacataagagttgtacatattgttacattctttaaatttgagaaaaactaatgttacatacattttatgaagggggtacttttgaggttcacttattttactattatagaccctcttttatagattatcagggattatatatataaatatataaatatacataaaaatgttatggaattaatttattagaaacacttaagaagtacatatttttgtgcagtagatttttgaatcgatactttttttgaaaaccagtttccttgcttttttaagttctttctatatttttctttggaaatgcaaacattacaaaccaatgccatttttcaaatgcactgccatttaagattgattatagatggatttcttaattgaagtacttttataatcacagtgactgaacaaaatattttcaaagacatttgtcattccttaaagccaagattttaaagactaatgtccttcctgagggttactttactatactgtgtatggtgtatagccacagaaagtcagtctgataaattttcaatgtgtaagtgtgatgcattcaacccagattattgtagacttaacttattatatttcctctgatatgtaaaatgacaaactcttctttcctttttaatctttgtctttaatccatgaattaggtgcattatctgctgttgattcttttatatctgcactcattttatgacgtcagacaaaatgttttctaggtgttgctattgtatgagtcataattggtataattttaaagaaaattgtaatattgttttttggtgaaatatattattagtagtatattttccaaaatgattttattgtagtatgaactgataagtgagtcccgtgtccaagwgactgtatttattactcttaaacacgctattccaaatgatattactactataaacaaagaatattaccggtctcagcaatcagtgatctttataaaagtacttttaaaaaatgatgaattatcaccaggcgctgtggctcacgcctgtaatcccagcactttgggaggccgaggcgggcggatcacgaggtcaggagatcaagaccatcctggctaacacggtgaaaccctgtctctactaaaaatacaaaaaattagccaggcgtggtggcaggtgcctgtaatcccagctacttgggaggctgaggcaggagaatggcgtgaacccaggaggcagagctggcagtgagctgagatcgcaccactgcactccagcctgggcgacacagctagactccgtctcaaaaaaaaaaaaagatgaagtatcaacatcagttcccagccagtctgcttggacacactggggtgccacaagtgggttgcaggttggttgcagacgggcagagatggattctgctgagctttcagagtgaccactggctggggcctagcgctggggcaaggttccagctggctgcctctagcctggaggagcttcatctagttacccaatgtgctgaaccaacagcatgaaatagcatcatttcctgtgctgtgttacaaagtgcaaacgtttggaaacactgatacagtacaattatttccatcactccatgttgttataatttttagttacttttcttgattgaaaagtcaatcacattgccaaaaatgatttttatgtcagttaaaggccagttgaaatttttttattaggatgttttaaatttacttttcactttcttgaatttttttcttctcaaatttccttggcccagtgcccatgagcaaatttcattcaaaaacaggaataaccttttgtcataaaattttggcaccagcttggtatactaaattactgcaaarataactgagtaccagaagtaaaaatctctgcaggtgggcttaggagtactcttgggtccctggttcctcagttgccaactctggtttcatgaagaaagaccatgctctgaaaatctagggaggagaaagttattgcagcacctggtgtgatttgttacaacttctttaaagacagcctgcctggctagctttttcctgttttcatgcagtttgccctcccagcattggtccacctgttgttcccaagaaactcattcttgttcccaagactccttttagccaaatctttcctatcattccaggacttttttgtgcttctctccccatgaatctacccgtgcctagggtgtgtgccaggcacgtggcaggtggccagtcagcatctggatgtgagaccaattattccagcctgccctcctctttctctttttatcattttgtattatttttgagacagggtctcgctttgttgcccaggctggagtgcagtggtgctctcatagctcactgcagcctcgatctctggcctcaagcaatcctcctgcctcagcctcccaaagtgctgggattataggtgtgtgccaccatgtccagccccctttctctctcttaactccctctccctgctgtcgttgccatactcttgcatacacaatcggttgtctagtttttgattgtttgtgtgtatggtgtgtgctgtctctctgaccagatttcaggttcctgaggcgagcctgcagctcatactgctcatctgtcctctcctatggtgggtgctcagggcctctcactgttagttactccctcctttctgcccagttctgcactcaactagtagaagcagccatcctttccccaagcaggaaattgtagtggtcgcccttaagagcagtgtgagggcagaagattaagggaggggaagagtccctggaactggaagaaggtaaatactttgccttgagagggcgccgaatcattttaccaaaatagtaaatggaaaaagtgtcaaaggttgggactagttttaaaaacacatatagccagtagacacatgggggctgtttaaataaaaacatttttttacccggttctgccatcacacacactagtgacattccaagtactcagtggccatgtggagctagtggccaccacacttgacaccacggatgcagaacttttccatcactgcagaaagctctgttgaacagtactgtgtccagagtgctaattatgaacagcttagaaaccacaattaatacattctcatgaggttaaaagcagacatgggaatagaacataatgcaaatgatgatgaatattttgggtgagaagagaaagctgaggacccatttctaggattctaagatgtaagatttcttaagttctttatcttagtctcatgcattctccacatcacgcgctgtaccatactgtgtagtcagaacagacagtgtgattgaaaagctttggaaaaagttaacacaaaggattatttagcacataggctgtagatacgtatgtgtgtatttgttcaacaattggagatggttgaatacccttgaacaaagtgtgtatcttctcaaatcagtggttgcactagtcaataattagaaggtgttgttatttttaaaactataagcaaaattatgaargcctttaaaaaatctatcataataatgaaaaagaggttgtctcccaacagtgctgtccctcaaagaaaagactggttatgtggaaacagcacgtttggagagattattctagtgaataacagtgtatatttgtggtaggcaaatttctaagaatgacccctactgacacccccaccaatgaccttgtataatatcctcccactttgagcatgggtggaacctgtttgatccatgattatatcatgttatgtagcaaaaggaagactgtctgggggtggctaatcaaatcttgtgactcctttaaaagcagagagttttctcgggctggtggcagaagtcaagagacaaagcagaaggacctcaggcaccattgctgttttaaggtagagggggctgcatgagaaggaatgcacatggctttgaggagctgagagaggccttggctaacagcaaaggagctgggaactgcagtcctacagccacrggaactgaattcagcccataagctcattcataggcttggaaaggcattcatctccagtctccagataagacccagcctggccaacactttgaatccagccttgtgagaccctaagccgagaactcacttaagcctgcttggacttctgacctacagaactatgagataataaatcagtggtgttttaagctgctaaatttgtggcaatttgttatgtaggaataggaaatgaatacagtattttaaaagaggtaaagaggaaatcttcatacttgattccctgtagtatgctggatatttcttggtaaatgcatgaataaagtctttagtagcaagtcatgtacctggacctygttggggatgttctcgccagagatctcaattagtcttcattggacgtttgttggcaaagttgcagcatcttactgagtagcgtttggtaaaggaactgctagaatgagactataggaataggactgaaacagtgtgtaagggatcttttttatttctagaagaggtgttactttatactgatttagactgctctgagcctgtcagaagtaaattcaagaatgattaacagtggtattttagatacattaagagcaaaaataacctttgccttgtagagatcagataatctgtgtatcgagggatttaattttttttaaccaaaacttagtttctctttttatcatctagcacagatcaaatcctgtatgggccagccaaatgtttgtagtttgagaatgttttgcaaatacctctctgcttccaagccattaatagctaatgaagttttattttggtttgtccattaatttttctgcttatttttactgtattgccatgtccttgatacgagacaagtagaactaaaagagagaaaatgagaggttaagactgtcagaagatgagaaatgtgagtcataaccataccttagtgttttaagggaactttatccagtccaatccctttatagaaaaggaacttttccaagttatgttgcagtatttatagtgtgtaaaattttgtttgactttggtagttgtgcattttraattatgaatcttatatgctacgataactagtatgcttactttctttaatgcatgtgatcatacaatgctaaaaaggtattttttaaagacccaaccaaactgaggattttgttatacatatctgtatcaacacctatatataaactcttcttcttacctgaaacactccttcacccggtttgggcactaactagatcattttcaaaggaacaaacaggaaggagcaagctggcactccagggtgcatctgagctgagaatttagaagacctcattcaagaaagtaaactgagcattgatgggaaagcactttgcgcgaagtaacattcccactgttaatgttgcagtcaaaattgtggaaaaaaaaaagtggtgctaaaattgttctgaaatgaagattgtttgttgtggggaatattttaatactcttggactttagggaggctattttatgtgtcacttgctcctagttgtttcattgtattagtaattagcaaactgtcctggaaccaagggtttggtacttttgcctgattagcattccattatttatttgaaatgctcagtgtttgctcaaatttggtgaaaatatcttttgaagacatattctctgagccttaaaaatggctgctatcgacagtactgtaagatgcactgccagtagatttgatacttttcatttcagtgtaggcagtaatgttttctaagaaagatttagaaatcagcaaagtgtaacaattgtgtttcatttatggaatggaaaaactgaagtgtcccattcagaacactttggaaaggttgtctgcattaggggatgtttctggaagcatcccttagagaagctgcctgaggaatctccttgccaggttgtaccagatttttttttttcttaaatgtattgtatatattttccttaaaatgtcttcattggctgaatgattcctatccgtagtaatattttaggtacttgttggatttttaaaggaagattatttattttcagatttgctgctataattgaaaacctagtaactggtcctgttgattgtgccttcatcactgtttctctgtgccacgaccgttcatgtgtatttgaaataaagaagtttaaaaagccatgttgaattcaagattccttctaataaaaataggtgaaacttaatgagtagtattttattattaactttgttaacactgagacaatactagttatccattttcagttagaaaaaggagtggatcctctattgggttttgtaaagtctctaaagaaaggggaaaaaaaagccctactgttaagacagtgatgaccaatattatgctgatgttcactttattatatgtactatacagttcctaaaataagagtagctacctgggcctctttgatctaaaatatttaggggctataagtaagtttttaatgtagaaaatgctgctaatgatgcttagggcctgaagtacagtgactcccgtttgactgacactacaggtttatagaggattccgaaggttagaagggatcttgtggcttatgtaagtaagtatttaaaatacagctaattagaaatggagattatgcatctttgtcaataggagagcgatggggctgtatgattattcccttgttctccaactagatgatactctttcaaaaataattcatattgttttatgtttatgttttccccatgccattagcattttacatgtagctcttacatttgcaaatattagagtgaacacacatgctttagtttaaaaaatatttattatagaaatgtacatttaattagttttaaggaatgtacctgaccacagtgttaatatatatttcttcaaatttgcaaactttacacctttaagatatctacaaagatgatagtttatttacaagttttacaagaaatgatcacttcacaatactgttgacacagttacgattgaatcttcttctcactttttatttcactctgtacttatagaaagaacagagagtatgggtgaagttccatcccagtgccagggaaagcccgtagagcagaatcagaggtgcaaatggatacagaagaattactgtatttttcaaaaatggcaatgctggaaaagaaaggaatccaaactgatttaaaaaaaaaaaaaaaataaatgactaataaatgaacattttgaaagacagcttacttcaacatgtggggtggaagggaatgcatattttgaatcagtaagatgatgctatttatgcccagaactagactactcttcccaacccctctgtgctgtttcctccttgtctagggctgggaagaaacctaggagaggaattatttcagcacagaggctgagtgggacatcatacactggaccaagagaggttaacaatgagggagaaatgtcacaaatattcatgaaaacagtggtgaatttaaacttgtgactgcctcagaaacctctaggagtccaacttaaagtacagagatggatggcgttataggaaaacatcttttagctatttgagattttccagtgtaaagcattatacccccactttaagagggtgtgagctcaactagtagcccaggcttcagaaaagaactgaaactcttaaatataaaagtctggctccaaatattgatgtttcttgctcactgcttagttagcgggaccctaccccatgcatcccgacctaagtatttctcatataggaagttcttaaacaaactgagctgtactccaactattctaagtggtataggtcgttaccaggagtgttcaaataaccacttagagaaaccacagtgctgcagtgttctcatcacaaaacactttcaaaattcattagaaatgacacaaacatctcccctggactagagaaagcactccccaaacaaggcattacaatgaaggggttaagtgttccctgacaaaccagccaaggggggagagaaccggggtgggaataactccggagccaggcatagtcagagccatctgtatttacagttaggccctaatcatctacagtaacaggaaaggaaggggtaagaaacgtacagcgcagtctctagattttatttggctttatttaatgggatcatttcttaacataaatgaaaaataatatatgttcctcattcatattaagaaaaatgaactgacaacaggatttaacagtaaatctgcaaacatgtcctgaggacaataaatgttgggcccgatcttctgtgattgtctacagaaccatacggtaatcatgaaaactaagaatggggcaaaaagttatgattcaaaaggctttagagaacttcagttcatagacctatgtaacaagatgctgggccccacctttcttcgctctaccctcctgctggtaacccacaacctgaaagcatgggagaagaggagtgaatggtcttggattcctgcaagtcatctggagataaccagtatggtttaacatgtttccttgaaagtataaaatctgttatataccagctaggccattttctagctgcatgaccatgggtaagttgcttaatctctctgcctcagtttcctcatttgaaaacagaaacaaacctgtgtaattgtcatgaagattaaatgagataatgcacataaaatacttaggatagtgcctgtaagtgttccataaaagcagctgtttgtactactgttacaactttccccctcttgctatgttctcaaccaaaaacatttaaaaaaattacttaccactgtatcccaggaaagttacatagatataatagccaactgcaaccaaccataaggtatttccaactaaatatccaataaatgtgtctgtcaggataacatctgccagaagagacgcagaccatgagtccctttaccaatgcatgcaatgaagacttggataatactctaattaactgctacttacggttgatgaaaaaaagctggataaaatgcaaaatgaccaggagtggataaaaagcattgagatgcacatcaaaagcatagccccattccacatcatagtctctgctctgtcgtttcactaaatacttgttagagatgaacctaagagcaaaattaaaatttctttcataataaaatgaattctgtaaatgtttactgacgactttctatgcggcagacattctaaattctggagatataccagtaaacaaaacagacaaaaatccctgccttccatctaggaaggaaggctgacaatgatacacctatgtcagatggtattatggaaagagagaaagcagcagagaaatgtggagaatacaaacttgagatgcaattgtacatatgagggtcataaagtaacatttgggtaaagacccaaggatagtgatggtgcctggcaggcctgaggaatggtgaaaagaccagtgtctgaaagaaaaggagcaagaaatgaagccagaaaagaaacagggttgggcccaacatcaagtcacacaggctccatgtcttacgaagcctgtggccgttttacaatctttggcttttattcctggtgacgtgagaagccactgtggagttctgagaaaagtatttgacttaaatgccttgacagagcctccctggtggcggatctgagaacagactccagagacaagactggcagcagagaccagttagaaggctactgcaaggaagagatgagcagaggggctggtggcagtggaggtgctaagatgtggcacacacgatactctgaaggtagagctcctgacattattggattggagtatgagaaaaaaatactcaaggatgactgagagatttctgccttgaacaaatggaagatggagctgcctttaattgaggtggggctggctgtgggaagagtggttttgaggtgggaaggagtgtgcggaagtttgaatttggacctgttatgttgaagatgccaactagtatggagtaagaagttgtatacaatgtctagagtttagaagacaagtccaaactggaaatataaactcatcagtgtgtagatgatattaatatttaaagccacgggcctgaatgatgtcaccaaaaaaatgaatgtggataatgaacaggcccaaggcccaagacctgggtcaaccccctattaaaaggaggatgaaatagtaagaagcagttaggaagagtgacgcatccagccataagaacaattattcaagtgtatgtcactgttctacaacatggcctactagtttttcagttcaatgatgaataaaaagtaaaatatccaagtaacagaaaagtaagatcttcaaagaacaaaacttgtattataaacatatattggaaattcaatgtattttttaatgtattatttcatttcatctcaagggtacaattaagaatacgctattccgtcactggggataaaaatggaaaataaacagaggtacaatactaatgttaacagtccctgcatttcgttatctgaaaatgccaaaacaatactgaacaaactagagcttaccaagacagtttcctttttagccaagaatgtgtgccattcaaattttatggaatcagtatgtagctcgctccccaagagcgccctttctgtagacgttctctgctgcccctattctcccgcttatcccaaatgggcgcttttcaagcttctggcctcagtgagagtctttcctctgaaagacagatgtgccttccgagagcactccaaggcactgtggttttcacctcccagctccatattaacgccagtcagaggctcatcatggcccagactcttgcctctaggtctagagtcatcaacctcagtgtctactgaccttcttttcactcttcaggaagctccctgaactcaacaggccagcaagggctgcttcatctgcatctgctgcttcctcagtcatctaagccaaaatcttacaggtcatcccaaaggagcctcccacccactccctcttcctgatcccccctcataccttgttatctcaggaagctctcgaatccatctctcctctctattcctatcaccaccatactatctgggcctcctctactcctacgcagacctctgcaagtgtatccagccttgcccactcactactccaacttttgcctcctccactgccatggaaaagatagtgtgagtttgacattatttccttactttaaagcctcaaagctccccacctccttttgcccccaacccacacatgcagtctatgagataaagtccaatttttttcctgaatggcatgaaggccaatttctctagtcacatctcttccccagtgactcggtgtcaccctatgctcccagacctagtgtgctgttcacacctctatgccattgcacttgcaattcccagcaccaggagtcaactattccccatctccacaaaccaccaccttatgctggcttctgtagctcctctgtgatggtcatcattacatgtagtcatttctctttctagttcctcacacaacataggttctcaaaaatacactgaatccctttctatttaattcaaactatgatacagactcacatgaaatgtgctaaactccaggctgatttggtccccttctgtgcctgatattgtttggctgtgtccccaaaatctcatcttgaacagcaatccccagaatccccacgtgtcaagggtggggccagatggacgtaatttcccccatgctgttctcgtgatagtcagtgagtctcacaagatctgatggttttataagcatttggcatttcccccacttgtactcactccatcccgccaccctgtgaggaaggtgcctgcttctcctttgccttctgccatgattataagtttcctgaggcctccctagcaatgcagaactgtgagtcaattaaacctttttcctttataaattacccagtctcagatatttctttatagcagcattgagaacagactaagacagtggcctccagaattactgcattcagggcagaatgcttgttatgaatgaaactattcctttgaaagtcttatttattgaaattttaaaacacaccatttgtttttcatgaatttcttggtaatgaatacgtgacttacattagtattaattctaggccagattttagaattttatattaacagtggacagcatt

SEQ ID NO: 94151 - DNA, 66958 bp, Homo sapiens
  misc_feature (1)...(66958): n = A,T,C or G
actgaatcaataagcatcatgtgttctgactgctccaccaacaggtcgtctccctacaaccctcttacctgctccccataatcaggcctcctgtttcctgaaacccagcaatattcaagttaggccaattaataacactacagtggtctctgagtgttcaagtgaagagtcaaatgtgtttcactttaaatcaaaagctagaagtgattaaacttaaggcatgctgaaaggcaagataggctgaaagctaggcctcttgcatctacagttagccaagctgtgaatgcaaaggaagcattattgaaatcaatttaaagttctatgccagtgaacccacaaatgataagaaagtgaaacagccttattgttgatataaagaaagttttagtggtctggataaatctaaccagccacaatattcccttcaaccaaagcctaatccagttcaagaccctaactctctttaattctatgaaggctgagagaggtgaggaagctccagaagaaaagttcgaagctagtggaagttggttcctgaggtttaaggaaagaagccatctccatcccataaacaagtgcaaggcaaatcggtttcttgagatggaatctacttctggtaaagatgccgggaagatactgaaatgaaaacaaagcatttagaatattccataaacttagttgataaaacagcagtagagtttgagaggattgactctaactttgaaaatactgagaggtgacagcatgctggcagtcctcagagccctcgcttgctctcggcacctcctctgcctgggctcccactttggcggcatttgaggagcccttcagccccccactgcactgtggaagcccctttctgggctggccaaggctggagcccactccctcagcttgcagggaggtgtggagggagaggcacgagtgggaacaggggctgcgtgcggcgcttgcaggccagctggagttccgggtgggcgtgggcttggtgggccccacactcggagcagtcggccagccctgctggccccaggcaatgagagacttagcacccgggccagcagctgcggagggtgtactgggtcccccagcagtgccagcccaccggcgctgtgctcgatttctcaccgagccttagctgccttcccacagggcagggctcgggacctgcagccctccatgcctgagcctcccacccactccgtgggttcctgtgcggcccgagcctccccaaggagcaccaacccctgctccacggcgcccagtcccgtcgaccgcccaagggctgaggaatgcaagcgcacggcacaggactggcaggcagctccacctgcagcccctgtgcgggatccactaggtgaagccagctgggctcctgagtctggtggggacgtggagagtctttatgtctagctcagggattgtaaatacaccaatcggcactctgtatctagctcaaggtttgtaaacacaccaatcagcaccctgtgtttagctcaaggtttgtgaatgcaccaatcaacactctgtatctagctgctctggtggggccttggagaacctgtgtgtccaaactctgtatctaactaatctgatggggacgtggagaacctttgtatctagcgcagggattgtaaatgcaccaatcagcaccctgacaaaacaggccactcggctctaccaatcagcaggatgtgggtggggccagataagagaataaaagcaggctgcccgaaccagcattggcaacccactcgggtccccttccatactgtggaagctttgttctttcgctctttgggtccacggtgcttttatgagctgtaacactcaccgcgaagatctgcagcttcactcctgaacccagcgagaccgcgagcccaccgggaggaacaaaaaactccagacgcgctgccttaagagctgtaacactcaccgcgaaggtctgcagcttcactcctgagccagcgagaccacgaacccacgagaaggaaaaaactccgaacacatctgaacatcaaaagggacagactccagacgcgccaccttaagagctgtaacactcaccgcgagggttcgctgcttcattcttgaagtcagtgagaccaagaacccaccaattccggacacagtactactttgaattcatagattcattatagaaaaaaaaaaagtgtcattgcacacaagctaatgtctaaatttctccagctctaaaattcagacttcggagtcaaattgtgaagtcttctatctcaggatgacaagaaaactatgggaaatacctctgttggtaggtctggcaatcatttctgtatatttttcctcagtattttttatagtgaaagtgagcattcttcactggcctgtgtaattgctaagtgttacagtggtctttcattcctaatctgctgggatactacagagacagccttgcaaatacaggcgtcttactataactgattaacatatagtaatggctgtcattcactaagtatgtttgtatgcaagatgtgcttttatatatatctcatttactcttgtgctttttactcttatgaatgactctgtgctttgtatatatgtcatttactcttcacggcaaccaagctgctattacatccattttacagatgaggtaactgagaactcaggagaggttaagtaattaaccaaatatcacacggctcattaaaagcttggtaggaattcgaacgcattcttttagcagctgcaatctattccctgctaattagatatttacctaattgtatgaaagggaagtgttattaatgttgtgattcaaaatcaggagttttgatcttttcgaatttatctaatggttcagaactggattcacttttcttttttgcgttagggaagaaggcagctaattgctctggctgggactcccagtttaaaaaaaaaaaagccggtgacgacagcctaggtttaaattcaactctacatttatactatgatctcaagtggtttgcttagtttctcttaattctttatttcttcattcatataatagagatttctattgaacctactgcttaaggttattgagaagataaaatgaaatgtgttaggtgagggctgagagaggtgaggaagctccagaagaagcatatgcctggccatagtaagtaagtgttcaagacactgatgaaagacccctattcttctggttcaagttagggtttaaaaaaaaaaattaaagaaaaatacccccttatccttatcttttttttttttttttaaatactatttcaacttctgggaaggcagcatgtaattaagatgccccacataggctgggtgcagtggctcgcacttgtaatcctagcactttgggaggccaaggccggtgaattggttgagcccaggagttcaagaccagcctctaccagggtagggacaccctgcctctatcaaaaatacaaaaattagctagtctcataatccggtctcaaaataaatagataaaaaattttttaaaaaacagatgtcccaagtacaaaatattttaaaccctaccaatgaaagatgttttttaaaaccacaaatacataaaatcacatagtggtcagattagaagctaatctgtgttctaactgtgaatgattttaattgtaaacatctagtttgctgttcacaaaatcatgttacaaccatcattcacaagaccattcacatcactcacattctattggtgttaattataatttacataaagttgaatagttgataaagcaatgtgctttctattaactcgtttgaacgtcacaagaatcctgtagggtaagtattatttcaattttacaaatttagaaacatgtttagagagatgaagtcacatacacataagggattcaggtacgactgcgtccaaatgctgtgttctttcccttaaccaatgaaaccttgatcaactgtaggttaaaactacccagttttttttaattaatagaatggaataagaaatagcatagccagaccgtgtgccatggctcacgcctgtaatcccagcacttgggaagaccaaggtgggtggaacaggagatcgagattgagaccatcctagccaacatggggaaaccctgtctactaaaaatacaaaaattagctgggtgtggtggtgcgtgcctgtagtcccagctacttgggaggctgaggcaggagaatcgcttgaacctgggaggtggaggttgaggttgctgtgagccaagatttcgccactgcactccagcctggagacagagggagactcctttaaaaaaaaaaaaaaaatagcatagctagagcctcaatatatgaaactcaacatagttgaaacacttcttatagtagatcaccatgtcagatgtaatttattcctgtaggtgttggaccaaaaaattgacaaacactgaacatatgtgtagccccagttacacttttactcactgtgtagattttaaagttgatctaacagatttattcatttacagtataggtataaatatatcctgactctacttttctctatttcctaggaggcttttgaaaatcaaatgaaataatatatgtggaagaacactttgtaaactttctatacaagtgttttgtaaatttggatttggaggctatccaaaaaaaagttgtagatattctgaattcaaagaattctataatggggttcacttttgtgaggctgccactatcccttcatcccctataacaacgtatggctgcttaagtaagagggacaatcgagtttgaactatttgtgaactttgatttttttgtgtgatctttctggctcttaaatatgaaagttgactattgtcacacaacaaagtcccttcccaagcactggagtgtcttgcgcaaaacccaaatccaatgtctgtcaaaaatgagttggaaaaaaatgcatgcaataccattattaagctcttactggacacaagccctagttaggtcttttcttccagtaaccaatctctagaattttttcaagtcactagttagcatatactgaatacccatttatataggctacaaaaccaaatgttacataggtaatctttaggctaaatgatttgctatttattcacttgaataaagataaaattcctaaagtacaacatatattttttattttcaaactctaataggtcaagtgaaaaatgattattcaaatatactcttctttcttgtggaaacaatccctttaatacgataacaattttttctggcgcttgattgaagctgtccttgaacagacaaaatttcccctgtcttccagaaatcgtgcttagttcaaactaaaatgtgatgtagcgcaatttctcagctggaagcagaacgattggtcttttcaggatcctttaagataggaatctacatttgcatcctctatctagtttttgttttttaggacaaagtctggccttttcgtccaggctggagtgcagtggcgcgatcttcactcactgtagcctccacctcctggactcaagcaattcccgtgcctcagtctctcgagtagctggaactacaggcacacgccactacgcctggctaattaaaaaaaaaaaaaaagagaccgggggtctccctatgttgttcaggctgatctcgaactcctggggtcaagcgatcctcccgccagggcttctcaaagtgccaggatcacaggcgagagccgccgcgcccagcggcaccccctatctagtgataagcaaccttcaactatgaaagaagcatctggcctgtggacactgtccgttatccttggaacttatccaatttaggaaaacaagtgagcaactaaccctccaaggccggctcacgacaccgggagaaagtggtgtaaaagacaatcgcggccacacaccgcgtaggggctgcgcaaagcagaactaggaagctttgctccggtctggannnnnnnnnnnnnnnnnnnnnnnnnctagcaagcactgcagcccgagccaattgcgaaagaccaacaaagcccagcccagcggaaggaacggtttcggagttgtttttctttgatacgggagttcctccwtgctctcgcccctactctttctggtgttagatcgagcwaccctctaaaagcagtttagagtggtaaaaaaaaaaaaaaacacaccaaacgctcgcagccacaaaagggatgaaatttcttctggacatcctcctgcttctcccgttactgatcgtctgctccctagagtccttcgtgaagctttttattcctaagaggagaaaatcagtcaccggcgaaatcgtgctgattacaggagctgggcatggaattgggagactgactgcctatgaatttgctaaacttaaaagcaagctggttctctgggatataaataaggtaacagtgtttactatgttttactttctggtacctttaatttgtggatgtgtctgcattttgctggcaaccaccctttacctcatctctgcaaagcagggaggaaaaaaaaattagtattgccattttgcagatgggagggcatgaattaatatgttgtatgatcacatgataaacagacctagaggttataatagtcccagttactgccccatttgtaaattgatccccatttttgccctaaggataactcataattttttcctgaacctgatttcattgatccctctattttaaaaatagggaaaaaacaatcgttttagctatatattaaaagagtaagaagcttgtacctattaagagaaagtcctacttactgttaatgagaaaagtggtttgaaagattatactcgccgttggctcacgcctgtaatcccagcactttgggagtccaaggcaggcggatcgcgaggtcaggagatcgagaccatcctaacacactgaaaccccgtctctactaaaaataccaaaaaaaaattagccgggcgtggtggcgggcgtctgtagtcccagctattggggaggctgaggcaggagaatggcgggaaccccgcggggcggaggttgcagtgagccaagatggcgccactgcacttcagcctgggcgacagagctagactccgtctcaaaaaacaaacaaaaagattatactcaacagaaaccaatgctacattgccatagttattgccaagagtaattttaaaaagcatcttttccgggaggctgaggtggggggttgcttgagcctgggaggtggagactgcagtgagctgtaaacgccccactgcactccagcctgggtgacagagtgagaccctgtctcaaatttttttaaaaaacattttttaccacgtttgacctgtgatactgaaggagtggcgggaaagcatcttttagtaaaaacaataaaagggaaaaaaactttcagtgtaattttttacctaggacaagtgtaggtgtggcttagggaggagaagaggacctagaatccaaccttttatttgacctttggtagatgaacaaaggggtttctagaagatacctgatggcctgaaacattatccattacacactagttgacatgcaatgctgtaaacaataattcaaaggatgtgaagttaaatgagggttaacccagtgagtggctgatgaagacagcaatcaacaaataatgactgtctgctgcttagacattagggatagggtgacaaacagaaaataaggttccatgacctcagtctagtagggaaaatggacattaagtaattacaagtgcaggctggatgcggtggctcacacttgtaatcccagcacttttggaggccgaggcgggcagatgacctgaggtcaggagttcaagaccagcctggctaacatggtgaaaccccatttctaccaaaaatacaaaaaattagttgagcgtggtggcgtgtacttgtaatcccagctactcatgaggctgaggcaggagaactgcttgaacctgggaggcagaggttgcagtgagccgagatcatgccattgcattccagcttgggcaacaagagcaaaactctgtcttaaaaataaatwaattaattaaattaaattaataaataaaaaagtaattacaagagcaatgaaaaatacaacccaggtccagcctggaccagcatggtcaaggtctggcatggtgatatagtcagacacatctgagctttcgttttctgattgggtaacttactcaacgtttccacagctttagttccttttctgcaaaatggataaaataacaatacatacctcaaaaagctgtcagtatgatatgagataatgcatacaaagcatttagcacagtgtggtataaggtaaacacactgcagtgttcttattattccttgacaaagtgtggtttaagctaaaatttaaatgtatgtaagagttagttaggttaatgacttccaatgtccagtgctggtttgtacaaaattttctctgatcttcagtgacatgcatttatccaacaaatatttattgagcacctattatctgttaggcactgttctaatgcagaactgaggatatagcactgaggaagacatgagcctcatgagctaggggcagtatgccacactgtataataaaatgtataattgttagatggtgttaagcataaagaaaaaaataaaaggtgaaagtagataaaagactctatatggtggggagggtaggaggggagtgttgactttacagtggtggccaggaaggccccactgagatggagataattgaatcaatatcagaagaagctgagagcacagtgagtcctgcagggagggatcagcaaatgcaaagcctggcatagactgagggaagggagagaagcacaagaaaggtctagatctactctgtgcaacacagtggtaggtagtagcccctagcctcttgtggctcttgagcctttcaaaatgtggccagtctgatttgagatgcactgtgagtggaaatacatgctggattttgcagacttagtatgaagaaaagaatgtagaattttgtgttaataatttttatatagtatacatgttgaaatgataattacttagatatgttgggttaaataaaatatgccactagattgtttttttttttttttttggtgtgactactagaaagattaaaattatatacatggcttgcgttatatttctatgagacagtaccggtgtagagatttaaagggctggagctacagatgataaaatttcctgtattttggctttttactctggggagtcaatgaagggttttgagggtaattcctattgaagaggatcctccagctgctgggcttaggagagatgtaagaggagaaaagatggaaggaacaagtaaagtaagagactactgtgataatccaggcatgagatgaaatgatggggactattgaaccgggttggcagtagcagagattcggagtaatggtcagaaaaattgaggacaatgtagtgagtttttattaggttaaattagtttaatttaaataatctatattttattttgagattatatccttcctactttttgtgggtaaaaaatatatttgttaatgaaattacatgataacatatgagggtcattttgttagttttgagtgtccttatttggccaaaagtttggcaatcctagttcggtatacacatcccactctatttttcttgccgttttatagatttgaaattatagaaggctgagaaccactaaacctgattgggaaaggacagggtggggatttggagcagtccaggtagcagaaactggagatgtgaagctcttgggctggtgaatacctggagaatgaggaagaaagtggagtggtgtttgattgttatgagatctagctggcagggcagggaggggccaaacggagggccctttcacctagagtacaaagacaatctcttagattcatccatgtaatgaggacagcagtgtccacatgtaccatatgttaatttagggaagaattaatggtggtgtcagctttgttgttccactaagactgataatgggaattattcattctgctttgtgataatctatcacttcttgactattctcattcccatgcttggttagaatagtttgtagccaggcatggtggcatgcttcagtagccccagctactcaggaggctgaagcagcaagattgcttgaggccgggagttctggactgtggtgygctctgcatgtctgcataagttcagaatcaatatggtaccttctggcggtgggcatgaaggagaccaagttgtctaaggaggggtgaaccagccaggttggaaacggaacaggtcagagctctggtgctgttcagtagtgggatcatgcctgtgaatagccactgcactcaacctgcgcaacagggagaccctttttcctaaaatactagtttggaaagaaaaatttacagtaagtggtgagcatataatatatgctcaaagactatttgttgaatgaaaaactgaattaatgaataactgaaagaataatgggcataatttaaaaagtttttcaatttttagtaatcaaggtaatgggtgtaaaggtcttagttgtaccaatagacaaacatatttgaaaaaagttaccaagggaaatcttgaagagttatgagcaattgtactgtgctgcaaaacattttaaaggaagaattcattttttttttgaagatctgcttattttttatttcttaccaactatmtacagggcactgtccggaattttttctggaggaatttagaacttaaatttgttgcaccggccgggtgcagtggctcacccctgtaatcccagcactttgggaggccgagatgggaggatcacttgaggccaggggttcaaggccagcctgggcaacatggtgaaaccccgtttctcctaaaaatataaaaattagacgggtgtggtggcgcatgcctgtaatcccagctactagggaggctgaggcaggagaatcacttgaaccgggaaggcagaggctacagtgagctaagattgcaccattgcactccaggctgggtgacagagcgagactccatctcagaaaaaaaaaaaaaagtttcacaattcagaaggtgtggaaagcagaccaacctaaatgaggaagaccaaggaaacagggcaaaagtgagacagcggatgtgaaagaagggtatctttgcatccatatagtggagtggtggttagttgnnnnnnnnnnnnnnnnnnnnttgcttggtggttacagaaagccaaccagtaataagcaaatctctgaaaacagaataaatgggacataaatttttattgtaaaatttgttcatgtaaggaaatatatttgttcaaaaaagagaagacccaatcaatacaatatactttttttttttttttttgagatagagtctcgcactgttgcccggrctggtgtgcggtggcaaaatcttggcttgctgcaacctctgcctcccggattcaagtgattctcctgcctcagcctcccaagtagctaggattacaggtgcccaccaccacacccagctaattttttatatttttagtagaggcagggtttcactatattggccaggctattcccagaatcctgaccttgtgatctgcccacctcagcctcccaaagtgctgggattacaggtgtaagccaccgcacctggccaatacaatatacttttaaaaaactttttaaaatatggtaaaatatatgacataacacaccattttaaccatttctgagtgtacagtttagtggcattaagtacatttaccttattatgcagtgatctcttctatttctctccagaaatttttcatcttcccaagatgaaaatctgtacccattaaaacaatatatctccccagccctctctctccccaggkcctggcaacaaccattctattttctgtctctatgaatatgatactctgggtactgcatataagtacattcatatggtatttgttttttgtgtctggcttatttcatttggcataatgaaggttgtacgtgtagcatgtgtcagaaattcatttctttttaaggctgaataatattctatcctatgtgtatacaacattaatatacttgtaaaaggaaatgccaaaagctgctggttaagtataggagagcaaaataaagtttacctgagatgttgatgtcccttgaggaataagagttcctcatgagagtatactacagtttgtgagggagatttcagtaaaagaaaaatattgtgggaacctgcccccaatatttcaatgtagcttctttctattttccataagtgtcagccggctgagaaataaagagagacagtataaagagaaattttacaactgggccgctgggggtgacatcacgtatcatgatgcccctgagcctcaaaaccagcaagtttttattaagagtttcaaaaggggtgggggtgtaagaacagggagtaggtacaaagatcacatgcttcaaagggcaaaaagcagaactactgataagggtctatgttcagtggtgcacatattgtcttgataaacatcttaaacaacagaaaacagggttcgagagcagagaaccggtctgaccacagatttaccagggcaaagtttttccccaccctaataagcctgatagtactgcaggagaccagggcgtatctcagtccttacctcaaccacataggacrgacattcccagagcagccatttatagacctccccgtaggaatgcattcctttcccaaggtattaatgttaatattccttgctaggaaaagaatttagcaatatctctcctacttgcacatccgtttataggctgtctgcaagaagaaaaatatggctcttttttgcccgaccccacaggcagtcagaccttatggttgtcttcccttgttccctaaaaatcactgttattctgttctttttcaaggtgcactgatttcatattgttcaaacacacatgttttacaatcaatttgtacagttaacacaattatcacagtggtcctgaggtgacgtacatcctcagcttatgaagataacaggattaagagattacaggcataagaaattataaaagtattatttgggcactgataaatgtccatattaaaatgaaatcttcacaatttatgttctttgccgcggctccagccggtccctccattcggggtccctgacttcccacaggagaaaaagaacttgtttccctttattatcataacagtttcactatgcaagctactaattctccccacagctgtccagatttggcctttccaacattagttgccatttacaaatgtgtacactgattcaccatcctctctgtggataaatgtatgagtcctcctagggtctgcccattagtgcattagttgacaattattaggttgatgcaaaagtaattgcagtttttgtcattaaactaatggcaaaaacagcaattacttttccaacaacctaatacttggcctgcagaatgcacaatactagatcttcatccaaaatatcttttgagacattctcttaaaagttaaaaaaaaaaaaaggcaaaaattggccaaaagcaaacaagcaaagataacaacaacaacaaaaaaccccaatggtatgatcctaaacttaagttgactcaaaattggcgccccaaattggactcataaccccttttcctcaaatctgctgtcatctctgtctgacatgtggcagcgtgatcttgccagctaccaaaactagaaagcaaagatgtcagatgtggctccttcccatccttcctcatctactcaccaagtcttactgattttaccttctaaacatatattttaaaggatattctttcctctacattttttctactaatgccacatttcaagtttgtgtcatctattacctgaatcactgtaactgcctctcagtttttttcttcctccagtgttgacccctaaaatccaccctccatacatcagccaaaataatcaatacgacacataaacctgacactataatttaatcagtggctcctcattcattttttgataaatcttaatatgacatgtgggaccttaatctgaacttcttctggccttgacctttatgatccatccaacaacactaatcctactagtggtttccacaagaccaatctcctatctgtcattgcccacaccctgcctgatgtgtcctttcaccctggggaaagcaagtgaaagggcatggcaaaccactgctggaattgtattgtgtgcccctctgtgttcccgtaactccctgtatagaactctgctgtgatactcatcacaatgtattaggttgaaactgccaatattcaatcttttattatcaaaacaataacagtattacgtggtcctacttaactatgatacttatgtttctttctactacacagagaacttcttggggtcgggactctacctcattcatatttgtgtcaaggtttttctaagctcagtgaatatgaccttcacattaaaatgctgaaagaacaaatggtttaatgaactgtggttaactcattatttcttttgcagacagtaaactgacatccatgaatagtttttaatgacatggaaaaaagtttaatgttacattttttaaagcctgatatggaatacacagagataccaacattcacaaagtattcaaagttcataaatataaaaactagtattttaagatttttatcttcttttaagaagcttgctttaaattcagctccaaataaaagaagctagtcaaaatactaaaagcaaaatgtgcctatatacctgccaaaaatgtgttgttaacaatcttgcccaattcaaatggaaagaatctcactactttttaaaaattatttttaattattttcagctgtcgatataatatgttcatatcaattattaccttgccctcttttttgctttttctagcatggactggaggaaacagctgccaaatgcaagggactgggtgccaaggttcatacctttgtggtagactgcagcaaccgagaagatatttacagctctgcaaagaaggtgaaatgttgtgtttagttagaatcatatcatgttagagctaggaggtgttttggagatgacccagtctgtacatgatatagatgaagtacctgagaaatgttgttatttgaccaaggttatagaactagctcatagcaaacccaaaactagaaccgagaactgaacctctcaaatattagtatgttstggaattttccagggagttgttaaaaatgtatatatatactcttgggctccacttccagagattttctttcagtaggttgaaggcagggcctcaaatrcatccaccctgcctcccatgcgccttcatctcacccatgatgctcatataggtaactatgcctggatgacacttgcagaattgctgacagggtcttctgaagcccattcatagaattgggttagaaagttacaataaagctattctttatcaggtttttattgtagatagatctatttcttttcttttctcttttttttttttttgagatggggggtctcactctgttacccaggttggagtgcagtggcatgatctcgattcattgcaacctccacctcccagaatcaagcaatcctcccacctcagcctcccaagtagctgggaccacaggtgtgtgccaccacgccagctaattttttgtatttttggtagaaaacggggtctcaccatgttgcccaggctgatctcgaactcctgagctcaggggatccacccacctcagcctcccaaagtcctgggattataggcatgagccacgctcccagcagatctatttctataaagcattatttgcctcttctagatacaattgagatgtgctgtatataatggggtttcactctgaacgcattctcgcttgtacctgttaactaaataccttaatggcagcaaggtcatcagaattacctgggcagattccttaaaatacacattcctggaccttacccctggatattctaattcagtgcagtataaaaagtgtgattcagcaagacttgagaacctctttgtttatggaatttttggtttgagttctttttttttttttttttttttgaaatggagtctcactctgtcgcccaggctggagtgcagtggcgtgatctcagctcactgcaagctccacctcccgggttcacaagcgattctcctgcctcagcctccctagtagctgtgattacaggcacgcaccatcatgccgggctaatttttgtgtttttgtagagatggggtttcactatgttggccagggtggtctggtctggaactcctgacctcaagtgatccaccctccttggcctcccaaagtgctgggattacacgcgtgagccaccacacctggcctgagttctttttttttttttttgagatagagtctagctctagctttgtcgcccaggctggagtgcagtggtgcgatctcggctcactgcaagctccgcctcccgggttcaccccattctcctgcctcagcctccggagtagctgggattacaggcgcccgtcaccacgcttggctaatttttttgtatttttagtagagacgggatttcaccgtgttagccaggatggtctgtatctcctgacctcgtgatctgctccctcggcctccaaaagtgctgggattacaggcgtgagccaccgnnnnnnnnnnnnnnnnnnnnnnnnnnnnnnnnnnnnnnnnnnnnnnnnnnnnnnnnnnnnnnnnnnnnnnnnnnnnnnnnnnnnnnnnnnnnnnnnnnnnnnnnnnnnnnnnnnnnnnnnnnnnnnnnnnnnnnnnnnnnnnnnnnnnnnnnnnnnnnnnnnnnnnnnnnnnnnnnnnnnnnnnnnnnnnnnnnnnnnnnnnnnnnnnnnnnnnnnnnnnnnnnnnnnnnnnnnnnnnnnnnnnnnnnnnnnnnnnnnnnnnnnnnnnnnnnnnnnnnnnnnnnnnnnnnnnnnnnnnnnnnnnnnnnnnnnnnnnnnnnnnnnnnnnnnnnnnnnnnnnnnnnnnnnnnnnnnnnnnnnnnnnnnnnnnnnnnnnnnnnnnnnnnnnnnnnnnnnnnnnnnnnnnnnnnnnnnnnnnnnnnnnnnnnnnnnnnnnnnnnnnnnnnnnnnnnnnnnnnnnnnnnnnnnnnnnnnnnnnnnnnnnnnnnnnnnnnnnnnnnnnnnnnnnnnnnnnnnnnnnnnnnnnnnnnnnnnnnnnnnnnnnnnnnnnnnnnnnnnnnnnnnnnnnnnnnnnnnnnnnnnnnnnnnnnnnnnnnnnnnnnnnnnnnnnnnnnnnnnnnnnnnnnnnnnnnnnnnnnnnnnnnnnnnnnnnnnnnnnnnnnnnnnnnnnnnnnnnnnnnnnnnnnnnnnnnnnnnnnnnnnnnnnnnnnnnnnnnnnnnnnnnnnnnnnnnnnnnnnnnnnnnnnnnnnnnnnnnnnnnnnnnnnnnnctttatagaaatatatctgctggagcgtggcttatgcctagaatcccagcactttgggaggccgaggtgggtggatcccctgagctcaggagttcgagatcagcctgggcaacatggtcacctgaagtcaggagttcaagaccagcctggccaatatgatgaaaccctgtctctataaaaatgcaaaaattagctgggcatgatggcaggtgcctgtaatcccagctacttgggaggttgaggtgagagaatcacttgaacctgggaggcggaggttgtagtgagctgagatcatgccactgcaccccagcctggacaacagagcaagacaccatctcaaaaaaaaaaaaatatatatatatataaatatatatatatatatatatttatatatatttatatatatatttatatatatatattcatatatatatatttatatatatttatatatatatatttatatatatttatatatatattttatatttatatatatatataaaatcatatatatatacacgcaaaacatattctctcttatttgagagagctaaaaattaaaataatcgaactcttggagatagagagtagaaggatggttaccagaggctgggaagggtagaggtggtgtagggaagaagtagggatggttaatgggtaccaaaaattagaacaaataggctactctggttgcactgcctgtgagttagccctgctctgcaaggagcagccataaagaattttttgttagtaaaaatgattaataatagtaatttaattgtacattttaaaataactaaaagtataattggattgtttgtaacacaaagggtaaatgcttgaggggatggatacctgatttaccctgatgtgataattatgcactgcatgcctgtatcaaaatgtctcatgtaaccttgaatatatacactactatgtacccacaaaaatttaaaaacaaaattaatacaaaaaaatacaaaacagacattcatatcctggggaggtaataggcaatgatgaagaaagggtcaagagtgtctgggaaaatcctttggtaatataaaatagtatataggtataaatggtgttgatcagggtcaaaaaacttagcttgacactttactaacgtaaatataatctgatgaaattcaattctgactgaagagccttcagcatggcagattgatgccctacaggagtactggtagacttttgcccatggcctcctttctgtttggggtggcttgtcttgggctctgacgtcagacagatctgggagagtcccagctccatcttttaatagccatgtgaccttgggtatgaaactcaaccattctgtttcatgttttcatctttaaagtgagcatataagaattgctgtctcattgagttactgtgagaattcaataagaaaaataatgaaatcatgtaaatgcataacaaagtaaaagcccctcataggctatttgccacttttccctcagtcccccaacacactgtagcactatctctaaataatgataactctgttaatagagctaggtttcatttgaaacacagtgtataacaaaatgcattaggacgctagggtctatccgcccaagcatcttagttgcttatggaaccataaaaatctcatataaggtatttttgcattgctaccccttggaattatggtactccaatcttataaaaagtagggcttaagcatcaagattctatgatctttcttagttgaagagatagttattgattatattctagtccagaagatataacaattattttgaaaaaaagttacattacctgtaatggtccccttttgagtatagtctttttttttttttgagacagagtctcgctctgtcgctcaggctagagcacagtggcgcaatctcagctcactgcaacctccgcctcccgggttcaggcgattctcctgcctcagcctcctgagcagctgggattacaggtgcacgtcaccacgcctagctaatttttgtacttttagtagagactgggtttcaccatgttggtcaggctggtcttgaactcctgacctcatgatccacctgcctcagcctcccaaagtgctgggattacaggtgtgagccactgtgcccggcctacaaatagtctttttttaaaaatatttttctttctttttgagacagagtcttgctctgtcrcccaggcgggcgtgcaatggtgcaatctcagctcactgcaacctccacctcccaggtgcaagcaatcctcccagttcaaccttccgagtagctgggactacaggaacccaccaccacactcacctaatttttgtgttttcaatagagatgcagtttcaccatgtcaatcaggctggtcttgaactcctggcctcaagtgatccacccaccttggcctcccaaagtgctgggaatatagatgtgagccaccgtgcccagcctacaaatagtctttacagtccagtggatgccttctattgctcttagcagctagccttgttcttttgtttatatttcctcaactgaaatcatttcaccaatgatagctgcaacaacctttgaaatctggccataagggtttacataagcccttccacataaccattttatttctcaaatgttcttccttctggatcaataccaaaatagaattttcaagagaaaacacacataccatgcatatatattagaaaaacacacatatgtattttaatattatttacctcatatttctatattttgggggttttttgtttgttttttgggttttttttttttttttttttgagatgaaatctcgtctgtcacccaggctgcagcacagtggcacgatctcagctcactgcwacctccgcctcctgggttcaagcgattctcctgcctcagcctctcgagtagctgrgattacaggcgtacaccaccatgccccactaatttttgtatttttagtagagatggggtttcaccatgtgggtcaggctggtctccgattcctgacctcaagtgatctgcctgccttggcctcccaaatgctgggattagaggcgtgagccacctcatttggccaatatttgtatattaagtaccctcatagacacctgagcaggtcaagaagagaatcttaaaacatgttacttgtagacaagtataaatggttttgaaataattataatgatagtaatagcagtttactgtgtgtactagatacagtgttagctcctttacatgcattatttcatttgtttccacaacgactcacaaggaacttgtattagtatctctattttgcagaggaagaattgaagttttaagaggttaagtaacttggtcaaggtccaacagtgactggcagagcccaaactcaaggtccaaggaaaccactcttcacccttaagcctactgccacctaatggagagcgattgaacaacagaacagaaaataaacagaaataaatagaaaatgtggccagcttaatagtgtaatcagttttccacaattctctgtagtagtccctgattttgccacattagttttacttttattttttgagacggagttttgcttttgttgcccaggccggagtgcgatggcgnnnnnnnnnnnnnnnnnnnnnnnnnnnnnnnnnnnnnnnnnnnnnnnnnnnnnnnnnnnnnnnnnnnnnnnnnnnnnnnnnnnnnnnnnnnnnnnnnnnnnnnnnnnnnnnnnnnnnnnnnnnnnnnnnnnnnnnnnnnnnnnnnnnnnnnnnnnnnnnnnnnnnnnnnnnnnnnnnnnnnnnnnnnnnnnnnnnnnnnnnnnnnnnnnnnnnnnnnnnnnnnnnnnnnnnnnnnnnnnnnnnnnnnnnnnnnnnnnnnnnnnnnnnnnnnnnnnnnnnnnnnnnnnnnnnnnnnnnnnnnnnnnnnnnnnnnnnnnnnnnnnnnnnnnnnnnnnnnnnnnnnnnnnnnnnnnnnnnnnnnnnnnnnnnnnnnnnnnnnnnnnnnnnnnnnnnnnnnnnnnnnnnnnnnnnnnnnnnnnnnnnnnnnnnnnnnnnnnnnnnnnnnnnnnnnnnnnnnnnnnnnnnnnnnnnnnnnnnnnnnnnnnnnnnnnnnnnnnnnnnnnnnnnnnnnnnnnnnnnnnnnnnnnnnnnnnnnnnnnnnnnnnnnnnnnnnnnnnnnnnnnnnnnnnnnnnnnnnnnnnnnnnnnnnnnnnnnnnnnnnnnnnnnnngccctaaaattgcaaaccttattgtgaacctcaccattgaggtcttaagttatatatatgtacatatgccgtgtgtgtttctgaagtctccaaatattgcccaaatagccagttcttaaaaaggcccctcaaagttttcttggatgtcagtttgggatgactaatctcaaaagaatattggggtttataaaaatgcagtgttattttatgctaatattcccaagttattgacatatatctttatgttttgtgtttgttcaaatataggttactgtctctttttttgttgttgtttggagacagggtctctgtgttgcccaggctggagtgcagtgacgtgattttggctcactgcagcttcaggttcctgggctcaaatgatcttcccaccttggcctccctagtagcagggactacaggagtacaccaccatgcccagcaagtttttgtattttttgtggagatgaggttttgccatgttgcacaggctgatctcgagctcctgggttcgagtgatccttctgcctcagcctcccaaagtgctgggattacaggtgtgagccactgcacttggccgggtattatcttacttgtttcttcatcccaagcatcaacaacaagaggtggagggctggggaacataaaaatttagcaattttttttttttaaacagtctcactctgtcacccaggctggagcacagtggcgtgatcttggctcactgcaacctctgcctcccgggttcaagtgattctcctgcctcagcctccccagtagctgggattacaggtacctgccaccatgaccagctaatttttgcatttttagtagagacggggtttcaccatgttggccaggctggtcttgaactcctgacctcaagtgatctgcccgagttggcctcccaaagtgctgggattacaggcatgagccaccacacctggctgaatttagcaatttaaatgagatggattctcaaagctttcagtagccattgttttgctcaggttttctaatgtgggcatcatatccagtcaccttattgttgctgcatttgtcagttagtttgtttttttcatttatgacaggattaatgttaaaaaatatacttttgtttcaaaatattcccaataggtctgtgagtctgaaatacagtattttttctcttttaataaaaactatttgtagactacaaaggcatttcttcctgcaatgacgaagaataaccatggccatattgtcactgtggcttcggcagctggacatgtctcggtccccttcttactggcttactggtatgtgaacatgtgtttccttcattggttcttatgcctaccttgtgtgtgagatttcttaccctgtctaataagaactctctttataatcataagagacttgaagttttccagtttattattgagagttgtcaaaaaataagcagaaagagttgcacaaagtctcttgtctaacagcattatcaatcattaatccccttctagaggaccctgctagaggtagcagccggaaatgtattcagttacgagccaaccacttttaaaacatttctcatctcttttaatagcaagaaattacaaagcaagaacaataattagtattaattattaacatttgtaacaaatttaatatttataatttttaatattaataaaaatgggtaaatttttgcagaaattaaannnnnnnnnnnnnnnnnnnnctctgttgcccaggctgcagtgtagtggtgtgatcttggcttactgcaacctccgcctcctgggttcaagcagttctcctgcctcagcctctcgagtagctgggattacagatgcccgccaccacgcatggctaatttttgtatttttagtagagacgggctttcaccatgttagccaggatggtctcgatctcctgacctcgcgatccgcctgccttggcctcccaaagtgctgggatttgtatatttcttaataatgaaagcaagctgagaatcagatattttgaagtagctgttttgaggtggccattttagtatcattttagtatcagaacgttttttttttttgagacagagtcttgctctgttwcccaggctggagtgtagtggcgtgatcttggctcactgcaacctccgcctcctgggttcaagcaatcttcctgcctcagcctctcgagtagctgggattacaggcagatacctgtaatatatatatacaggctgataaatattatatacttatatagtatatataaatatataatataatatgtatatatgagatgtgctgtataataataattaatagtataatacatatacatatacatatataatagtataatacatatactattaatactataatactatagtatattatactatactattactatattatactgttatactatattatactatagtatactaataatagtatatactattattatatactaatataatagtatagtatactaatactatattatgctattaatatataatatacatacatatacatataatatgtgtaatataatacatatatgtatatatgagttgtgctgtatataatgctgtgtatgtatatatgagatgtatatgtagatgtatatgtatataatgctgtatatgtatatatgtacatattatatatgtatatataatatatattatataatataaatataacaatataaatattatatatatatccaggaatctgcccaagtaattctgatgaccttgttgacattaaggtagttagttaggtacaagcaagaatgcgttcagagtgaaaccccattatatacagcacatctcaattgtatctagaagaggcaaataatgctttatagaaatatatctgctggagcgtggcttatgcctagnnnnnnnnnnnnnnnnnnnnnnnnnnnnnnnnnnnnnnnnnnnnnnnnnnnnnnnnnnnnnnnnnnnnnnnnnnnnnnnnnnnnnnnnnnnnnnnnnnnnnnnnnnnnnnnnnnnnnnnnnnnnnnnnnnnnnnnnnnnnnnnnnnnnnnnnnnnnnnnnnnnnnnnnnnnnnnnnnnnnnnnnnnnnnnnnnnnnnnnnnnnnnnnnnnnnnnnnnnnnnnnnnnnnnnnnnnnnnnnnnnnnnnnnnnnnnnnnnnnnnnnnnnnnnnnnnnnnnnnnnnnnnnnnnnnnnnnnnnnnnnnnnnnnnnnnnnnnnnnnnnnnnnnnnnnnnnnnnnnnnnnnnnnnnnnnnnnnnnnnnnnnnnnnnnnnnnnnnnnnnnnnnnnnnnnnnnnnnnnnnnnnnnnnnnnnnnnnnnnnnnnnnnnnnnnnnnnnnnnnnnnnnnnnnnnnnnnnnnnnnnnnnnnnnnnnnnnnnnnnnnnnnnnnnnnnnnnnnnnnnnnnnnnnnnnnnnnnnnnnnnnnnnnnnnnnnnnnnnnnnnnnnnnnnnnnnnnnnnnnnnnnnnnnnnnnnnnnnnnnnnnnnnnnnnnnnnnnnnnnnnnnnnnnnnnnnnnnnnnnnnnnnnnnnnnnnnnnnnnnnnnnnnnnnnnnnnnnnnnnnnnnnnnnnnnnnnnnnnnnnnnnnnnnnnnnnnnnnnnnnnnnnnnnnnnnnnnnnnnnnnnnnnnnnnnnnnnnnnnnnnnnnnnnnnnnnnnnnnnnnnnnnnnnnnnnnnnnnnnnnnnnnnnnnnnnnnnnnnnnnnnnnnnnnnnnnnnnnnnnnnnnnnnnnnnnnnnnnnnnnnnnnnnnnnnnnnnnnnnnnnnnnnnnnnnnnnnnnnnnnnnnnnnnnnnnnnnnnnnnnnnnnnnnnnnnnnnnnnnnnnnnnnnnnnnnnnnnnnnnnnnnnnnnnnnnnnnnnnnnnnnnnnnnnnnnnnnnnnnnnnnnnnnnnnnnnnnnnnnnnnnnnnnnnnnnnnnnnnnnnnnnnnnnnnnnnnnnnnnnnnnnnnnnnnnnnnnnnnnnnnnnnnnnnnnnnnnnnnnnnnnnnnnnnnnnnnnnnnnnnnnnnnnnnnnnnnnnnnnnnnnnnnnnnnnnnnnnnnnnnnnnnnnnnnnnnnnnnnnnnnnnnnnnnnnnnnnnnnnnnnnnnnnnnnnnnnnnnnnnnnnnnnnnnnnnnnnnnnnnnnnnnnnnnnnnnnnnnnnnnnnnnnnnnnnnnnnnnnnnnnnnnnnnnnnnnnnnnnnnnnnnnnnnnnnnnnnnnnnnnnnnnnnnnnnnnnnnnnnnnnnnnnnnnnnnnnnnnnnnnnnnnnnnnnnnnnnnnnnnnnnnnnnnnnnnnnnnnnnnnnnnnnnnnnnnnnnnnnnnnnnnnnnnnnnnnnnnnnnnnnnnnnnnnnnnnnnnnnnnnnnnnnnnnnnnnnnnnnnnnnnnnnnnnnnnnnnnnnnnnnnnnnnnnnnnnnnnnnnnnnnnnnnnnnnnnnnnnnnnnnnnnnnnnnnnnnnnnnnnnnnnnnnnnnnnnnnnnnnnnnnnnnnnnnnnnnnnnnnnnnnnnnnnnnnnnnnnnnnnnnnnnnnnnnnnnnnnnnnnnnnnnnnnnnnnnnnnnnnnnnnnnnnnnnnnnnnnnnnnnnnnnnnnnnnnnnnnnnnnnnnnnnnnnnnnnnnnnnnnnnnnnnnaaaaaaaaaaaaaataataataataataataataataataataataataataatatctaggccaggcgtggaggctcacgcctgtaatcccagcactttgggaggccgaggcaagcggatcacgaggtcaagagattgagaccatcctggccaacatggtgaaacccygtctctactaaaaaatacaaaaaaaattagctgggtgtgtggtacgtgcctgtagtcccagctagtcgggaggctgaggcaggggaatcgcttgaacctgggaggcagaggttgcagtgagctgagattgtgccactgcactccagcctggcaacagagagagacttcgtctcaaaaaataataataataataataatatctaacttatttagaatgctataagrtttaaatcatacaatgtattgcacttagcataaaatctgaaatcctgcaagtgttcaataacaggaggttgcctgttggcattacatttcaattcyacttcctgttattcacacaaaacagggagttcccacctctaattttagcttccagaatgctttgccccagtggaattcatcatatatgctctgacgcctagtttttgggatgaaatgagaggaaaaataagagtattgatccttttccctgtaattcagccctcatctatcattgtcctgagttactacagccacagaaaataatytattctagctctagtagcctatcttaggaaaaaaattttaatttcttttcagagttttagttcaacagttttaatgattaatatgaagaatgcaagataaaagaactggatttatggtggaaggtgaagcttttgattctattctaaaatgttttttgctgcttgctaagtaatttgttcacaagtattttgatttttaaaagaaaacaattagctagctaatatattctgtcaacccaaatagccaatttataagcatgaaaagttgccagtatgggaacrctcagtaaaactgagttctgaacattagcttgtaacaaaatgttatttaaaagaaaaatctggggccaggcatggtggctgacacctgtaatcccccaggctttgggaggccaaggcaggaggatcacttgagctcaggagttcaagaatagcttgggtaacatagcaagatctcatctctacaaaaaatattttaaattagctaagtgtggtggtgcgtgcttgtagtcccagctacgcaggaggctgaggtgggaggattgcttgagcccaggaattgaaggcagcagtgagccatgatttcaccactgcactccagcctgggcaacaaagacagacctcaacacaaaaagaaaaaaaaaaaaagaatttggaataagaagtactaattcagactatttttttcagccctccaagacatctgaataatttagactatttctaataagaaggaatttgatgtaatgttacaaagtgcagggggcaaaaatctactcacttttagctttcatatatatatatgcctttctatatataggttcaccataaagttgaaaaatatgttattccttttacacactcaagatcattaactctgactttcaatatattcttgcatttttggtcacttaagtaaaatcagaaaataaggtttagtaaaagaaaaaactaaatttatggatagcttcaccatgcagaaatgttaatggaaaggagtcccgatccagacctcaagagagggttcttggatctcgtgcaagaaagaattcagggtgagtccacagtgcaaagtgaaagcaagtttattaagaaagtaaaggaataaaagaatggctactccatagacagagcagccctaagggctgctggttgcccatttttatggttatttcttgatgatctgctaaacaagcagtttgttattcatgcctcccctttttagaccatgtagggtaacttcctgccattgccatggcatttgtaaactgtcatgcgctggtgggagtgtagcagtgaggacgaccagaggtcactctcgtggccattttggttttaatgggttttggccatctcctttactgtaacctgttttatcatcagcgaggtctttatgacctgtattttgtgctgacctcctatctcatcctgtgacttagaatgcgttaacagtctgggaatgcagtccggtaggwttcagcctcattttacccagctcctattcaagatggagttgttytgtttcacatgcctcttgacatttcccccttcccttttrtaagagaactcttaatcctaagagttgcagacggatgaaaatccatcttttgtaacttcttcaggctgaatggggccatgatattcctgcctaactgttagggtctcttgtgttcagggtagagaggagcttagtcagaaagcatcagtgtggcgagggccattcatgactcttgagttttttgtgtgtgtgttttttgtttttttgagatggagtctcgctctgtcacccaggctggagtgcagtggtgcgatctcagctcgctgcaaactctgcctcccgggttcatgccattctcctgcctcagcctcctgagtagctgggactacaggygcccgccaccacacccggctaattttttgtatttttagtagagacgggatttcaccatgttagccaggatggtcttgatctcctgacctygtgatccacccgcctcrgccccccaaagtgctgggattacaggcatgagccaccgtgcctagccgactcttgagttttgacaagaggtgatatctgggagattaataagtatttagtttaagaaaacatttagtaagcctgtcctgtgttcccacacaaagggtataacagcaatatattccataagagtaaagcaaagtaagtaaagttattccaagtaaactaaattagaaggctttccatgaactgggcaactgttgagaccaagctgatatggggttgctagctgattgcaatgtgcctagaattttacattacccatccctcttgtttcttctgagcagcagttagagatccctggttggtttacaggaataaacagggttagcctaaattgcagaaacaaacttaaaaacaactgagactagaatttaataacaagtatactatagttcttgaaatataatattctctctccagtttcccatttttattaaagacacattatggtaagactgatttgctttattatacttggtctgattatttgtataaagtgcagcgagaataattatttttcacacaggctttttaattggctttgatggaactctgttttataaggaatctcaggtaagacttttttaaagctragccctgccatgggtttgtacccttaaatacctatgagttgggtaaaacacttttcttttgaggtcccaagttaacttgggcctcctggacctgtaagaaagtgacattctttacttaccataggtcagaaaccctgtacagggactgtgtaggcaaagtatgaggccagtttcccatagggcttttattggctttacaagtcaagtttgattctttaaaggaaagcacaccattccagtcaaagccttggtaaaataaccaatttctccaatagtgtcccattacaaaagaaaacagatttttgttgcacttatacaaacaactatattgccataagttaagaatacttacaattggtttccattccggagaaatcaggtagagagaaacaaatatgtttcaaattttgttcataggagtatattttacttaattgctgcaagctgtaaatagcttaaaagaagtttcctttgaaaaataaaagatcagcaatattttaagcaaagttaaaaaaaattacttcagttttctattggttcagttaattcagttaactcctgttctacttgttattcatgaacattccagctttttatgagagtttygaaagttgttttctttattttaatgttacaatttctaaagttattagcaacctgcatttaagaacatctgctagaattctatagttgattataaaccaccttttaaagaagattaaaacaagacaacaactgtctgtggatgataaaaactttaggacagccactattaaagccacaattgataaggaaatttggttacttttgtggcatacaaaattttacataacaattataattattagtaacatacactaagtcatattagaaataaaggagtttcttataactttggaacatataccaataacatatttatacaaatatagtccaaagaaagcaaaacactgtttcacatttgagaatgcttcctggatgatttttataccaaataagcraaatttcacctttacattaatgtattattaatgttaaacccaatttttaataaaaccttagagacatatttacccaattttaatgtttaatcctaaggtaagattttataaacctttataaccctttacatttttttgtgaaagcgcagataagtcctctaagagaaacctgttgtgcttttattccaatgtttaatttatggaaaaactgaataatacccctttaactttagctaatatgttcatacacagaatctcttacaattaatttttataaaccttccacaaaggccaggtgcagtggctcacacctgtatatcccaacactttgggaggccaagatgggtggatcacctgaggtcggaagttcaagaccagcctgatcaacatggagaaaccctgtctctactaaaaatacaaaattagccaggcatggtggcacatgcctgtaatcccagctacctgggaggctgagacagaagaattgcttgaacccgggaagcagaggttgcggtgagtcaagatcacgccattgcactccagcctgggcaacaagaacaaaactccatctaaaaaaaaccttccacaacttctttaaatctttttttttttttcacttaacacaatcctttaacactttaatctaggcagaaaataatccgcattcccatgcttcttcttacaatttttttttttaaccaaaaacacatttcaccttttttatacaccttgcatgtaaaactgtttcttcagtagtcttaattacacattacaatgctaacttctagcaacttttatttttgatgaaaacgttggttaagtaagggattttaattatgtactaggtgtggagactagtctaggacacaccaggcagaagtgcagataagggctgactctccagcatagccaggggcatgaggccttatctagaatctgatggctttaaagtaggtaaatagaacagttttcaaaagttaaagaaacagtttgtccttaaagcatttagcaaatctgatatctgaccttaatttagaccaaatgtctacatttttaagacattttattttaccaataaactttaaaactgtctttattttcaaaagattactaaagtcacacgaacaaaaaggcattagtttctatttttctgaaaaaatatttacgcacttacttttctaagtcaattgattagagctttgtaatatataaacatacactataaatagaagattcagcacttatacagtttttcgtttgccagtttctttttttttgagacaaagtttcgctcttgtcacccaggctggagtgcagtggcatgatcttggctcactgcaacctctgcctcccaggttcaagtgattctcatgcctcagcctcccgcgtagctgggattacaggcgcccaccaccacacccagctaatttttgtatttttactagagacgggttttccccatgttggccaggctggtcttgaactcctgacctcaagtgatccgcccacctcagcctcccaaagtgctgggattacaggcatgagccacctcgccccaccatttgccagtttcttaattggatgacaggtttcagagtggagcccttggaggaacagagctgggacagcatgcatttctagggctaaataagtagcaaataagcagctgaaggcagacagatctccaaaattaaaggtggtattttatactggatcctggatccccaaaaggagggaaatactacgggagaagacaatgcagtgcttttaccgactgtgcatttcattgcaaggcaacctaaagccaatcagcccattttgtaatcagcccatcctcatgagagtctcatctcccagtgaggggtgaggatgttgccttatcttccaggtggcctagagcatgcttctctgatccaagtgtgcagagtcaagtatccctccataactactattagccaccccttaaagtacatttcctacctagttgttacacaccaaagctctctcataatgcaaagtaattgctgataacccccctcccccaaactcaaaaccgtcagataacacaatgcaaaacagaacagagcctttgattttgagaggaatctatctgcttttaattcttggggtctcatgaggaaaacagaggggttttttttcttttttttttttttttcccaaaactggatctgtggtgctgcctttgtttttcccaagtagtcccaagctaccagaagttatctacgggcctttcatgtgagcattaatagtaacaagacaaaacaaaacaaaacaaaacaaaaaaacaaaaataattcacttgactgagaagaaaaaacctttttccagcaaaacaagcttcaagaagagaaaaacataaaggccttttaaatatatttatagcttattccacttttaattaagctgacttttcaccatagtgctctttaaagaaaaaatcctttcagagctcttattacccgactttagccatgccaagcggccaatatttccagcttctgaactttaccaaaggtaaactcctaggtgcttagaagaaggaaaattgaagacagtccatggaggagaagagaatagacacatatattaaatcagtaatgacttacttcctgggtggggaattgaacctagactgccactgtgaaagtgcaaaaccttagctactgagctacaggtctgggcagtgtctatttcttttctcagaagtagtctagattagttaattttgagcttgcaaaggcttttaactatttaatatgattttcagagctggctatgacatgaactttaaaattcttgttccctggaagacagagcccaagagaaggtactgccatgcggttaaaaggtcaagctcccaagcacataaaacaaggtggagacttcatcgggttttttgtttgtttcagggacctgcaaccaagtttgttactgaccagcttgctgggtagtcttgaaaagcgggcttacaggtgttctaagcccatgttttatcctgaagtacccctctacacggaaaaacgaattcatagcacaaaatacaccagcttaagactagccttagaattctttttcgcattaattaagtctttacagaggtgataaacactgattttttttccattcattcaactgtttgcacagagagagagaagctaaaaatctgactggtaacaaattcttagccttttgctggcatgccaggcttctgggttccttttccctgagcagccctagtgatcgggcttgtggcaccatctccccgggggccaagctgcatcataaaggaaaaaaattttttttttcattttgaccagagcaaaatatgcatgataaaacatagacattagctactctgcttagcacccaatatcaaactggcaaggcttaaatttacccccagttgggccccatcatctttaatccaacctctgacttggaatttcaacatgtggtctctgggcaagaaggtcgccctgagaaatagaaaagataagaaagggaaaggaaaagtagagacggaaagtattgcctgtggcagggtggggaaggcaaaatgatcagggaggccagagaaagacccacctattgcagcaacactgaaaacttcaggctgctgctgtcggttgagcagggatctttttcagcaatcctgtcagctctcaagtttccccttttaggcaggaaaaagctccccatgtcccacgatcctgtgcatgcctaaccctgtcacccatagccatcagcaaagagtacaaaggcagattaatccaaagagaacagcagttaacatcccatagtgccraacctgttcttagctgaaagggactttactgagagggtcctctaaccccctaaatcttattcattttatttattattttattatattttatttttgagatggagtctcgctctgttggccaggctggagtgcagcagcacaatctcggctcactgcaacctcggcctcccgggttcaagcaattctcctgcctcagtgtcctgagtagctgggattacaggcatgcatcaccacgtctggctaatttttgtatttttagtagagaccgggtttcaccgtgttggccaagctggtctcgaactcctgacctcaagtgatccacccgccttggcctcccacagtgctggggattacaggcgtgagccactgcacctggcctaacctcctaaatcttagaagggactctaatcctcctaagtcaggcctctaacttgacgtcagtcaagtgtccttgccttttattaagaaggacctgtaacccactctgtcttaggagagactctaactcccctaagttgggcctctaacccaatcccattctttacccaggtgtaggcaccccacttactcaaagtcagcccactgttgtgccctgatgattttcctttgggtcaggggtctcttcagtattgtaactctatggtctgccagaaatatgttacaggaccccaacacttacccaaaggtagccatagggtcagggtttctgcactttagtcccttcgtggttgccagaaagatgttaccagaaaggggtcccgatccagaccccaagagagggttcttggatctcatgaaagaaagaattcagggtgagtccacagtgcaaagtgaaagaaagtttatttatttttgagacagagtctcgctctgttgcccatgatggagtgcagcggcgcgatctcagctcactgcaagctccgcctcccgggttcacgccattctcctgcctcagcctccctagtagctgggactacaggtgcccgccaccatgcccagctaattttttgtatttttagtagagacggggtttcactgtgttagccaggatggtctcgatctcytgacctcgtgatccgcccgccttggcctcccagagtgccaggattacaggcatgagccaccatgcccggccgaaagcaagtttattaagaaagtagaggaataaaagaatggctactccatagacagagcagccccaaggggtgctggttgcccatttttatgattattttttgataatatgctaaacaaggggtggattattcatgcttcctctttttagaccatgtagggtaacttcctgacgttgccagggcatttgtgaacagttatggcgctggtgggagtgtagcagtgaggacgaccagaggtcacttttgtggccattttggttttggtgggtttggttttggtggctcctttattgcaaactgttttattagcaaggtctttatgacctatatttattttgtactgacctcctatgtcatcttatgacttagaatgccttaaccatctgggaatacagcccggtaggtttcagccttattttacccagctcctatttaagatggagttgctgtggtttacatgcctctgacaaaataatcatgatatgcatgttataatttttaaggatattttaaatgcaaacatatagttatgcattgaaaaaatatataattttggctcttaatttaaaataatatatgttaataaatattatgtgcaacatcgttttctatttckgcgtgggataccactgcacatacgtgccactagttattcaatttactcattatcattggtattttgtcactctttcagttgcaaggaacaaaaaacttaaactgccccaggcccaaagaggaattttttggctctgtgattaaagtctcaagcaggctgtcttcctctgatggccagatatctaccagaagttccagggttaaaccctttaaattccaagtccagcaggaagggaaaaaaaacatcacttcaacagtggcttcaaacgttcttgttctagaggtcagtgactagactagcctggagccaatcactgtatgcatttggtgacagcggtattaccagaacaaggggacacaaatgctgatgggaaaaaacaacagctgtccactacagacatttcacattattcccaactatttgctttaatgaactgcactccagggactatccttgaacattaatctttggagacatcattgattattaccttgggataaacaccggatctgagagcgtggcatacttttaatgaatttgataccttttgccaaactgccttccagaaaaggctaccagttaacctgtgctttggaaaatagaaagctgtggaaagaaagtgttttttgtcacttttttgaaagtttgacatatattgaatgaagccttaaaaagaaaagattgctagattcaattatatgaggtgaaatatctgtacattgaaaaaaactcagatgaaaatttctgtccttataattactgctaggcaagaattccgtcttgttttactttgcttttatatgaattattcctaaagtaaatcatttttatatgcctayatctactggcatttttatattatgatttttccatgaatgccctttagccatttatctattagagtattgtcttattcctttataaaagttgccatatattaaccttatccttgtcttatatgttgcaaatgctttaccagtttgtcacttgcctcttaatttgcttggagttaataaagtttagaatatatcatatataaacctggtttactacccacacgtaaaacctgattctgccactttgttttgtatcttcaggcaagtttgataacccatctttacctcagtttcctctttggtaaatgaggatcttaatatattttataggggtattatgaagattaaacaaaataatyatttagaataggccaggtactgtggctcacacttataatcccagcgccgtgagagactgaggcaaaagtatgacttaaccccaggagtttgaaaccagcctatgcaacgtagcgagacccacatctctacaataaagtaaaataattattcaagtgttgtggcacatgcctgtagtcccagctacttgggaggctgaggtgataggattgcttgagcacagaagttcctaggttgaagtgagctatgattgcatcactgcactccagcctaagtgacagataaagactccccaaaaaactccaaaatgcatcagaataactgarggcaatgtctagcacttagtaatctattttagatctgatttttatttatgttgtttttcagtatacagaagcttttaatctcatataatttaatctaacaatctttcttttaagccttctgtattagtcccctctcaccctgctataaataactgcccaagactggccaatttataaaggaaagaggttcaattgactcacagttctgcgtggctggggaggcctcaggaaacttacaattacagaggaaggggaagcaggcatgtcttaaatggcagcaggagagagacagcgagagagagtaagagcaagagacgaactgccaaacacctaaaaaaccatcagatcttgtgagaactcccccactatcacgagaacagcatggggaaaactgcccccaygatccagtcacctcccaccagtgccctccctcaacatgtggggattacaattcggattacaattgttgatgagatttgggtggggacacagccaaaccatatcagcttcaataagtgcctaaactttttttaaaaaggtaagaaattttttttaaaattttttaaaaaatttccacagctttctgtcttccaaagcatagattaactggccagaatgtatagctactttgtgtaattgctaattcatacagatttaacagaataaaagattatctgataattattgccactgaattgcacacttaaaaatggttaaaatgacatgttttacatgatatatattataccacaacttttaagttaattatatatcaaaaaccatttaattgtgtacattaagtgaatgctttgtgtgacatatgaatttatatctcaataaagccctttttaaattaaaaaaacctgagaaagtaatgtccatttagaataagtaatttcactactacttccaaatgaaagagctgttaaaataaacgctttgcattgtgattcattcatttgacaaatattcattgagcacctaagagccaagcactgtgctgggccctggagattcactggtgaccaaaacagtcatggagcttataggaaaggtgtgggaaacagatgttttaaaaaatttaatctcagctgggcgtggtggctcacgcctgtaatgccagcactttgggaggccgaggtgggcagatcacgaggtcaggaaatcgagaccatcctggctaacatggtgaaaacccgtctctactaaaaatacaaaaaattagccgagcatggtggcgggcgcctgtagtcccagctactgcggaggctgaggcaggagaatggcgggaacccgggaggcggagcttgcagtgagccgagatcgcgccaccgcactccagcctgggtgacagagcaagactctgtctcaaaaaaaaaaaaaaaaaaaaaaaaaaaaaaatttctctaatgaatgttcagttacaaatctgagatagatactatcatagaaaactgaaaattactatataatgagaaaataatttagactgggggttaggaaaggcctctttgaggaagtgaagctgtgacttaaaggaagaataggatttatccaggaaaagttttcagcaaattctatggacatcttaaagtaaataaggaacagcttatagtgacactgaattttgtggaacaacaacaaaaacaaatactctactaattttctttaaaaggctttttaaggaaatgttcttattccgtaagtgatgctaagatgcagtaaatcttctatgtcagggcttcttggaccttaatgtgcctacagatttacctgagaatcttgtaagatgtgggctctgatgcagtagctctgggctggggcctgagactcagggaatgcccacattgctctgcagaggaccatgctgaactgaggaaaacaggcagacatttcagaattcttgaattattttgtaaactctctattttcagttcaagcaagtttgctgctgttggatttcataaaactttgacagatgaactggctgccttacaaataactggagtcaaaacaacmtgtctgtgtcctaatttcgtaaacactggcttcatcaaaaatccaagtacaaggtaagttgagaaattgagacaaaaggattggtggttgctatgaataccagccattctgtgggttttcctaaatgttttaatcctgaaaacacctgatagttaaagctcttagttcattttgatttcagtttctgcagattgtgggaaaacaggtggaaagccaaaaagagagaaagcaagggagcgtgactaaaaaagtaaatatgaatgacattggtaaacttgctaactcttccttttttcttctcctgagtaatgattcacaggcttaaatatgcatacatgtcaccaggtgtgcttgggaactatgttggggcttcaccctcagatatgttgacttactgggtttggttggggtagggtagtggcagggaagggagcctggaactctacatttaaaaaaggtgattatcataggtgattctgatagagataacccaagaccacatgtgaaaaacacttcccttggaggtaatctagagattagcctccgaaaggagtacyagatcatactctttacttggttaaaaaataaaattataaaggattaatttgaagataatttttaatgttttctctctttagaaatagctttaatgtctttgtaaacatgatgcatacttatttgtttaaattccaatgttaatgaaaaatacaaatcgaaaagtttcttttttaatttccttaaaaccctctatcgagtggaaaccactctcaaaattttgataaacatccttctagacttctctgaattttctataactggcgtatgttacacatggggtcctggaagcagcaagtatactgcatacttccctcagcattatgttacagacatctaataaagtacagagcattataataaattgtattgattattgggagcaatagcatctcctagtgatgattttagggttgtttttagtgttctggatttttaacagcaaatcagcaataagcatcctcgggcacacatattttcacttttggataattatctccctcaggtagattcataaagggggattactgggccaaagggtatataacttgtaaaaattcctacatattgccaaactcctctccagaaatgctccactgatttgcactcctacccacagtgcagggagagcaacttactctctacttcttcatcagtctgccttctgtgactcttttaatcaccgccaatccagtacgcgaagaatcatctttgtttttaccctgatgactagctacattcatgttcgcatatgatttttggacattgcacttccttttatgaattgcctattttcatggcatcagctcactttttgctattgagctctagagttgtttttgtttgtttctttgtttgttttttgttttttttgagacagggtttcactctgttgcccaggctggagtgcagtggcgcaatctcggctcactgcaacctccacctcccaggttcaagcgactcttgtgcctcagcctcccgagtatctgagattacaggcacgcacgaccacgcccaactaatttccgtatttttaatagagatggggtttcgccacgttggccaggctgttctcaaactccaggcctcaagtgatccgcccaccttggcctcccaaagtgctgggattacaggcatgagccaccatgcccagctgagctctagagatttttaattaatacataagaaacaattcttcatacatttgagaaacccctttatatatcacatctgttgcatatgttttttttttccccagttgttttttgtttgcttttaagcctattttcatttagttttacattaaaattttcttagggatttttttctcatggactttaggttctgtgaggtgtttagaaaggtctttctcattccaagtttttgaaaatatttacccatattttttctagcatatattttatggttgcatttttcatatttaaatcattgccccacccaaatttattttgatttaagaagtaaggtcacagtatagttttttccaaatagttaatgagttttctgcactatttattaaataatacatcattttcctcactgatattaaattcatattataagttcacatgcttacttggatagacttttggattctcaattttattgtaatgatgagattcaattttgcttggttttgttttgtttttcagacagggtctcatttaggctgaagtgcagtggtgtgatcatggctcactgtaaccttgaactgggctcaagcaaccctccacctcagcctcctgagtaggactacagtgtgtgtgccatcatgcccagctaattttttttttttttttttttttgagagccaggattttgctgtttgcccaggctggtctcaaattggccttgagcaattctcccacctccacctcacctcccaaagtgccaagattataagcatgagtcattgcatccagccaagattcaatttttaagttttattctgccccctcaaacttccccatatttcccccaattcagctgcctttgttgaaaatgtatttaaaattaatgaaaaatattcagtgtggccacttgaagggttaatttgaaggtaaaattgaagattctaatttttttcctttttttattttttttwttttttttgagacaaggattcgctctgtcacccaggctggatgcagtggcacaatcacagctcgctgcagccttgacctcctgggctcaacctattctcccacatcagcctccccagtccctgggaccatacaggcatgtgtccccacacctggctaatttctaaattttttgtagagacagggtctccctatgttgcacaggctgggctcaagggctccttgaactcaattgaactcctgggctcaagtcattctcccaacttcagcctctcaaagtgctgggattacaggcatgagtcaccrtgcctggcctaacagttctattttattattattattatttttttagtggagacggagtttcatcatattggtcaggctggtctcgaactcttgacagctgatccacggccgccaggttctattttaaacacayttaatttaagtcatcccacagggaagcagaacagaaagccaacgttagacagaaatttgggagctgtccaaagatctcaagcccccaagaatctatcaaacaktctttaaaatctatttttaatacacaatttttgttagaaaacaaaagtaagagtgtatattttagaggtcaatgtttaaatttatcagtattaaacaagagaaccctaattggagtctgaaragagaagagaagggacagatatgtttttcaggttgggaaatggatctgaggaatgaaagtagtgaggataagcttcactaaaactgaaagcagatgttgaagataaaacttgccagtttcctcaatttctttttcagtatgtggatactaaaataacatatttgagtcaagttttaaagtcatactgtctttcagtagttaaaaacagacatcctattttcaaaagttataattgaattttttaaccttgcccccccctacaaggccgcacagagctgaccttaacgtgggctccagcgccctctcctgacaaaacttactagtgccattaattcctacatattgccaaactcctctccagaaatgctgcactgatttgcactctggaggaaaagtgtgaamagaggctaagatgattctaggctgaatataaacctggctaaggaagggcctaaagattggtcctgacatatgaacctctttgaggctaagctggtactaaagtagaccccaaagatgaagttggttttaatatagaaacttaytacttctaattagaagagagaacrtgttcctcgttaaatacctgtttacatttcagacaccaaataaaatgtcattttcttaaacctcacaacaatacttttggggagatgttattagtccctcttcagtagatgagagagatctgaggtttagagaaattaaattacaagttatataccctttggcccagtaatccccctttatgaatctacctgagggagataattatccaaaagtgaaaatatgtgtgcccgaggatgcttattgctgatttgctgttaaaaatccagaatactagagggaggagccaagatggccgaataggaacagctccggtctacagctcccagcgtgagcgacgcagaagacggtgatttctgcatttccatctgaggtaccgggttcatctcactagggagtgccagacagtgggcgcaggccagtgtgtgtgcgcaccgtgcgcgagccgaagcagggcgaggcattgcctcacctgggaagcgcaaggggtcagggagttccctttccgagtcaaagaaaggggtgacggacgcacctggaaaatcgggtcactcccacccgaatattgcgcttttcagaccgggttaagaaacggcgcaccacgagactatatcccacacctggctcggagggtcctacgcccacggaatctcgctgattgctagcacagcagtctgagatcaaactgcaaggcggcaactaggctgggggaggggcgcccgccattgcccaggcttgnnnnnnnnnnnnnnnnnnnnnnnnnnnnnnnnnnnnnnnnnnnnnnnnnnnnnnnnnnnnnnnnnnnnnnnnnnnnnnnnnnnnnnnnnnnnnnnnnnnnnnnnnnnnnnnnnnnnnnnnnnnnnnnnnnnnnnnnnnnnnnnnnnnnnnnnnnnnnnnnnnnnnnnnnnnnnnnnnnnnnnnnnnnnnnnnnnnnnnnnnnnnnnnnnnnnnnnnnnnnnnnnnnnnnnnnnnnnnnnnnnnnnnnnnnnnnnnnnnnnnnnnnnnnnnnnnnnnnnnnnnnnnnnnnnnnnnnnnnnnnnnnnnnnnnnnnnnnnnnnnnnnnnnnnnnnnnnnnnnnnnnnnnnnnnnnnnnnnnnnnnnnnnnnnnnnnnnnnnnnnnnnnnnnnnnnnnnnnnnnnnnnnnnnnnnnnnnnnnnnnnnnnnnnnnnnnnnnnnnnnnnnnnnnnnnnnnnnnnnnnnnnnnnnnnnnnnnnnnnnnnnnnnnnnnnnnnnnnnnnnnnnnnnnnnnnnnnnnnnnnnnnnnnnnnnnnnnnnnnnnnnnnnnnnnnnnnnnnnnnnnnnnnnnnnnnnnnnnnnnnnnnnnnnnnnnnnnnnnnnnnnnnnnnnnnnnnnnnnnnnnnnnnnnnnnnnnnnnnnnnnnnnnnnnnnnnnnnnnnnnnnnnnnnnnnnnnnnnnnnnnnnnnnnnnnnnnnnnnnnnnnnnnnnnnnnnnnnnnnnnnnnnnnnnnnnnnnnnnnnnnnnnnnnnnnnnnnnnnnnnnnnnnnnnnnnnnnnnnnnnnnnnnnnnnnnnnnnnnnnnnnnnnnnnnnnnnnnnnnnnnnnnnnnnnnnnnnnnnnnnnnnnnnnnnnnnnnnnnnnnnnnnnnnnnnnnnnnnnnnnnnnnnnnnnnnnnnnnnnnnnnnnnnnnnnnnnnnnnnnnnnnnnnnnnnnnnnnnnnnnnnnnnnnnnnnnnnnnnnnnnnnnnnnnnnnnnnnnnnnnnnnnnnnnnnnnnnnnnnnnnnnnnnnnnnnnnnnnnnnnnnnnnnnnnnnnnnnnnnnnnnnnnnnnnnnnnnnnnnnnnnnnnnnnnnnnnnnnnnnnnnnnnnnnnnnnnnnnnnnnnnnnnnnnnnnnnnnnnnnnnnnnnnnnnnnnnnnnnnnnnnnnnnnnnnnnnnnnnnnnnnnnnnnnnnnnnnnnnnnnnnnnnnnnnnnnnnnnnnnnnnnnnnnnnnnnnnnnnnnnnnnnnnnnnnnnnnnnnnnnnnnnnnnnnnnnnnnnnnnnnnnnnnnnnnnnnnnnnnnnnnnnnnnnnnnnnnnnnnnnnnnnnnnnnnnnnnnnnnnnnnnnnnnnnnnnnnnnnnnnnnnnnnnnnnnnnnnnnnnnnnnnnnnnnnnnnnnnnnnnnnnnnnnnnnnnnnnnnnnnnnnnnnnnnnnnnnnnnnnnnnnnnnnnnnnnnnnnnnnnnnnnnnnnnnnnnnnnnnnnnnnnnnnnnnnnnnnnnnnnnnnnnnnnnnnnnnnnnnnnnnnnnnnnnnnnnnnnnnnnnnnnnnnnnnnnnnnnnnnnnnnnnnnnnnnnnnnnnnnnnnnnnnnnnnnnnnnnnnnnnnnnnnnnnnnnnnnnnnnnnnnnnnnnnnnnnnnnnnnnnnnnnnnnnnnnnnnnnnnnnnnnnnnnnnnnnnnnnnnnnnnnnnnnnnnnnnnnnnnnnnnnnnnnnnnnnnnnnnnnnnnnnnnnnnnnnnnnnnnnnnnnnnnnnnnnnnnnnnnnnnnnnnnnnnnnnnnnnnnnnnnnnnnnnnnnnnnnnnnnnnnnnnnnnnnnnnnnnnnnnnnnnnnnnnnnnnnnnnnnnnnnnnnnnnnnnnnnnnnnnnnnnnnnnnnnnnnnnnnnnnnnnnnnnnnnnnnnnnnnnnnnnnnnnnnnnnnnnnnnnnnnnnnnnnnnnnnnnnnnnnnnnnnnnnnnnnnnnnnnnnnnnnnnnnnnnnnnnnnnnnnnnnnnnnnnnnnnnnnnnnnnnnnnnnnnnnnnnnnnnnnnnnnnnnnnnnnnnnnnnnnnnnnnnnnnnnnnnnnnnnnnnnnnnnnnnnnnnnnnnnnnnnnnnnnnnnnnnnnnnnnnnnnnnnnnnnnnnnnnnnnnnnnnnnnnnnnnnnnnnnnnnnnnnnnnnnnnnnnnnnnnnnnnnnnnnnnnnnnnnnnnnnnnnnnnnnnnnnnnnnnnnnnnnnnnnnnnnnnnnnnnnnnnnnnnnnnnnnnnnnnnnnnnnnnnnnnnnnnnnnnnnnnnnnnnnnnnnnnnnnnnnnnnnnnnnnnnnnnnnnnnnnnnnnnnnnnnnnnnnnnnnnnnnnnnnnnnnnnnnnnnnnnnnnnnnnnnnnnnnnnnnnnnnnnnnnnnnnnnnnnnnnnnnnnnnnnnnnnnnnnnnnnnnnnnnnnnnnnnnnnnnnnnnnnnnnnnnnnnnnnnnnnnnnnnnnnnnnnnnnnnnnnnnnnnnnnnnnnnnnnnnnnnnnnnnnnnnnnnnnnnnnnnnnnnnnnnnnnnnnnnnnnnnnnnnnnnnnnnnnnnnnnnnnnnnnnnnnnnnnnnnnnnnnnnnnnnnnnnnnnnnnnnnnnnnnnnnnnnnnnnnnnnnnnnnnnnnnnnnnnnnnnnnnnnnnnnnnnnnnnnnnnnnnnnnnnnnnnnnnnnnnnnnnnnnnnnnnnnnnnnnnnnnnnnnnnnnnnnnnnnnnnnnnnnnnnnnnnnnnnnnnnnnnnnnnnnnnnnnnnnnnnnnnnnnnnnnnnnnnnnnnnnnnnnnnnnnnnnnnnnnnnnnnnnnnnnnnnnnnnnnnnnnnnnnnnnnnnnnnnnnnnnnnnnnnnnnnnnnnnnnnnnnnnnnnnnnnnnnnnnnnnnnnnnnnnnnnnnnnnnnnnnnnnnnnnnnnnnnnnnnnnnnnnnnnnnnnnnnnnnnnnnnnnnnnnnnnnnnnnnnnnnnnnnnnnnnnnnnnnnnnnnnnnnnnnnnnnnnnnnnnnnnnnnnnnnnnnnnnnnnnnnnnnnnnnnnnnnnnnnnnnnnnnnnnnnnnnnnnnnnnnnnnnnnnnnnnnnnnnnnnnnnnnnnnnnnnnnnnnnnnnnnnnnnnnnnnnnnnnnnnnnnnnnnnnnnnnnnnnnnnnnnnnnnnnnnnnnnnnnnnnnnnnnnnnnnnnnnnnnnnnnnnnnnnnnnnnnnnnnnnnnnnnnnnnnnnnnnnnnnnnnnnnnnnnnnnnnnnnnnnnnnnnnnnnnnnnnnnnnnnnnnnnnnnnnnnnnnnnnnnnnnnnnnnnnnnnnnnnnnnnnnnnnnnnnnnnnnnnnnnnnnnnnnnnnnnnnnnnnnnnnnnnnnnnnnnnnnnnnnnnnnnnnnnnnnnnnnnnnnnnnnnnnnnnnnnnnnnnnnnnnnnnnnnnnnnnnnnnnnnnnnnnnnnnnnnnnnnnnnnnnnnnnnnnnnnnnnnnnnnnnnnnnnnnnnnnnnnnnnnnnnnnnnnnnnnnnnnnnnnnnnnnnnnnnnnnnnnnnnnnnnnnnnnnnnnnnnnnnnnnnnnnnnnnnnnnnnnnnnnnnnnnnnnnnnnnnnnnnnnnnnnnnnnnnnnnnnnnnnnnnnnnnnnnnnnnnnnnnnnnnnnnnnnnnnnnnnnnnnnnnnnnnnnnnnnnnnnnnnnnnnnnnnnnnnnnnnnnnnnnnnnnnnnnnnnnnnnnnnnnnnnnnnnnnnnnnnnnnnnnnnnnnnnnnnnnnnnnnnnnnnnnnnnnnnnnnnnnnnnnnnnnnnnnnnnnnnnnnnnnnnnnnnnnnnnnnnnnnnnnnnnnnnnnnnnnnnnnnnnnnnnnnnnnnnnnnnnnnnnnnnnnnnnnnnnnnnnnnnnnnnnnnnnnnnnnnnnnnnnnnnnnnnnnnnnnnnnnnnnnnnnnnnnntccctttgaaaaccggcacaagacagggatgccctctctcaccgctcctattcaacatagtgttggaagttctggccagggcaatcaggcaggagtaaggaaataaagggtattcaattaggaaaagaggaagtcaaattgtccctgtttgcagacgacatgattgtttatctagaaaaccccatcgtctcagcccaaaatctccttaagctgataagcaacttcagcaaagtctcaggatacaaaatcaatgtacaaaaatcacaagcattcttayacaccaacaacagacaaacagagagccaaatcatgggtgaactcccattcacaattgcttcaaagagaataaaatacctaggaatccaacttacaagggtgtgaaggacctcttcaaggagaactacaaaccactgctcaaggaaataaaagaggagacaaacaaatggaagaacattccatgctcatgggtaggaagaatcaatatcgtgaaaatggccatactgcccaaggtaatttacagattcaatgccatccccatcaagctaccaatgactttcttcacagaattggaaaaaactactttaaagttcatatggaaccaaaaaagagcccgcattgccaagtcaatcctaagccaaaagaacaaagctggaggcatcacactacctgacttcaaactatactacaaggctacagtaaccaaaacagcatggtactggtaccaaaacagagatatagatcaatggaacagaacagagccctcagaaataatgccrcatatctacaactatctgatctttgacmaacctgagaaaaacaagcaatggggaaaggattccctatttaataaatggtgctgggaaaactggctagccatatgtagaaagctgaaactggatcccttccttacaccttatacaaaaatcaattcaagatggattaaagatttaaacgttaaacctaaaaccataaaaaccctagaagaaaacctaggcattaccattcaggacataggcatgggcaaggacttcatgtccaaaacaccaaaagcaatggcaacaaaagacaaaattgacaaatgggatctaattaaactaaagagcttctgcacagcaaaagaaactaccatcagagtgaacaggcaacctacaacatgggagaaaatttttgcaacctactcatctgacaaagggctaatatccagaatctacaatgaactcaaacaaatttacaagaaaaaaacaaacaaccccatcaaaaagtgggcgaaggacatgaacagacacttctcaaaagaagacatttatgcagccaaaaaacacatgaagaaatgctcatcatcactggccatcagagaaatgcaaatcaaaaccactatgagatatcatctcacaccagttagaatggcaatcattaaaaagtcaggaaacaacaggtgctggagaggatgtggagaaataggaacacttttacactgttggtgggactgtaaactagttcaaccattgtggaagtcagtgtggcgattcctcagggatctagaactagaaataccatttgacccagccatcccattactgggtatatacccaaatgagtataaatcatgctgctataaagacacatgcacacgtatgtttattgcggcactattcacaatagcaaagacttggaaccaacccaaatgtccaacaatgatagactggattaagaaaatgtggcatatatacaccatggaatactatgcagccataaaaaatgatgagttcatatcctttgtagggacatggatgaaattggaaaccatcattctcagtaaactatcgcaagaacaaaaaaccaaacaccgcatattctcactcataggtgggaattgaacaatgagatcacatggacacaggaaggggaatatcacactctggggactgtggtggggtcgggggagtggggagggatagcattgggagatatacctaatgctagatgacacattagtgggtgcagcgcaccagcatggcacatgtatacakatgtaactaacctgcacaatgtgcacatgtaccctaaaacttagagtataataaaaaaaaaaaaaaaaaaaagaaaaaaaaaaaaatccagaatactaaaaacaaccctaaaatcatcactaggagatgctattgctcccaataatcaatacaatttactgtttactataaaggtataatacagcataatctgggtttattggaattaaatgtaaatcaggtgttccaattatttttttaagctcagttatttttgttaaacttgaatttcaacaaatagtttttaaaattttttaaaaatatacatatatatattttttcttttagagacaaggtcttgctttgttccccaggctgatcttgcctcagtgtcccaagtagctgggctataggcgtgagctgccacacccagcttagcacacttttaatctttgccagtatgataggaaaaaaacagtacttccatsttatattaatatgatatttttatcattaaattggccaacaataatattttcattcatttaattatttatgtttgagacagggtctcgctctgtcgcccaggctagagtgcagtggcatgatcccagctaactgcggcctccacctcccagattcaagcgattgtcctgcctcagcctcccaagtagctgggagtacaggtgcgtgccaccatgcccagctaatttttctatttttagtagagatgggggttttgccatgtgggccaggctgatctcaaactcctgacctcaagcgatccgcctgcctckgcctcccaaagtgttgggattacagtcrtgagccaccgcacccggcccatccttttatatttaataaatcctactatctttgctactccattttgattatataaatcagactgcattacacaaatgcttataaaacaggttgaagaaatgcccttctgttcctagtttgttgagtgtttttatcackaaggaacgttgtatcatgtcaaatgcgtttttgatacctactgagatgatggtgtaggttttttcccttcattttattaaaatggtatatttcactgttttgtgtatggtgagccactttgtattcctgggataatggcatgtagttattttaatataatgctagatttaatttgccaatcttttgttgagaatttttgcatctatattcctaagagatactggtcagtagttttcatgtgatctcttactctgtttttagtatcggggtaattcgggactcagagaatgaattaagaatttcctcctcttctatttttttgggagaatttgaaggattggtgttaattcttttttaaacattgggtagaattcattatgaagccatctagtcctgggctcctctttcctggaagtttcttgattgctgattcaatctcttattaaagatctcagattttctgtttttccttgagtcagttttggtagtttgtgtattcctgagagtttgtatatttcatgtaggtttctaatttgttggcatgcaattgtcctagtattctattataatcttatttatttctgtaaggtcagcaggaatgtccctgctttcattcctggttttagtagtttgagtcttctctctttttgccttggtcagtgtagctaaaggtttgctaattttgtttatctttttaaagaacctattttaagtttcattgattttctctgtagtttttctgtcctctaattcattcatttgtgcttcaatcttttttttctgcttgctttgggtttgtttttattttttgtttctatagtttcttaatgtggaatttcactttactgatttgagatcttcttctttttttaatgcaggcatttgcagctataaatttgcctctgagcactgctttcactgcacctcatgagtctttatttgtttatttatttattttgagataggatctcactctgtcacccaggctggagtgccagttggtgcagtcataactcactgcagcctctacctccctgggctcaagtgatcctcctgcctcagcctcctgagtatctaggactacaggtgygtgccaccacactcagctaatttttaaaaattgtttgtagagacagggtctcactctgttgtccaggctgatctcaaactcctgggctcaagcaatcttcctgcctcagcctccaaagtgctgggattatgggcttgagccactatgctcacctcatcccataaatcttgatatgttgtgttctcatttatgttcacctcaaagtattttctaatttcttgtggtttctcatttgtctcattgcttatttaggggtactgtttaatttctgtatatttgtgaattttccagttttccttctgttattttctgattttactccattgtagtcagagaacatagtttgtataattttaatcttttaaaacatattgagatttgctttgtggtctgatgtatggtctacctgggagaaaattttccatgtgttcttgagaataatgtgtattctgctgttgttgggatggtgtgaggcatctgttaggtatagttgatttatagtgttattcaagtcttctatttctgctggtcttctgtctagttcttcaatatgttgttgaaagtggaaaataaagtccccggctattattgttgaaactgtcttatgtctccctccctttaattctgacaggttttgcttcatgtataatattttgggatctcttgttagctacacaagcaatttttagttaaatgtttttttcctgaaataaattatctctttccaactaatgatagaaacaatgccgcataacctgaatttattagattaagtgtaattgagtgttctgatcattttgggggcagccaagatttatttctgttgaacatcattttaaaacatctaatttcccatctgtaatatatataacacaatttattttttctctaaaaatttaggagtttgtatgtgtgtgtcacagaaagatattagttttattgactagtaccataaaaagatgttatataagaaaatgcctcatgtaacatttgtctagtgtaactgtataaagtgcttgtatatatacatttccatttaaccgtcatattcccagtggagtgctggtgctggcttatatagtagtactcattcagtgatgtcaggtagatagtttaaaattagttgtcgtgggaatatttacactgtggaaatcaacaaatgctactaaactgagatttttgtcccctagagagccagtggttaaacatttgccactgcaccactgcactatccttatttttcagattaggaaataacaaaaacaaaaacctgagatttaaagagttgaggccaggcacagtggctcacgcctgtaatcccagcactttgggaggccaagacaggcagattacctgagatcaggagttcgagaccagcctggctaacatggtgaaaccccgtctctactaaaaatacaaaaattagccaggcgtggtggcacatgcctgtaatcccagctacttgggaggctgaagcaggagaattgcttgagcctgggagacggaggttgcagtgagctgagatcgtgccactgcactccagcctgggcgacagagcgagactctgtctcaaaaaaaaaaaaaaaaaaagagttgaaatgttttccccaaaattactcattacttaagtggttaaagtaggtcatcaaatacannnnnnnnnnnnnnnnnnnngtcatcaaatacaatccttcagacgaaaatactctttccccctcagtatttctctaccccaacatgcaccctcctttcccaccccagcagaattggcttgaagtgtttttggatagtttctacaaaatccattaagaacatttgtttaatgggatttgtaactctcgttaactttagcgtattgggaaaaaaaatgtttccacatactgacattttaatgattaagatactattttgctaagaaattgagttttttctgaaagccttttcttttggcttttaaaattatgatattgaacagtcattgtatttcaataagaagttatctgacaggggctaaaaaccttaggtaaagaaatcgggtacactagaaaagtttggtgaatgcagcaccgcttgataggtaggttagcaaggccacagtgtggatgagagagtgctctatttacacaggtgtctataagctttcattgagcttgagaatattgaagtctggtagcaatgtgctacaaaatgaatttccctctaaatgcttttcaaggcatagcatccttcagtttctggattcatcctccttgatacccctgcctgtttatgctgcaagcttccgttgcctttgattttttgcttccattaggccaaaagccatcgatttcattattacatttcctctcctatcaaatctccaagattttcatatgtaatactattgcttcaaggtcccatggtgaacacaatattctaataaatgaatgaactgtgctgagaattaaagcttatatatttttaagctctactctccttcatggatccaataatcatgctcacttttaaatacaatattatacttctcaattgtcccagttttacttcaaaatatattttttttctgaatgaattattctttatttatttctaaagaatttcatccagttttgtttttgtttttgtttttttgagacgagatctcaccatcttgcctaggctggtttccaactcctgggctcaagtgatcctcccgcctaaccctcccaaattgctaagattacaggcgtgagtcactctgcctggcacatccagtactttttgcctcacttcttttttttttttttttttgcagcgaagtttcactttgttgcccaggctggggtgcagtggcacgatcttgggtcactacaatctctgcctcctgggttctagtgattctcctgcctcagcctctcgagtagctggaattacaggtgcctgccatcatgcctggctaattttgtatttttagtagagatggggtttcatcatgttggccaggctggtctcagactcctgacctcaagtgatctgcttgcctcggcctcccaaagtcctgggattacaggcattgagcaccacgcctggtgtctcacttcttttaactagacacacacattaaaaataagcctccccaaaatgttagccacccaaatagtttagtggcatggcaaatttcatgagtacatttaattatgtatcattttttctaagtcattaataaaatgttaaaaagtctcagtactaactcttgtgcagctcctctctaattgcacttctgtaactgatttttttaagccacttatctatctatttatttatttagagacagggtctagctctgttgtccaggctggaatgcagtggaacagtcatgacccactgcagcctcagcctcccaggctcaaaggatcctctagcctcagcctcctgagtagctagcactacaagagtgcaccaccactcttgcctaattttcttttgtatttctttgtagagacaggattttgccatgatggctaggctgatctcgaagtcctgggctcaagcgctccacccgcctcagcctcccaaagtgctgggattacggggatacaggcctgaaccgtcacacccagcctaaaacccactttttgggggccacctgctagtctgtggtacatatacttgagtgattacacaacaaagatgtaacatggaactaagtaacaaagccaaaacctaattgcagtggctcctgcctgcaatcccggcactttgggaggccgaggctggcggatcacttgagtccaggagttcaagaccagcctgggcaatatggtgaaaccctatctctactaaaaatacaaaaaatagcctggagtggtggcgtacatctgtagtcccagctacttgaggggccaaggcaggaaaatcgcttgaacccagtaggtggaggttgcagtgagccaagatctcaccactgcactccagcctgggtgacagagtgagaccctgcctcaaaaaaacaaacaaaccaaaaaaaacaacaacaaccaaaaaaaccaaagacctaataaatataagcatatcatgtggagatgaagggcctaaaggtgggcacgtacctgtcatattctaattcctctgatgctttaggaattgttcactaaggagactgagtatataataaaacttgtataatagtatctgatttttttcccgagactgcttaaagtttaaaagtaaagttgtcagacctaatctagctcaattatatttgaatcttagttacttctataattcttatttgtggaataggaattataatattgccttcataaagttattgtcaaacgtcaatggaataacctatgtagaaggtttagcacagtgtgtggtacacgataagcactaagtgaatgattgttattattattatcaatggtaaagtagctaccatttctgagcacctatactaggctagacactacaaatcagttatgttatggtgtctgtaccatactaaagctgtkggttagcaccaaactaaagctgaagcctcggtgaagtattttgtttctgaagactgactctgatttcagtttgggacccactctggaacctgaggaagtggtaaacaggctgatgcatgggattctgactgagcagaagatgatttttattccatcttctatagcttttttaacaacattggaaaggtaagtgacagttaagaaaccttagaaatgaaaggtaaaataacaattatctattgcattttttactgacatttaaatcaggcagttgataaagtacagttaaatggaattgacttaataaaaataacaggctcaataacattgaggcaagattgatacagctcttgggtaaatgaaccgagtaatttccacacatttttactttttgtaaagaaagaaatttgtatatttctgcaagtcttgtcttataaatgaatgactctgaagraggatagtttttaagcatctttacataatggaatcatagaacaatgatattaaaggagaccagagttaggttttaggtatttatttaaagatacaacagataatcattgagcttttgttttgtgcaaaatcatactgaagtatatgaattgctaaatttttttttataattttagaaatccttgagtcttgcttcttccaatgtggttcttggactacacacattacctggragtttgttagaaatayagactctcctgatctcttgagtcagaatttgcatttcaataagttctcctagatgatttgtacgcatattaaaatttgagaagcatttctttggagcagtagctctcaactttggtgcacactggaattcacctgggaagtttaaaaaatgctgctgcctgagaccaactcccccaaattctgattgacttggtttggagtgtggcctgggctttgagagatacaataactttctaggtgattcaattatccagccaagattggaaaccactagtttcacgaatgtctcatcataacacactgcttcattcctcatctgggaaagctgtgtggcaatgaggctggccacataaggaggggaaaggggagaggtgccttaggacagctgggagaaaaagcctcttgctgcctgtcctagactgggcttctccaagtcagtgggatatcaggatcacttgggaagtctatttaaaaatagatcccttgatctcacttctaaagattttaacatggatgtttgagttggaccggaaatctgtattttaataggcaactgccacagacagtggtccagagattatattttgagaattactgatgcgaagagcaaaaaactcaagaaatgaaaagcatgacatatgttaggctttcttgccccttctgctaaaaactatgatgaacatgccttggaggtttagatagtaaagctcagggatctctttggtgagtagacgagttaaagcctgtgatgtttctggcattgtacttgtcatgttacgtaagtatgcactcagtgatcgcagccccttagaatataaacctatagaagaaggaattttgcctagttttcatcactgtatgccctgcattttgaagagtgactgacacattagaggcaccaaaatgtttgttgattgaataaattaattctagtttctagacctttaaacataaagactcaaagtttgtgctctggagttgaatgaagctgtgtttgtgtgacttgcttgcaacatgaacatggwttagttttttaacttatctgaagttcagtttctttatctgtaacatggagaaaacaattggactttatagggctgagacgaataaagaaaataatgctcttaaagtactcagggctgggcacggtggctcacgcctgtaatcccagcactttgagaggctgaggcaggaggattgcttgaggtcaagagttcaagacaagcctgggcaacataataagaccttgtctctactagaaatcaaaaacattagccaggcgtgttggaacacacctgtagtaccagctactcaggaggctgaagtgggagaattgcttgagctcagaaagttgaggctgcagtgagccatgatcatgccactgcactccatcttgagcaacagagcaagaccctacctcaaaaataaataaataaaataaaaagtactcagtacattgtaagtactcaataaatgttatatgccactgttattataactactactattattattatcattgccctaattcttgttatgaggtcacattggtgtcatatttccaaaccctcttttcatgccatctaggcagatttctgtatattattatgttgatttacatattctgttttgttttctcccagacccactggaatgtgacaactccctaaatattctaagtgtagtgtctggagaaaagagatgagacctgctagtgtccgtcactgttcaagacattttttgggggggtgctgtgggggacggagtctcgctctgtcgcccaggctggagcgcaatggcatgatctgggctcactgcaacctccacctcccaggttcaagcaattcttctgccttagcctcctgaatagctgggactataggcacccgccaccatgcctggctaattttttgtatttttagtagagacagggtttcacygtgttagccaggatgatctcggtctcctgacctcgtgatccacccgcctctgcctcccaaagtgctgggattacaggcgtgagccaccacgccaggccaagacattttatttaatatagtaacacattgattccacaaaagaacactgagggatagatgttaatttttccatttacaygtgaggaatttaaactgaaaggtgaaataattggttcagcattatgctcaaaaccaaagcgttgtctgcatttttatttagcagttctacttccgcagtctcttagtggaacattttaataatattctgcattataaagtacaaaattagttcctattctcatttcctttttaatgtcgggtttctttttgtaaagtctttagtatctcaactcttcagttcttacacctcctccctcagatcttttgtttcaaaaactgactacttcaggttattctactgtaaagaaggctaagccttcttttccatttgaaaaggaaatagatttaatgggaaagaatatatagtagtgactcrgatttaagatgcttaatcttatttaacatgaacatgackatacatgataacttaaaagtatttctaaagagggtattctacaaatgcacttaatattaattttctaattatttgcatatatctttcttttaggatccttcctgagcgtttcctggcagttttaaaacraaaaatcagtgttaagtttgatgcagttattggatataaaatgaaagcgcaataagcacctagttttctgaaaactgatttaccaggtttaggttgatgtcatctaatagtgccagaattttaatgtttgaacttctgttttttctaattatccccatttcttcaatatcatttttgaggctttggcagtcttcatttactaccacttgttctttagccaaaagctgattacatatgatataaacagagaaatacctttagaggtgactttaaggaaaatgaagaaaaagaaccaaaatgactttattaaaataatttccaagattatttgtggctcacctgaaggctttgcaaaatttgtaccataaccgtttatttaacatatatttttatttttgattgcacttaaattttgtataatttgtgtttctttttctgttctacataaaatcagaaacttcaagctctctaaataaaatgaaggactatatctagtggtatttcacaatgaatatcatgaactctcaatgggtaggtttcatcctacccattgccactctgtttcctgagagatacctcacattccaatgccaaacatttctgcacagggaagctagaggtggatacacgtgttgcaagtataaaagcatcactgggatttaaggagaattgagagaatgtacccacaaatggcagcaataataaatggatcacacttaaacttttggtgtttccatctttttgtcttaaacagaacatgacaaccttcaaattaaaggaaaataaattgtgcaatctttttttaaaaactggaaatttcttggatgtgaggctcattgagatgggactataagatcagatctataaatttaaaaatttagtaggtttgttaggtttcttctacgaaagaaaaatattttcaagactatatcaaacacggctggtcacagtggctcacgcctgcaatcccagcactttgagaggtcgaggtgggtggatcacaaggtcaggagtttgagaccagcctggccaacatggtgaaactccatctctactaaaaatacaaaaattagctgggcgtaggccaggcgcagtggctcatgcctatagtcccagcactttgagaggccaaggcgggcggatgatttgtatgcatattaaaatttgagaagcacttctttggagcagtagcatcctggccaacatggtgaaaccccatttctactaaaaatccacaaacattagctgggtgtggtggcgggtgcctgtagtcccagctacttgagaggctgaggcaggagaatcacttgaacccaggaggttgaggttgcagcgagccgaaatggtgccactgcactccagcccggagacagagggagactccgtctcaaaaaaaaaaaaaaaaaaaaaaattagctgggtgtggtggtgggcacttgtaatctcagctactcaggaggttgggccaggagaatcatttgaaccccggaggcggaggttgtagtgagccaagattgtgccactgcactccagtttgggcaatagagcaagactccatctcaaaaataaataaataaaaataaaaaaggctatgtcaaacacatacacatggagaactttaatccttttatcagacagttcatattcagaaaacacataaggcagaatcctttaacatcctgttaaatgtagcaagtgagctacatttaggttcagaaaatttttggagaaagattttgatccagattttaagcagaaactaatatttatgcaacatatgtcagttactgtcctaaacacttaacttacatcaattagcccattcaacaagttaagtaatatcatcagtgtcatcacaaattataaggatcatttggtaatatgtttaaggaaggttacgttacagattctataacatataagataatttctcagaaagcatcatttctatggtaaatttctccctctttcccatcaactaccttcttctaattcagagaatcaaaatagcattgctgttggactacagtttgcatttagttagtgtaaatacatatgggtcaaaaattcttgtctcccaaacattatatttgaataatataacttagattcctctccatacctcagctatactctactagcactctagggttgactatccacagaatttatagattaaaacacctatcctggtaacagaaatgacactagaaagtggagagcctgttacactcagcttctaactcactttgaaatagatttaattgtttattcttttatttaaattatacttgttccagactgctagccacctgccagtgaagtagactaggagaaagcctttagcaaactttagtaagataatcaaggcccaaatatactgacaacttttcctaataaacatattttggctcctagaacacttgtcataaattaacatttggatgaactttagcgttaaccattatgagaaataagcattacttcttttgatgttatgtgggcaaatggtagtgtgccccatttactgaatgttaaccatgtggcaggcacagtttgccacttagtccttcagcagtcctgtgcagaaggcattgttagaaggcattgaactagctgtgaacacagcagtagtagcagaaacccagaagaaccttggagtctatagcccttactctggagaaaagatgaatgactatagtatcatggggattttgaattttgataagaagaaggagaggaagaggaggaaggggaaggggaggaggaggaggagggaagaagaagaagggaagaggaagagggagaagaagaagaaaagaagaagaagaggaagaaaagaagaagaagaaagaagctttccaacattagtctcaaagtctgaaagcttgtcaatgttatttgaatgaagtttatcctaactctgatttcacttctcagcagtttggtgggaagattcatctcggtcatcaatagagccaattctgagagacatactaaaatcaaagagctttaggttgtcttcaggtaaatggggaatgatttctcattgccaactagtatgatattctgtggtcctgaaccaggggattcattaatagctggaactacaggtgtacaacaccatacctggctaattttttttttatggttgagatgaggtctcaccatcttgcccaggctggtcttttatttatttatttttatttttatttatttatcttttgagacggagtctcactctgtcaccaggctggagtgcagtggcgcaatctcagctcactgcaacctccacctcccaggttgaagggattctcctccctcagcctcctgagtagctgggactacaggtgtgtgccaccacgcccagctaattttgtatttttagtagagacagggtttcaccatgttggccaggatggtcctatcccttgaccttgtgatctgcctgcctccacctcccaaagtgctgggattacaggcatgagacactgtgcccggcccaggctggtattgaactcctaggttcaggtgatcctcttgcctcatcctcccaaagtgctgagattacaggtgtgagccaccatgcccagcctaatctttttctttatttttgtctgactgagtaactatccccaagacacataatcatccgattctcaaaggttgaaatgaaagaaaaaactttccaggcagctagagagaaggggcaggtcacatataaagggaacctcatcaggctaacaatggacttttcagcagaaaacctacaagccagaagatattgggggcctatattcagcattcttaaataaaagaaattccaacgaataattttatacctagccaaactaagcttcataagtgaaggagaattaagatctttttcagacaagcaaatgctaagggaatttattaccaccaggcctgccttataagaggtcctaaagggagtgctaaatatggaaaagatagatcattaccatccactacaaaatcacacttaggtacatagaccattgacactacaaagcaactgcacaagcaagtctgcaaaataaccagttaacaacaaaatgacaggatcaaatccacacatatcaatattaaacttgaatgtaaatgggctaaatgccctaattgaaaggcctggagtgggaagttggataaagaagcaagactcaatgacacggtgtcttcaagagacctttcccacatgcagtgacacccataggctcaaagtaaagggatggagaaaaatctaccaagcaaatggtaagcaaacaaaaatcacgggttgctcttctaatttcagacacactttaaacaaacaaagaccaaaaaagacaaagaagggcattacgtaatgggaataagaagacctaactatcctaaatatgctcccaacacaggagcacatgcagattcattaaacaagtttatggagacctatgaaaagacttaggtaaccacaaaataacagtgggagacatcaacacccaactgacaatattagacacatcattgaggcagaaaactaacagatttttcaggacctgaactcaacactgaccatatgggcctaagagatacctacagaactctccacccacgaacaacagaatatacattcttatttgcacatggcacatactctaaaatcaaccacataattggacataaaacaatcctcagcaaattaaaaaaaaaccgaaatcataccaagcatattcttgaaccacagcacaattagtatagaaatcaatactaagaaaattgttcaaaaccataccattacatgaaaattgaacaaactgctcctgaatgactatttggtaaacaatcaaattaaagcagaaatcaagaaatactttgaaactaatgagaacagagatacaaaataccagaatctctgggacacagttaaagcaatgtcaagagggaagcttatggtgcaaaatgcccaatcaaaaagttagaaagacctcaaattaaccacctaacatcacatgtagaggaactagagaaatgagggcaaaccaaccccaaagccagcagaataaaagaaataaccaaaatcagagctgaaaggaaggaaatggagatgcaaaaaaaatacaaaagatcagcgaatccaagaactggttctttgaaagaataaatgagatagatagaccacatagctagactaatgaaaaaagagaagatccaaataaacacaatcagcgatgacaaagggtaaccactaactatacagaaatacaaaaaaaccctcagagactactatgaatactcctaggtacagaagttgtaaaacctagaagaaatggataaattcctggaaatacaacctcccaagattgaaccaggaagaaattgaatccctgaccagaccaataaggagttccaaaattgaatcagtaataaaagcctaacaacaagaataagcccaggaccagacagaatcacagccaaattctgccagatatattaagagctggtaccattcctactgaaactattccaaaaaaattgaggaggggggactcctccctaactcattcaatgaggccagcatcaccctgataccaaaacctggcagagacaccacaaaaatgaaaacttcaggccagtgcccttaatgaacatagatgtaaaaatcctcaacaaaatactagcaaactgaactcagtagcacatcaaaaacctaatccaccacagtcaagtaggctttatacctgggatataaggttggttcaacatacgcaaatcaataaatatgattcatcacaggaaacagaactaaaaacaaaaaccacatgatcatctcaataaatgcagaaannnnnnnnnnnnnnnnnnnncatgatcatctcaataaatgcagaaaaaggctttcaataaaattcaacatctcttcaggttaaaaactctcaacacactaggcgtcgaaggaacatacttcaaaataatagagccatctatgaaaaacccacagccaatgtaatactgaatgggcaaaagctggaagcattccccttgaaaactggcacaaaacaaggatgccctctctcacaactattcaacacagtactggaaatcctagccagagcaaccaggcaagagaaagaaataaaaggcatccatataggaaaaaaggaagtcaaactctgcctgtttgtaggtgagatacaattctatatctaggaaaatcccataatctctgcccaaaagctccttgatctgtgatatggttaggctttgcgtccccacccaaatctcatgttgaattgtaatccccacgtgtcaagggagagaccaggtggaggtaattgaataacgggggcagtttctcccatgctgttatgatagtgagttctcacgagatctgatggttttataaggggtacttcccccttcactgggcacttctcctttcctgctgccttgtgaagaaggtgccttgcttcccctttgccttctaccatgattgtaagtttccccaggcctccccagccatgatgaactgagtcaactaaaccttttttctttataaattgcccagtcttgggtggttctttatagcagtatgaacatggactaatacaatctaataaacaactttagcaatgcttcaggatacaaaatcaatgcacaaaagtcagtagcattcatatacataaacaacatccaagctgagagccaaatcaagaagcaatcccattcacaatagctgtgaaaagaataaaatacctaagaataaaactaactaggaaagtgaaagatctctacaatgataatta

SEQ ID NO: 94152 - DNA, 182552 bp, Homo sapiens
gggattacaggcgtgagccactgtgcccggcctatttatttattttttttgagacagagtcttgctctgtcatccaggctggactggcactatcttggctcactgcaacctccacctcccaggttcaagctattctctgcctcagtctcccaagtagctgggactagaggcatgcaccaccacacccagctgatttttgtattttttgtagagatggggttttgccatgttggccaggctggtctcgaactcctggcttcagtgatccacccacctcggccttccaaagtgctgggattacaggtgtgagccaccacacctggccagataaggagtattaaaaataagaaaatagacgactgtggtaataagtagtatttatcaagcagttaatagatgcaaagcactgtagtaaatgcataacatcatttcaatttgatgagtatcctgagttaggaactgttagtctgcttattcacaggtgaggaaaccaaggctggaggaaggggttaataatctgccctatctcctgactgtcagagctaagataaatttggatttcagagtgggttctcaccatcatgctcattattaggtatagctttaagctcatttaattgtgtaatttgactattttacaaacaaaattattgcttgtggtacattattttgtattttatcctgtatgaaataaagggcacttaaaattggctttcttgccgggtgcggtggctcacgcctgtaatcccagcactctgggaggctgagacgggcggatcacgaggtcaggagatcgagaccatcctggctaacatggtgaaaccccatctctaccaaaaaatacaaaaaaaattagccgggcgtggtggtgggtgcctgtagtcccagctactcaggaggctgaggcaggagaatggcatgaacccgggaggcggagcttgcagtgagtggagatcgtgccactgcactccagcctgggcgacagagcaagactctgtctcaaaaacaaaaaaaacaaacaaacaaaactggctttctcttcctgttttttttccaactctgcttccctgtccgtgatataaggtctttctgtcttgatccatcagtgacagagggctctcactaagaacagcgcaagggtcctctgatagtcatctctggaatgcagcttaaactgctaactagggaactggaacacctaaacactttaaatctcaagcaataattatacatattaatcacacggaaagctacgaataagccacaatctttgaagcacatctgaaaatgtaactagagtatttaaactgtgacccaagaaaatgtcactgctgaggatgtttcctggtggataaatgttaactcagagaaatatgacaccaaaatcccttgtctgcagtagccatgtgtatacttttttcttgtgtatactcttttctttgaaagggcgtctcgctctgtcacccaggatggagtacagtggcatgatctcagctcactgtagcctccacttcccaggttcaagtgattattgcccctcagcctcctgagtagctgggactacaggtgcgaaccaccatgcccggctaatttttgtatttttagtagagacggggtttcaccatgttggccaggctggccgtgaactcctgttctcaagtgatctgcctgcctcgcctcccagaagtgttgggattacaggtgtgaaccaccgcacctgcagtgtatactctttctgttttcctaagaggcagctactgcctcaggctttctcaccctcactgttctttcctctcagtccacgaccagcttcatgtaccccgccactccacacacaccaaactagtctacctctgatcatgatatctaatcagcataggtcttttcctcctctactggttgacaattgttctgacgatgcttctacttattattttagttctcctttagttccccagccagccatcatttgatagtcaatgtcttggtcttatcacgtggctagctcactagtagattcatgataagctcagctttgatatctgggaagtgaatgctttcatgtgagagcaatagactacattttgtcacttgataatggcctctcagatggctataatgtttttcttttcatttttttttgttttttgagatggagtcttgctgtgtcacccaggctggagtgcagtgttgggatcttggctcactgcaacctccgcctcctgggttcaagcaattctcctgcctcagcctcctgagtagctaggattatagacagctgctaccaaacccagctaatttttgtattttaatagagacggggtttcaccatattggccaggctggtctcgaactcctgaccttgtgatccacctgcctcggcctctcaaaagtgctgggattacaggcgtgagccactgtgcccggcctagaatgtttttattcacaggctacatcatgtcacactacagaatccaactcctgggctcaagtgatgctccgacctcagcctgtggagtagttgggactgcaggcctgtgacattgtgcctggcttccaaacttcttttttttgagacaggttttcactttctctcccaggctggaatgcagtggcatgatcatagctcactgcagcattgaccacctgggctcaggtgatcttcccacctcagcctcccagtagctgggacaacaggagcgtgccaccaggcctggctgattttgaaatttttttcgtagataaggggtttcacgatgttgcccagtctggtttcaaacacctgggctaaagtgatccaccctcctcagcctcccaaagtgctaggattacaggcattagctgtgacatccagccaaaaaaattcttccaaatatatgtgtatttgtccataaagtatagacatacgctaccatcattagcttaactcaatcaacatatacacttagaatgaagttcaattcttaataacagtggatgtaggctgggtgcagtggctcacgcctgtaatcccagcactttggggggtcgagtggggtggatcatttgaggtcaggagttcgagaccagcctggccaacatggtgaaaccccgtctctacttaaaatacaaaaattagccaggtgtacatgcctgtaatcccagctacttgggaggctgaggcagaaggattgcttgaacccgggaggtgaaggttgcagtgagtcgtttgcgccactgtactccagcctgggcgacaaagcgagactccatctcaaacaacaacaacaacaacaacaacaacaacaacaacaacaacaacagtggatgtaaatttacatttcaagtagccttgattttttttctagtcaaaatttgattgaatttattagattggtattttacttttgaaaagtggctgtcaaagatttgatactgggctgggtgtggtggctcatgcctgtaatcccagcactttgggagaccgaggcgggtggatcacaaggtcaggagtttgagaacagcctggccaacatggtgaaaccccgtctctactaaaaataccaaaaaaaaaaaaaaaaaaagaaaaaaaagatttgatactgaagagtcagttctaacattttcttcttgttctcccgtggtttatttgcaaaggactcatagagtcatttgtctgttttatgagggttagtttaattaaacttagataatataatcagtaagtccacttagttgaatccagaaactgcaataagaaaccgcaataagtcatatgttgtcaggggctgattgggtgggcccaccactgccaacccctaggaatgggtaactcccacttttccctgaggacatctcctatgctgttctaggccaaggcaccattccatggactgagggcagagccattcactctatataaaatagtagttgaccgtaatgccttttagattaaaattaaatgtaaatatatttcctaatactttcttttactgcatccgaaatagattgtcttgcactattcttggagtaccgaaatccctgggatacatgggagaaattactggtccagagaacaatttctcacataggcaaggatgtttccattttaaaaaacctgctcatttcagttgctcagccattttatagaaagtgaaatgactttgaaatgaattgtctttatagagatccataatttgcaagcaaaatccccactctatgacatgttctaagcaacagctgtgagaatttcaaacgtgcactatgcttttaacagttcaactgttgccaagggaaattgaattggcttcaaaatcttccttggttttaattctgaatttaccctcaatcaaagattgaagaaaacaggtccttggctgggacactgaactttcatgaagactgtacaggatattgagatatggaaaatttaaggttcttgagggtaggaactagactgctggtattctatagttcatacttagtggtgatgaactttatcacggcaaaagtgggcactagccatacagtggccaatcatctggagtcagtagggggagactgcttccatctaagagtcatcttttcgttttccatttcagttcaaagcasgaatatttttatctttcatggcacaaaattatttttccactcaagagccatttctgggagtgtgcaaagaaaatttcaaaactctagtgtttaacaacacaaacaggagaaatgcaaatgcatttttcgttgtcacttgtacatatggtacatatagttttatttatatatagctctattccctaaccgtatcgaaaagatgatataatgctgagggaaaaaactaggctacagatcgacacacattattaacataaagagaaaaaatactaaaaggaagtatgcaaatactgtaagtggttatctctgagttgagaaaataagaatgttaatttttttgtccccccccccaatttctaagttttgaacaactggtactctgacgtttgtagttagcattaataatttctttcttccttttttcctctcaaaaaatgtacgtagggtgcattcaaatacattaatccaagaatattatctggaaatgtaccatttggccgtctgcattcaccaagcatgcaaacacatctccaaatatctcatcacttgttctagatagatttaagtagtcttctccattaactctttcgggtccaacttgccaattaaaatctcgaaactcctagtttggagctgggtctttccgagctctgagcagtcggctgactggcgggttattctgaatgaatagactgcaaactgtggcgacagcgttcccacctgcattaattaaacgagcgctggcttcaacgctacaggggtctgatattcaaaacagacgtttaaggaaaaggagatgaggtgagagaaaattcgaagaaggttcagcggagagcgactgctgggggtttcaaggggcccatttacacaagcagtggcacaccggcacgggcgggggatcttattcctgcctacgcatcacagggtcccgtccagagtgggactccccaaaccctgaggggccacactagctgcagggcgggatcaagtctccggggctccccgacccttagacgacccgagcccttggaatcctccggtccaagacgaccgccgcccaaaggctccgcacagcacggaaagccagcccgctgatccgctagtcgcacacctcccggaattaaagagctcctctcaggcccagcggcttctcacttcagcttgccccacygccgggcggaagcggcggctgcaccgcccgagatcgcggctgcatccgggttcctcaagcttcggcccaatcctcgaccttctctcttyccaccctcccgtttctccgccctcctgccgccaatccctgatcaggtctcagccgaacatgctgtcaggggagtgaaggcggatactggccaatgaggcctcgcttcccgtttgaagtctccartgggcgggcgccrgaggcgggcgctgctggccagaaggttcggttgcgcgtgtgccatggactcagccgcccggtgatattgwcaataggagagagaaaggggcattgactgggacccaccgcgggtagcgaaaggtggctctggcagcggcggctccagctcctgcggctcctcctccttattctgtccccttctcttgctgccgctgcagatccagtcttcctccctcccttccccccctccccacgtcgtcrccgccgccgccgggtccggggcaasgagctgaggcgccgcccgccaggaatgtgagcgaggagccaccggcggagccgcaacggggtcggtgccgatttgatgggacgggcccgcgggggaggatcgtgaggccgccgccgccaccggaacgctgaggttcgggtccggccgtgaggcctagaggctccgccgccgcggaaccggagggaccccgtaccggacagccgtcgccccaggctccccgcagctgcccggacctccccctgcacgtcccggtcccgccgcccgcccccgctgcggccacctcgcccgtctcccgcccctccaagccacagatcatcttyggattcttccccagaagcttcaaggtaacttmgtccctccagcaccgcggctcgcccgcttcccttcttcctcccggtcctcctggggaacctatggggcaccggccttgggaaggcctggccgggcaggcgaggggtgcggtggggtggggtgcgggagcgggagcgcccgtcccacttgtctgatttacctrcaaatgcttctgatgatacctctcattcactctgccccctcccccctttttctccaccttctgggattggaggcgttttcttgcccccctttatccactggcgggggcggggaataaagaggggtttggtgtgaggaggattctctagcagcttatcgtctccagggcttggggtgtgggttaggagcaragggagtatgtaagcatccccacagacaaaccccttccctgtctttccctacttccccttaccccctttggattatcctgagccatggaaatgccccatgcctgctgattagaggatgataaagcttcgggagccstggcccagggcgaaacctgtttccctgggctttgcacggacccgctgttaccttacgttcagttttgcagtgcttcagggttgcgatccttgacgtttattctgggcctcgggcataaggggtaaatgatttttttaaaagctacctatatatcgtctgtagagatgagagataaggaataaagaagagacraaaagagtgatggaggaagaggatttactgaaatgttgtagtgttagagttagagtgaagtctaaataattcacatacccgaatggaaaatcggcccctaaatttacaaygtacaaataagatgtggagcttttggctgatgcagtcattttgatattttaaagtgatcttaacatctatagtcattcatagtttgtgattctattttgaatccatcacattatattaaggctaaattaggtagatttttaaaaacttttttttttttaaagaaaaccaaagaagacttccaaattccaaacgtcaacatcatatgtgtgcatgtgttttaaaatgtttttgttatttttacattgtcaaaatccacgtaatccasgtaactttttattctcacgtgttcaggaagaaattcccttactgttttatttagaagttaaaaaccacttgtcttgtctattggaatgacaggtgagtaattgcatttcagcatttcccccatatgcattctttctatccgagtctgccattagtcttgcatgaagcctcagtgccatggaaatgatggcatctgtttaatttggtgaatgaaattaagcttaacgcttgttactttcaggaaatagccttcattttaataactcgagagggttaaacaattcaaaagtgctattcagttccgtaagtttgatggaatgaaaattggtatttgatgatgaacttcaaggtctaaacctcaagggaactcaacttggttgtttcagtaggctgtgaatttatgttttcagttcaactttggtgcttgattttctcatagtttttattaagcgttaataacgtaaggtggcttcattcaaaaagaagacttatttgaaatattttaattatgccttttatgtgttttgtttaaagtaatctagcctgtcctcatttgcagtgtggtatagtttatcatagctaacatagcacatcccattaaaagttatgcctagatagtttcagtagtagtaaatttcaccttgctgtgatacattggtatagattcttgaagtacactaagggtttttcaactccagaacccattcataatattaagtatcttgggaaaatgtatcaatrgaagttttccagttacagaatagctccaaaaattacttgaagatgtgaagagctttgcagttagaaaatgggcaggcagcatagatttctttaagcctagatgagtatctttaatgcttataatggagtggcacaatacattagagttctcatattgtttccgtgatacttaaattattttcactaaattttcatgttttcctgttaacatatgacttttcttttctttgtttgtttcttttttttttttttgagaaggagttttcctcttgctgcccaggctggagtgcaatggcatgatcttggctcaccacaactccgcctcccgggttcaagtgattctcctgcctcagcctcccgagtagctgggattacaggcatgcgccaccatgcctggctaatttttgtatttttttttttttattagagatggggtttctccatgttggtcaggctggtctcgaactcccaacctgaagttatctgcccgccttgggattacgggtgtgtgccactgtgcctggctttttttttttttttttttgagatggactcttgctctgttgcccaggctggagtgcagtggtgccatcttggctcaccgcaacctccgcctcccaggttcaagcggttctmccttctcagcctcttgagtagctgagattacaggtgcatgccactgcgcctggctaatttttgtatttttagtagacacagggtttcaccatgttggccaggctagtctcgaactcctgacctcaagtgatccacccacctcggcctcccaaagtgctgggattacaggtgtgagccaccgggcccagccctttttttttttttttttaaaggacggaatctcactctgtcactcaggctggatggagtgcaatggcgggatcctggcccactgcaacctccacctcccaggttcaagcgattctttcacctcagcctcccgggtagctgagattacaagcacctgccatcatgcccggctaatttttgtaattttgtagagactgaatttcaccatgttgtccaggttggtcttgaactcctgacctcaagtgatccacccatctcagcctcccaaagtgctgggattacaggcgtgagccattgcacctggccaagataagacttttcttaactgattttattttctttagcacatattcccattttcatgaatattgtatatgggaattttagaatttgtataactcacatgtatgcttccaccttgggaatgtatgggtttatgatacttctttctcttcagtagggatatgtcctcagcaccaactactcctccatcagtggataaagtagacggattttctcggaagtccgtcagaaaagccagacagaagaggtcgcaaagttcctcacagtttaggtctcaaggcaagcctattgagttaacacctctgccgctgctaaaaggtaaggctcatgaccaggtgatgcattctttttcaattgatctttctacatctatatataatttcctttttgtagagttttatatgtgttgcaaattgaagggatgggatacttcacatacattgaagttactaatgtgtgaccaaatatacccactctcctttttaaaggctcaatttagtctgtctttgggcaagttaaaagaaacattatcaggagaatatctcacattgatgagtaggtaaactaagtactagagaaactttaagatgtctgggtttgtgtttttcattttttcttctgttgacgtttagggatacattatatacaatgacaactacagattatggtcttaggaagtagaccctagtagaggagatggtaccattcattaatttacatatagaaaatggtatttggaagaattcgtttttaaaaatcaagaaaaaaatggtccatttatagttgtttacatgcactcttgttttcacatagtacaagtagaaaagatatacctttctatgtacaagtatgatgatcatacttgtttagtatgatcttttctttgaaatttgttaattttttaattttaatttttatcttttgagatagagtctccctctgttgctcaggctggttcacagcaacctccacctcctgggttcaagtgattttcctgcctcagcttcccgagtagctgggagcacaggtgcccgccaccatgcccagctaatttttgtatttttaatagagacagggtttcaccatgttggtcaggctggtcttgaactcctgaccccaagtgatctgcccaccttgacctcccaaagtgctgggattacaggtgtgagccaccgtgcctggcctgaaatttgttaaaaacaagttttttggttttttaaattttcttttgagacaatctcatgctgtcactctggctagagttcagtggggacagagtgaaagtgcaggttgaggccgggcgtggtggctcacgcctgtaatcccagcactttgggagcccgaggcaggcagatcacgaggtcaggagtttgagaccagcctggccaacatggtgaaaccctgtctcttctaaaaatacaaaaattaggcgcggtggtggcacctgtaatcccagctactcgggaagccgaggcaggagaattgcttgaaccgggaggcagaggttgaagtgagcccagatcgtgccattgcattctagcctgggtgacagagcaagactctgtctcgggggaaaaaaaaaaaagaaagtgcaggttggggctcactgtggcctctatytcctaggctcaagtgatcctccctttcccgagtagccgggatcaacttcccgagtagctgggactacagaagcatgccatcacgcccagctaatttttccatttttttgtagagatggagttttgccatgttgcacaggctggtctcgaattgccatggtgttcccatgccaggatttaggcgtgagccaccatgcccggcccaacacgtttttaatatgaagaattttttctaaattaggcatttcaacttttgtttgggtatgtggttactttttgtcccttttaattttcatcatgtttgcttcatgtttatgaacaggtgttgtttgaaaaatatcagaacatagcttttatagtgtggaaactatcagaatttacctttgaggtggatgtttatgtgctgaatactgaagaatgggagaaaggggatatgaacaacacamtgagctttagtgkggcttggaggaaaccaggcaacctggtttgctagttcattattgcagacttatttctgtaacagtttgtgaaatcagaaggtattataagaaaaactggaatgtaaccggaaaagatcctcaaaatttagcttaggatatttcaagcttctattttttccatatgaatactttttttaaaaaagagagagagattcataaataagattccaatgtttatacaaaatttttggaaactgaatactgattactgtaaagatgatatatctaccagtcagtaaagatgagctcctgtgagctttgggggagaaaattttgactagagattttgctggtaaaaatgaaaatagtcattatgaggctttggaaagaaaatgtaggaaacactgtagattgaactatgcttgaaatacaaagttgggagacactggtttttagtaatctatttaatctgaagtagatatgtaatgggtgttaacttctgtatctgtaaaggacttcattctgaggaagccagttaaatttttttttttagaattagaaggaatttaaaaacttacactaatttcttggatcttatggtaaacaattaaattaggacttcactgaccactcatagtcagggtattggttttgtgggtagtgaaagaagcatgcatgagaagaatttggacacatgctttaatgtattttttctttaatgctttcatgtcttttttctcattttaaaaaattatggtaaaatatacataacatgaaatttaccatcttaaccatgtttaaatgtgcattaagtgccttgacattgtcatgcaactgtccctaccatccatctccagaaccttttcatcttccccaactgaagctctgtacctgttaaacactgactccctgtttcccccaccagcccttggcaaccgccattctgttttttgtttctatgaatttgactactctaggtacctcctataagtgatgccatgcaatatttgtctttttgtgactggcttatttcacttagtcaagtgtcttcagtgttcatctctgttgtagcaggtgtcagaatttcattcttttttaaggctgaataatttcagtgtatatacataccatatactttttaatccattaattcattggtggacacttgggttgcttccaccttcaggctattgtgaataatgctgctgtgaccatgatgtacagatacctgtttaagttctggctttcatttcttttgggtatgtacccagacgtgtaattgctggatcatatgttgaatttttcaggaattgccatacatattgccacagcaactggaccatttttcattcccattagcaatgcatgagggttccagttttctatatcctcaccatcactcattttctgctttttaattttttgatagtagtcattataataggtatgaagtggtatttcagtgtgatttttatttgcattgccctaatgattagtgatgttgagcatcttttcctgtgctttttggccatttctgtatcctttttctcacttttaaaagtgaagtctgctagtgttgccagttttccaagaactctgctttccaagaatgtgattttttgaacttgtatattttgccagtatgagagaattggagagtaacaggactatatactcacaaacctaattccagagtgactaacagtgattgttatgtagtaagcacattctgggtaaatactctggaaagtattctataaattagaaatccatctctgtctgtagaataacataaggaagtataatcagaaatagacttcagtaatgtgtatttgctcttgattttctaggaagtaatttatggaatataaagaaaatgtaggaggaatttcttttctaggattttattttttttggccattgccttaagagaaaccaggataaacactatatgcatgctaagggtagttattgatttaattttctatagtattgctttgactaaattgggttaattttatttggagtacaatataaaatatggttgaattttgtgagttgttttaaataatgaagtcaaagaggtgtccttaaggtctttaatttcaggggagtttgaatacgataattatacaaacagtgattatgtaactcatcttttaatatgtcatttttgaatgctcagatatgcattaataaccactcgttttgtgcatgcattatcagaatgtttattatatgcatcataatctttgatttataaataatactgcattaattcttagcgttttaaagtctgttcacttgcaaaactgcaacataatgtgaagggaaagtttttgttttgccctatttcttttttttttgagatggagttttgctcttgttgcccaggctggagtacagtggtgcgatctcagctcactgcaacctctgcctcttggttcaagtgattctcttgcctcaggctcctgagtagctgggattgcaggtgcccaccaccacaccaagctaatttttttgtatttttagtagagacgtgttgagaccagccaggctggtctcaaactcctgacctcaggtgatccacctgccttggcctcccaaagtgctgggattacaggcgtcagtcactgcgcccagcctattttgccctatgtctaataggtggggttttgaaatctgtatcactgatgttatttcctgtagaaagcaacaccacctgtaattctgtataaatctacctggtttttccgtatctgtgtgttaggaaattataggatgaactttgcaaagatagacatttacattttctccatctttatatgcttttgtgaaagtgttcttggagagccttaacatttttgaggctgggtatggtggctcacacctataatcccagcacatagggagacagagttgggaggctcgcttaagcccaagagtttgagaccagcctacgcaacatagtgagacctcatctgtacaaataatttaaaaaattagccagggtggtggtgtacacctgtggtcccagctacttgggaggctgaggcagaaggattgcccgagcccaggaggctgaggctgcagtgagctgtgattgttccactgtgtccagtgtggctgacagagtgagacctttgtctcaaaataaaaacatttttttctttgagtctaaaagattcttactcattcactgatagggaaaacctagtagaggtttagtgccttacttacttgataagaaagtaaaatcttgggggaggccgacagggggcgggtcatttgaggtcaagagtttgagaccagcctggccaacagggtaaaaccccatctctgctaaaaatccaaaaattcgtggatgtagtggtgtgcatctataatcccagctactcaggaggctgaggcaggagaatcacttgaccccgggaggtggaggttgcagtgagctcatattgtgccactataractctgtcttaaaaaaaaaaagaaagtcaagacttggatactttccttacacttacacagcaggacatgaagcaagccttgactgttatctaggtaagttgttgagtaagacagtcaaactaaacagttaggcaaacacacaaacacacacacaaatttatgttaataataatcagtggtagtagcacctggctgggtgatttatgttctctcctcaccccagcctcctgtgcctcatwtccttgcgttgactttaagcrattctgtaagtttagatttgggtgaacgttttctgaagaatactgcctctttgaagatggaattatagtgaaagtagcattgttatttcttttgtttgtttgtttttctgagacagagtctcgctctgtcacccaggctggagtgcagtggcgcaatctcggctcactgcaasctctgcctcccaggttcaagtgattctcctgcctcagcctgcggagagtagctgggattacaggtgtctgccaccacatccggctgatttttatatttttagtagagacggggtttctccatgttggccaggctggtctcgaactcctgaccacaggtgcgtccgcctgcctaggcctcccaaagtgctgggattcttggcatgagccaycgcgcccggccgccattgttatttcttgtctcacaattcattatacatttccgaggcattttgcagatagtttgtacattcacttttagatattcttacaactatgatgactagacggagtttagctcttgttgcccaggctggagtgtaatggtgcgatctcggctcaccacagcctctgccttccgggttcaagccattttcctgcctcagcctcccaagtagctgggattacaggcatgcgcctccatgcccggctaattttgtatttttagtagagatggggtttctccatgttggtcaggctggtcatgaactcctgacctcaggtgatctgcctgcctcggcttcccaaagtgctgggattacaggcgtgagccaccgtgcccggccgttttcgtgcctttttaatgattgcctttttcgtctatatctgctttgtgtatagtaaagtaggcacatgcaatataataccagatttttataacgagtgaatgtgctaaaacctattagaataagaatagtctcttaagaggccaggtacagtaaataactcacacctttaatcccagcactttggcaggtcgaggtgggaggattacttgagcccaggagttcaaggccagcctgtgcaacatagcaggcctgtctctaaaaaaaaatacaataaaaaattagctgggtgtggtggtacacacctgtagtcctaggtacttggaaggctgagggaggatagttcgagcccaggagatcgacgctgcagtgagctgtgattgtgccactgcacttgagcctgggcaacagagtgaaatgctgtctcaaaaaagaatagtcttttaaggaataatgtcatctattttagtggttactacactccatgtcgtgatacattgtcgcatgggttttgttggtcctcaagagtcctagcttaccactagctgggttgccttggacaaatgcgttaactgctgaaagctttggttttccttgtctgtaaaatgatgatgacrttaatagtcaatagatgtgacagtgccacattcagtaaatactagctgttgttatttaatgggggtttcaaaagttagaatatgaataatatgaaatttttatgacatattttactagtaaaaaggtggaaattggaaatttctmtgaaaattatgaagagcataattttgcagccacaaacgtttttcaaccaaaaatttcaaagaagcagtttttaaatatggtgaatttaatataatagctattctaaacatcttcacctggagagttgcatctactgcattagtatcttgccatgttatttagtgtaatgctttttatttttaatttattcattttttgaatagataatacagccatatggttcaaattccaaaggttacaaaaggaagtgtagtgaaaaatcttccttccatcccttctcctagtttcccttcccagaagcaaccagtcattatactcttgtatagtaggtatagagattcttaaatccttggttggatttaaaatgcaatgagcagcctaaaattatgtgaacattttgtatgtgtgtatctattttaaaaatggggaatcaatagggatttttcagattctcaaagggatatctgacttaaaacgggttaagatctattgatctagtttgtacctttgactratgatgtgtgttcttcaggcatctaagatttgtgtgtgtgtgtgtgttttgagatggaggttcgctcttgttgcccaggctggagtgcagtggccccatctcggctcagtgcaacctctgcctcccaggttcaagcaattctcctgcctcagcctcccaagtagctgggattacaggtgtgcgccaccacacccagttaattttgtatttttaatagagatggggtttcaccatgttggtcaggctggtcttgaactcttgacctcaagtgaccctcccactttggcctcccaaagtgctgggattacaggcatgagccaccgcacccggccgtgtgtgtgtgtgtttaaaaaataaccataagctttactttcgaactgaaagaacatctatatgttaatagatgttaaagttcagttttagaacctttgaaaaagtgtggtaataatttttttggggggaagcaattttaagatcttgcacaaaagcaagtgccaaactatgttatttttttttttctttttaattttattattattatactttaagttttagggtacatgtgcacaacgtgcaggtttgttacatatgtatacatcgcaaggacaaaaaaccaaacaccgcatgttctcactcataggtgggaattgaacaatgagaacacatggacactggaaggggaacatcatataccagggactgttgtggggtcggggggatgggggacrgatagcattaggagatatacctaatgttaaatgacgagttaatgggtgcagcacaccaacatggcacatgtatacatatgttatttttttctttctttctttttttgtgatgggagtttcgctcttgttgcccaggctggagcgcaatggcgctatcttggctctctgcaacctycgcctcccgagttcaggaaattctcctgtatttttatttatgaaagattgtacccagttgtaatgaagagataatttcattcacytttaggaaggaatatacattttttaatayatcctaatagtttgcttctgtagcataggtaaaattattgtacagagttttatgtgggccaaaagaaattggccaggcgcggtggctcacacctgtaatcccagcactttgggaggctgaggcgggtggatcacttgaggtcaggaatttgataccagccaggccaacatggtgaaaccccatctctactaaaaatacaaaaaaattagtcaggcgtggtgatgcgcacctgtaatcccagctacttgggagactgaggagaatcacttgaactgggaggcagaggttgcatcactgcactccagcctgggtgacagagtgagagtgtctcaaaaaaaaaaaaaaaaaaaaaaagaaattgagagtcagtgtacctgatatattcatcacttaaaagtaggatagaagcttgcattcatattcatcccattaagaactaattgcttaatcctggccaggtgttgtgacttatgcctgtaatcctagcactttgggaggccraggcgggcagatcacctgaggtcagaagtttgagaccagcctggccaacattgtgaaacctcgtctctattaaaaatacaaaaattagccaggcatggtggcacgcgcctgtagtcccagctactcgggaggctgaggcaggagaatcgcttgaatccgggaggcagaggttgcagtgagctgagatcacaccattgcacttgagcctgggcaacaagagcraaactccgtctcaaaaaaaaaaaaaaaaaaaaaacggaaaaatttcttaacttagggttcgtggatttctggttgggacagtgtatatctggatgggcttcagggtttctagaccctcctaaaattatatgtaaagtttctgtgtatgtgcattcttttttggaggagagaattgattgctttcatcagattctcaaagattcatcccttccattcacgttctctctctatagttaagagtttttggcttagactaaatgggaattgtgttgttactattttctgagtatcgtgttagctgctctgtgtgcacatatgcatctacccttaccataaaacactgtaagccataaacagcattcatcataatgtgcgtccgtccaggatgtaacctggatatttatatgcaatatttatatgcaagacagggcatataaatattgaagtgccaaatgaatgttctcataagatgaagtggtccttttctacctagaattttcttccccaacttcttatcattcaagttttagctccagtgggacctccttggggacttccttgatgactttagaaaacagtctttcggctgggcacagtggctcacgcctgtaatcccagcactttgggaggctgaggttggtggatcatgaggtcaggrgatcgagaccatcctggctaacacggtgaaaacccgtgtctactaaaaatacaagaaaaaaacaacaaaaaaaaactagccgggcgtggtagcaggtgcctgtagtcccagctactcggaaggctgaggcaggagaatggcgtgaccctgggaggtggtgcttgcagtgagccaagattgcgccactgcactccagcctgggcgacagagtgagactctgtctcaaaaaaaaaaaaaaaaagtctttgggctgggtgcggtggctcacgcctgtaatcccagcactttgggaggctgaggtgggcggatctatctcaaaaagaaaagaaaaaaaaatagtctttggctaggcaaggtggctcatgcctgtaatcccagcactttgggaggacgcaggaggatctccygaggccaggtgttcaagatcaacctgggcaacatagtgagacccctgttcctactagaaaattaaaaaattagctggaaatggtagcatgcacctgtgtcttggctacttgggaggccgagacaggaaggaggattgcttgctctaggtgacagcaagacccttgtctcttggaaaaaaaagtgtttgaagtttctattactctgttgtttcttataatctttaattattttatctttgtttgttcacttgtctgatatatctcccctcccccattaaaatatgatcttctgtgtagaaatcttgtttttcttatctctagggcttcgaacagtgccttgtacgtaattggcattcaataaatatttcttagtaaatgaacgaacatttttatttcacatttaggttgacttagttgactaataagtaataaaggcatttatttttccttcataaatatttaaacagtttattttttttttgcaaaacccaggccaattttagtttaaaaaaataaaattttaatgccaattttattttaacttataatttacacaaaatataaacttgtttaatgaaaactttttattttaaaaggatcacattgctgagtgttcaattaaaatcctgagtgggtttgtgctttggtaattctgcatgtttcaggttaaaaacataagtggtatattatatagagagaatggagtggattttatagacgaaaaacttagagtgattccttttactttgcaaattcatcactttcatttcacaaaagttaagacgttaagtccagtgaaatccctctgttctgcrtatttgaggactgattatagcctaatcagatcaccagactttatatagtttaagagagaatagcatatctgaatattataatggactttcagagcagagttttatgggcaaatgttctctgatttgtaaaacttacattttataatattggctcataatagtaattagattttgtagtgcttgaaaaagatcagtaaagtttctagatatttcgaataggctaaagtagttcttttgtttgcaagtgatgacatcctcttttaatacttaaaaatggtttctaccttttgtatttgaaggttttttttttgaaaacttatatggaatcttatttttatgttacagtagaattaagcatagtttccctcagtaagaatgtaggccctggggtcacacatacctgagtttgaattctgagtccaccattagaagccatttgactttttttttttttttcttacattgtcgcctgggctggagtgcagtgacgcgatctctgctcattgcaacctccacctcccgggttcaagcaattcttctgcctcagcctcctgagtagctgagattacaggcacccaccaccacgcccagctaagtttttgtatttttagtatagatggggttttgccatgttggccaggctggtcttgaactcctgaccgtgtgattcgcccgccttggcctctcaaagtgctgggattacaggcattgagccaccacacctggccaggagctgacttctaagccttggttttcttctctctaaaactgggagagtaatagaagccatatcatagagtcagattaaattccagaaggcaggtaaaacatttagcctagtgctagatacactgtatgagttgaagaatattaactactataattataggaaaaagtacacaatggcaaatgtttactaacgtcttttagttgatttttgttcctttaacacgttacatggattctttgcatttaaggaagaaaaatatggagtatatacagctgtgagaattatacttttaaagcaaaaaggagaaactagttcttatggaacaatctcagcattactgtttagttaatgtcagtttgagacagatttcttgtttctggaatcagaatttaaagtggctaatgtaattattttcaagggaaattccatttatggagcattaccaggtaaaattattattagataaactttctttttttttgagacggagtttccctcttgttgtccaggctggagagcaacggcttgatcttgactcactgcaacccccacctcctgggttcaagtgattctcctgcctcagcctcccgagtagctgggattacaggcatgtgccaccacaactgactaattttgtatttttagtagaaatggggtttcactgtgttggtcaggctggtcttgagctgccaacctcaggtgatccgcccgccttggcctcccagagtgctgggattacaggcgtgagccactgtgcccggcctaggtaaacttaatttggaagttgttaggctgggcgcagtagctcacacctgtaatcctacctagcactttgggaggctgaggtgggaggatcgcttgagcccaggagttcaagaccagcctgggaagcatggcaaaactctgtctctacaaaaaatagaaaaattagccaggtgtggaggcatgctcctgtcgtcccagctactctgcaggccaaggtgwgagaatcacctgattccgggaggtcaaggctgcagcagtgagccaagatcatgctgctgcactccagcttgggtgacagagtgagaccctgtctcaaaaagaaaaagagaaagagagaaagattgagagagagagagagaaagagaaagagagacagagagacagaaagagagaaagttgtttcccaggacaggatcttcaaatgtttttgtaattgcttacttctatcagagaatataacttcagcactcttgtatttgtcctgttacacaacattaaaacatatacaaacatagagatgtttaaaaaggatgatattgaaaaataagatatagagttctaatactttcgtgcctccatttcgcttgcccattccccagcacacacactggtctggaacacagctttgttttgatatttagattcaaagagagaactttctctttgggttttgagccatgttagttttgcagcattttattttgaaccagcgaaggacatgaagagggccaggcatggtggctcactcctgtaatcccagcactttgggaggctgaggcaggcagatcacttgaagtcaggagttcgagaccagcctggccaacatggtgtaaccccatctctactaaaaatacaaaaaaaattagccaggtgtggtggtaggtgcctgtaatctcagctacttgggaggctgaggcaggagaatctcttgaacccatgcggcggaggttgcagtgagctgagattgcaccactgcactccatcctgggtacagagcaaaactccatctcaaaaaaaagacaggaagaactgaatgagaaacttctttcttagtgtaccttcttgaggtctttgcataggcttttaagtttattgcaccttaaggaaacaaaatctgaattgaggattttaccagtttaaagagtatcacagatggctctttgttgatggctcttatcttgtggtcagtgggtgagttttagagggcccttgaccctcttgaaattccagggagtattttgtgtctctgtgcagactgacacttttccggacaaaggtagagctttcatcagattctcaaaggagtttctccaaaggctaggaacagttgctttgggtggttggcatgttttctcactcagagtggagacagaatttgtcatctctctctgtagaagggagctctcatgactagaggtttcttctcctgtatgtctttcctgatttttgattctttttgataccaaatagaattttaaaaggtatttgaagggagaagttactacatgactgtagtgtgtggttggctrgaaaattttgatctgcatcatttgaaaaattaagctgggtgaataggaataccagtgataaaattgagtgtgcctgtaaagaaacatttttctggaatggctgtggacctgggagaatttgggaggagaaagtcaggttgtttctgctggtaaagaaataggttagcaatcagttaagaagagatgtctgttggtttttcggtgtgccaggcaatgtaccacatggcgtctcatttaagctgcacgcccaataccaagaacaagcgatgtttgcttttaactgagggcaaagtaacttgcccactcgtgcagagagagccaggggtgggaccctaggcyggtctggctctaaagctggtaacttccttgttgtggccgttagtcataaatgtgtgcaggtgagaacagctaaccgcaatcttggtcatactgtgctggggtgatttactaagacgtttttgcaagtactctaaaaattacgaggagactgaaggtggtgagaaagcaaagcagagaagagaagaatgaggggagcagccaggcctgcagcagcactgtgggtggtgatggggagaggtgtggcaggccgtgggctctgggctcctcaagaaggctggccaggccggggagctgggcacaagacgtgtccctgggcccctgtgcaactcatgctgtgtcctggtgaaggcatgtcagtcatgtcagtcatggaatagtaaggaacagttcagtaaactggtagcattctggctgtggtgtccttgaacactcatccctccatctttggggaactcacttattgtaggaaagggtctgggttcaagtctaggtgataatcttagctttatgaactgaggtgagttatttaaacgtctttggaacttcagtctcccttttggtaaaacgagattcatgctgcccaaggtggttgtgaagagtaagtgaggcattgtgggtaaactgyctgaatagtggttggctgcttaataaatatgcgttccctcatctctctgtttgccatttatctttcttgaagtcagccctgtggacctggatcttgtttcagaatatgcagtgttgtgagagaagcaatctggcaaaagttcatccgttatgtaggcaccatgaaagacttttgtctcacagtgacgttaaattttaatttaattaattcagggctgcttgtgcctggaacactgttcaaagtaaaatgttaaaacattaaaaagaacatgtagcaaattgagacttggcaccatttcaggaaaaatactgtcttctaataagggagatacagacttgaattaaccttttactgaagtgcccccaggaaacaatatctggcaatagtagggcatactcctccaccatatcttatgaggaaatatagtgagaattcagagtaggttcaggctcctaagggctgtcttctactagcagtgtaggaatcacagctgttgtgtgccttacacattataagcacacaacactgtttttgattgaatgagtactttgaatgcaagaatatttatagcaaaggtgaagagtttttttgagggtaagaaggctacttttgatctttatctcatcaaattaattttttttttttttttagcgtgtaacctttgtttttttttttaatttatttatttttgatcattcttgggtgtttctcacagagggggatttggcagggtcacgggacaatagtggagggaaggtcagcagataaacaagtgaacaaaggtctctggttttcctaggcggaggaccctgcggccttccgcagtgtttgtgtccctgggtacttgagattagggagtggtgatgactcttaacgagcatgctgccttcaagcatctgtttaacaaagcacatcttgcaccgcccttaatccatttaaccttgagtggacacagcacatgtttcagagagcacagggttgggggtaaggtcacagatcaacaggatcccaaggcagaagaatttttcttagtacagaacaaaatgaaaagtctcccatgtctacctcctactacacaaacacggcaaccatccgatttctcactcttttccccacctctcaccactttctactccacaaaaccgccattgtcatcatggcccgttctcaatgagctgccgggcacacctcccagayggggtggtggccgggcagaggggctcctcacctcccagtaggggcrgccgggcagaggcgccccccacytcccggamggggckgctggccgggcggggggctgacccccccacctccctcccggacggggcggctggccgggcagaggggctccttacttcccagtaggggcggccgggcagaggcgcccctcacctcccggacggggcggctggccgggcagggggctgacccccccacctccctcccggacggggcggctggccgggtagagggctgaccccccsacctccctcccggacggggcggctggccgggcggggggctgaccccccccacctccctcctggacggggcggctggcctggcggtgggtgacccccacctccttcctggacggggtggctgccgggcggtgacgctcctcacttctcagacggggcggcttccgggcggaggggctcctcacttctcagacggggcggccgggcagagacgctcctctcctcccagayggggtcgcggccgggcagagacgctcctctcctcccagacggggtcgcggmcgggtagaggcgctcctcacatcccagacggggcggcggggcagaggcgctccccacatctcagacgatgggcggycgggcagagacgctcctcacttcctagatgggatggcggccgggaagaggcgtttctcacttcctagatgggatggcggccgggcagagacgctcctcactttccagactgggcagccaggcagaggggctcctcacgtcccagatgatgggcggccaggcagagacgctcctcacttcccagacggggtggcggccgggcagaggctgcaatctcggcactttgggaggccaaggcaggcggctgggaggtggaggttgtagcgagccgagatcacgccactgcactccagcctgggcaacattgagcactgagtgaaccagactccgtctgcaatcccggcacctcgggaggccgaggctggtggatcactcgcggttaggagctggagaccagcccggccaacacagcgaaaccccgtctccaccaaaaaaatacgaaaaccagtcaggcgtggcggcgcgtgcctgcaatcgcagcacttcggcaagctgaggcaggagaatcaggcagggaggttgcagtgagccgagatggcagcagtacagtccagcttcggctcggtatcagagggagaccgtggggagagggrgagggggagggggagggggagggcagcgtgtaacctttgtaacttcacttcagcctctggttgcacaacctcatcaaattaatttttcaggaagatagccatgcatcagaaggagtggtgttttcccccagtttgtgagcaaaaatcaaaaggactggaaagcagattgaaacaggggactttttaaagtagaagaaagtttcagtattccctgttctgtgaggtgttctatacatccatctgcacttgtctctccaactccacctacaactgatacaactaactgggctcttttttttgagactgagtcttgctctattcaccagactggagtgcagtggcgtgatctcagctcactgcaacctctgcctcctgggttcaagcgattctcctgcctcagcctcctgagtgggattaccggcatgtgccaccatgcctggctaatttttgtatttttagtagagacgggatttctccatgttggtcaggctggtcttgaactcctgaccttgtggtctgcccgcctccgcctcccaaagtgctgggattacaggcatgagccactgcgcccggccaactaactggtgtttttaatagtaacccgtcttctagaaataatgctcatttcactttaagaaagtttaaagatattttaatcaaaaacagtttagatgaagttctaaaacttatgttgaatagagctatattgtattatatttagatttatgtcttaacattttaaaaggcagttcaagtaactgggatttattttaactgtactggtttagtgagatgttctagaaatggtatatgctttagatactcttgggcttaggagtggtagactgtattcatactcttgaattatggcaagatttgaataaaatacattatatgcatgtgtttttctttttcttttttttgagacagagtctcactctgttgcccaggctggagtgcagtggcgcgatcttggctcactgcaagctctacctccctggttcacgccattctcctgtctcagcctcccaagcagctggaaccacaggcacctgctaccatgcccggctaattgtttttttttttttttttttttttttttgtatttttagtagagatgaggtttcaccatgttagccaggatggtctcaatctgctgacctcgtgatccacccgcctcggcctcccaaagtgctgggattacagatgtgagccactgcacctggccacgcatgtgtttttctaaatgtatatgaagcaaacagctatgaaaggagtccgcctaggacctggctaactcagtctcctccaagggccttaaattctcatttttatgattgttacagtgggctatgcagttcagtccatttattcattcattcaacacatttctgttgagccatatgatacaccagacactgttctgggaatacagtgatgagcataacaggattggtctctgatatttggagagatagatattaatcacctgaacagacaaagatagaattccaacaatggcaagtgcttttggagaaatagggtggccattcagggaaggtttctcagaggaagcgattatgctgagagaagaagacagggcaggcaggttgataaggttcttcttggctgggcgcggtggctcacacctgtaatcccagcactttgggaggcygaggcgggcggatcatgaggtcagaagatcgagaccatcctggctagcacggtgaaaccccatctctactaaaaatgcaaaaaattagccgggygtggtggcgggcgccagtagtcccagctactccagaggctgaggcgggagaatggcgtgaacccgggaggcggagtttgcagtgagctgagattgcgccactgcactccagcctgcgcgacagagcgagactccgtttcaaaaaatgttgtagctagagatcagagactggatgggctattaaggttttctggggccaaatcctcaagactgaattaagagtttgtccgtaggagctaggcgtggtggctcacacctgtaatcccagcactttgggaggccgaggcgggcggatcacgaggtcaggagttcgagaccagcctgatcaacatggtgaaaccccatctttactaaaaatacaaaaattagccggacatggtggcacatgcctgtaatcccagctactcgggaggctgaggcaggagaattgcttgaatccaggaagcggaagttgcagtaagccgagattgcgccgctgcactccagcctcggtaacagagcaactctgtctcaaaaaaaaaaaaagagagtttgtccttaggccaggcacggtggctcatgcctgtcatcccagcactttgagaggccgaggtgggtagatcacctgaggtcaggagttcgagacccccctggccaacacggtgaaaccctgtctccactaaaaatacaaaaaaaaaaaaaaaaaattagctgggcatggtggtgtgtgcctgtaatcgcagctactcggggggagaatcacttgaacccgggaggyagaggttgcattgagcagagatcgtaccactgcactccagcctgggtgacagaacaagactctgtctcaagagaaaaaaaaagagtttgtccttgatcccaagaacatttatacaccctcaaatatacaaccacagaatatataaatcacctctagatcccctacccagtcataaggaataatattttcccctcatgtttacgtatttttttctttttttttgagacggagtctcgctcttgttgcccagcctggagtgcaatggcacgatcttggctcactgcaacctctgcctcccaggttcaagcgattctcctgccycaccctcccaagtagctgggactacaggcatgtgccaccacgcctggctaattttgtatttttagtagagacggggtttctccatgttaggctggtctcgaactcccgacctsagatgatctgcctgtcttggcctcccaaagtgttgggattacaggcatgagccactgcgcccggcctcttttattttttttatttttttatttttaatttttttaagtgaaagcaagtttattaagaaagtaaaggaataaaagaatggctactctgtaggcagagcagcctgcatattcttatattatacttttatttttccatgtgattatttataataacattatgatggaagattactttgaggtagtcttattgttggagttggaattttaaaaagttctcttgtcatggtaacattgtgcttattgtattttatgatattgtggtttccatgcaaacaagtcacttcattgcttgccttttaaaaatattgctaatttacttttagaccataaaaatgaaatatacaacaaaaaaacatcaagtctcttaaagaaaaactgtraataaaatctgtgtgggcactgtggctcacccctgtaattacagtgatttgggaggctgagacgggaggatctcttgaggccaggagcttgagaccaacctgggcagcagagtgagatccctgtctctacagaagaaaaaaaaaattagcctggcatggtgatgtatacctgtagtcccagctactccagaggctaaggcaggaggatcccttgaacccaggagtttgaggctgcagttaaccatgattgcaccactgcactccagactgggtgacagagtgagaccaataaataaacaaacaaaaaaatctgggccaggaatgttggcttatgcttgtaatcccagtgctttgggagactgaggcaggaggattgcttaaggccaggagttcgaggctgcagtgagctgtgattgcatcgctgcaacacagcctgggtgacagagtgagatcctgtctctaaaaaataaaattaataaaataaaatctatctgtaggctcagctatatgttctrtggatgccactgtgttattaaagtacacaatcttaagtttttatgtgttttaattccctattttatgaactactgcttggaatagtggggaacataatgcaawagaattaattcattaagagaataaaagtttagaagattagatctagaattattgtcagtaccaactgaagttcattaaatgagaatgcaagcaacagtaaaaccgcagttaggtgaagcaattaacatcggtggtgttatggttactgtgaagactggaaaaataaataattgaaagtatttcaaatttgacaaatggaatgaagttaaaaattgaatccacctccttgtcactttctaattttaaattttcctgagctattataatttaaattattgagaattatctgcactgcattttgtgggtggtgaaaattgagtggagtgagtgcttttcagtaccagtgcttgaagcgaaactggatttgtgatggtttacgtaaggaagaaagcatcatccatgattatgtcagactctgacctgacagggtctaacaaaataaataaaggactgtggagtttggggtttttgatagtgcttaaatgaccactcttgtacctaaatagttaataaatttcaaagtgtttttagtcatttcatggctagtcaagacagtgtgcattcctgtgggcccaaatctatatttaatatcaaaatattcttggtgaaattatgtttcttcacagttttacttaatggaatattctttttcatttgtgtgttaatgtagggcactacacctacattacttgactaggaggatatcctatttttattttttattttttttaagcaaggctggtaataattatgtactgtcataacataatttcaccacctcagggtgtcatagttaacaattgatactcatttgtgcccacagatgcaaggatagttgaccagttctctgcctcttaaataatacatattttttgagtcataagacttgggtttcaagtggatcctataaagttgatctctttgtatgctacgtttagggaagtgagtgtttgtttttaaaaatctwtttagttcatccatagactaaattgtttaagcaaaacaatatatcactatatattatatattaggtttgctattgagctctaaaaagcattcagaaagaatttttgagtgaagtaatatttggaagctgtcaaagttagtacattactgaaccgaaggattagcctagccaaatatgagctgctttgctctatgacagatgtgaaagcattgtgttcacctgtcttcccagctggtgtgtgttgagatggggaggttggagattggggaattggatgtgtgtgatgatcttggtatcttgcctgtgaaacatcgggattggtggtggttgccaaatgtaggaaatacgttgatgatacgtggacagataggaaatcgctattaacctaacacctttcattcagtgggagcatctaaaagtcttctaaacaagatccaaagaagttgctaggagttttgtgaaagtatctttgcagcaggtggcttagaatatgaatttcatgttgtgttaaacattttttcttcatctgtgaacttttacttaaagctatttttatgaactgaaattatggatttgttgcacgcatgcaattttgattagcaatgaaacctatatttagtctttattcttagatttttttctttttcttcctcatgggaagttgtggttattacagtgtccaaaacactcatttctcattcttttctcaagataatgagggtcgtcattgacatgtcttcagtttctgttgagataagaaaatgtattcacccttgtggaattttcctttcataagtaatttaaataaaataagtggctatgccgggtgtggtggctcatgcctgtaatcccagcactttaggaggcggaggtgggcggatcacaaggtcaggagatcgagaccatcctggctaacayggtgaaagcccatctctactaaaaatacaaaaaactagccaggcgtggtggcgggcgcttatagtcccagctacttgggaggctgaggcaggaggatggcgtgaacctaggaggcagagcttgcagtgagccaagattgcaccactgcactccagcctgggcgacagagcaagactctgtctcaaaaaaaaaaaaaaaagtaaaataaaaataaaagaaaataagtgactatgactgggtacagtggctcacacctgtaatcccagcactttgggaggctgaggcaggtggatcacaaggtcaggagttcgagaccagcctggccaacatggtgaaaccccatttctactaaaaatacaaaaattagccaggcatggtggcaggcacctgtaatcccagctactygggaggctgaggcaggagaattgtttgaatccgggaggcggaggttgcagtgagccaagatcacaccagtctgggctacagagtgagactctgactcaaaaaaaaaaaaagtgtctgtgaatgataatgttcacaaaaacaacattatgtgtatttgaagtaggtatataatgagggaaaccaaggctccaagaaatcactgacagtgcagaattcaktaagtgtgattaaattggaatgtcagtcagaattgttttccaagttatcttcttgacttggtagatgctgaagtttctattctacctcgagttcttactttttattctaaataatttgaataattctcaaagactctgaagcgaaagcttcaatcagaggagggtatttcagttgtgtatactgtttgacttcaactttattgaagcttgagatagtgtcccgtatarttgtttattttctcccatctgttaacatttttgacatttatttttttcttcttttttcccctctctaagtagttttgcaggtgggcttgcttagggttgtacggaggtatggccaggtcagaaatacagaagtgrcatgggaagctagggagactgaagataaagacacagagatattgcatgttcagcagggtagagttatgaaaagagggataggtttgggagctaggcagaaatcttagaattttagtgaattttccttgtgagctgagtgactttggacagatgacctcacagcctctgtttgcttgtctgtaaagtggtgataatatcgtctaccttgcaggattcattttagaggtgatatatgtgaaatgcctagagtagcagctaacacatgataggcgcttggtaattgacagttgtcatgatatttccatctttgaggtcagggaaatggtcaatattccatgtccatttacgattgtattcttgctgtctaggatagtgccccctctcatcttcgctgcttagagtacctgctgagggaaaccctcctttcaggcaggaaaggaattctttgtgtatttaaaacagtgctgattcttactatagtatcgcttcttactcattactttttcttttctggtttgcatcttaaatattcttctagagagtctctctctctcttttttttttaatgaagagagtttttgtgtaatgtagtataataaacatagttttaaaggtagagatttatgattatggcttgctctggttagcaggaaaggtgttgctttggacagagcatagtctgtgaaagacccatgagtatcaaaggtggccaaatgctttgaaagactctgggcataaggttccttttctggttttattatcaatcttttcagttgtgactgagagctggcagtgtctggcatgtaggaggtgtggaataagtgtttattgaatgaataaatatgatattcagatataaagatttagtggggtctaaatttattgggtagtatttatttgattagatttggagagcggaaatagtatacaaacattaagtgacttttggtgcagtcttgacaataaaacaaactcagtttcctgtcatatctggggcttagactggacagacatttgctggttcacaagaattgctgctggcattaacctgrcactttgcagctctccttgaaatatgccgtagaaaacattgggctggagcccaggacctaaagagcatagtacctttgtgtctgggggatgtgcaagtggaagagtgagctgcgggagagagtgtgatattctagtcctttctcttaccctggcccctcttgccttatagggattcatatcagctcagaggccccagttctggctcatcacaattaatgaaagatragcgctatataagtttctcctctggtcttctgtgtagtttcccttccactcagatggacacccaggctctctttatttttgtttgatgtgtgttcaggaaatataaaaagcttattttaattctaactttaagtaaacaattagaaaggaaaatttctgtttgttgttgcaggaacccctccccacctctatcccctgcctcccaagctctacaatctgttcatttgtttttaatatgcaggaagtgaattttaggttctccatgtttttatcccttcattagtgtgtatarttaagaggtaacaggatttgatgtggttttccaaagttttatgtaacatgagaagcacacttagtgagtggttcatatttttgaaagattgtacagtatttgaggggagattttcttttaccggaacctcattttccaagttcttcattttgctgggcataatttgataagacttagtctatccttgtcctttttacttgagggmgatgcagtgtgtattttgaatacaccagtgcatgatcctgaggggcctttctttggtgagtgtatcttcagaaacagagataatcagtatccatcttcaggaattttctttcttcctgaagactcatttccacatgtcaagtataaactaggcctataaactctagtgagtggtttcatttaaccatccaaacagtttctatttcagttccaaaaaaggtaatttttcccccccagccattaaatagctggggttttttggttgttgttgttgttgttttcttggtgggggtaggggggtggagaatggggttttccactgctgctgttggttctctttggtgataggtgatgagatgtttcagaaatcaagccatcttcatactagttgtttaaaactcaatatataatactaatgttaggtttttacagagtttggaaagcttgtgacagaacatttataggtagggaggattctacttaatttatagaggtagcttggaagatatgttttagttttcaaaattacagtatgtgacaattaactttgttttaaaaaattttttattttttatattacattagttattataagtaacaacaagtaatttggaaaagagaaatggcctagaaggagatacgaggaaacttaacactggtcatctttggggaataggagtggaagttttcactttctatcttaacattaaaaaaattaattaaaaacagaagggtagttatgtgtctcaaatctgcctttccaattaatagaaagtaacaactactgagaagaaaaatgatatctataaacattggtgatcatcacattaagcctttgtatgatcacttacagagtctaccagagactttcaatacagcataaatgcttttactcttaagtattatttgtggtatgtatgtttgtccttctatccttccatccacccatcatctatctctacccatctatctgtatctgctaaggaagagaagtgcagcttggtttcttttctataaggaaagagcgtaactgttcctctatctagatgatcttgaaagagcatattatttttgatgtttggcaagagggtaaagtacttagtaattttcaaaaatggtgtgtgggacattgaaaagatacattgtattggtgtgaaatcttttattttcagtgttctgagattcytttttttttttttttttttttttttaccgcagagtctcgctctgtcgtccaggctggagtgcagtggcacaatctcagctcactgcaacctctgccttccaggttcaggtgattcttctgcctcagcctcctgactagctgggattacaggggtgcaccaccacgcccggctaattttttgtatcttagtagagatggggtttcaccatgttggccaggctggtctcaaactcctaacctcatgtgatccactcacctcggcctcccaaagtgctgggattacagacgtgagccatcacacccagctgagattcttatcttggtaattttttgcacagagaactcarctctctatcatactacattttaatgagctacacggtgatttatgacttgtgctctttccttttctaatcagctcatcaacaccatacccattctatgtcagtttactttagaattgaaattttgccttttatataatgctgttaggtggcttgcattcgatttgggggataaatagattttgaatcagcttttgctgctcaacaaaccactccaaaacttggtggcttaaaacaacaggcatttatttagttcaccattttgtggtttggcaatttaagctgggctcagctatgtgatggttstcttctcctctgagctcactcatgaacatcccgtcagatggatagtctcactcacatacatgacggttggcaagggctacagggatgcctgggctttgtgagtctcatcatccagcaggttagcctgggcttctccacatggtggcttgtggggttctctaaagcctggggttctccacttggtggcttctggggttctctaaagcagtaagagagggcaaatgcaaatgcttaacaacttttgaaatctctgcatcatgtttgctattgtcccattggccaaagtgagttacaagtccagctaaaattccaaggatggagaaagactacctctttgtgggaggagctataaaattatactgcagtggcatgaacacaaggagggaaagaatttgtggccatttctgcaatctgccataaatgtacttgggacttcycaccttggttcaatggatactgtctttattttgaaatatgtctagaatccaaccacttctcactatcttctctgcctcctttgctacttcctagtccaaaccactatcatcttttgcctcccaacaggttccctgctgcttccaccttttcacgtgtgttctacacagcagccagagcaagcttttaaaaacagaagtcggattatgtcactcctctgttcaaaaccttccactggcttctcatttcattcagaataaaatttagattactttctgaggttacaaaactttacatgatgtggctctttctttgacctcatcttaactcactgcttttagccacactccctccttgctgtttctcaaacacactaacaggccgtagggctttgcatttgtggttttctctaccggatactcagcgtgtctcctttctttacttctttaaggtctctgtttatatgtcaccttctcagagrggctgtcaatgatacactacataaaataacattcttgcttaccagtctctggcttgctgtattttattccttagcacttatcaccacytgacagttgtttattttctatccccttcagttagactgcatgctccatgagggcagtgaccttgagtattttgtttgctgtttatccccagtgcctagaacagtgcctggtgcagggtgtatgccacctaagcctcagcagaatcactgtccagtgacattcatcacctggtcttagtggtggctcttccctagaagtgaggtgaggtctgtgtcccattgttgttgggctggaggcagctggttttctcctattcgttgatgctcagctggaccggtgttgtgatatttaaggaaagtttcatcctatccctttttgccaacagaattttaatttgatgactttatggtcatttttctttataaatacccatcttcatggatttaaatatataatcattgtatgcttatggtttacataaatatgagtattcatatgtttgtttttttgaagagggtggcacatggagcaaacactttttacttaggcatggatgctcaggtagtggtgttgatgccttctttgtgtactcttgaaattcctgcaagctcccaaaccttattatactcagatctacgtaccaaattgcttaggtcccagtgggccagacttctgctgagcgttagctaactcagggatagagttgctgtccttcaagtataatttgtctctcagatggctttcccatagctgattctcaggctttgaatatgggttctgttagtccacaggcattgactccatttgcaggtgtgtgtttgtaacatatagtcaaacctctaacatttggaataatgagatgagatgagaatgagtaggaggaggggcagtctggtttagtgaaatatctgatgcacagaatatttaaaattaggcctggcacagcgactcacgaggcctgtaatcccagcactttgggaggccaaggcgggtggatcacttgaggtcaggagttcgaaaccagcctggccaacatggcaaaaccccttctctactaaaaatacaaaaattagctgggtgtggtggtgcgtatctgtaatcccagctacttgggaggccaaggcacgagaatcgcttgaacctggaggcagaagttgcagtgagctgagatcgcgccactgcactccagcctgggtgatagagcaagaccctgtttcaaaaaaaaaaaaaaaaaaaaaaaaaggatattttaaaataaaggtaattctatgatttttaaattatagcgcatgtcatagactaagatacaactggggtatgagtcccaaaagcaactgtaatggaaatatttgcagtctacacaggcctagagaagaagtgaaggattttaagcagcaaagtctgtgtaagagttatttgactcagactttgaaggctaaagaaccagataaatctaatttcttgaaacctttgatttgaaaaagttactgattttatattaatggacctgaagatgttcaggtgcagattaacttgtacttgattagaatcatattcttcaagtataaaatagaaattttgcagtggaaaagctgagacatgtgatttctctgcctggcttcttctggaccttaaggtaactttcactggagatgtctcccattccagaagtggaaatttatgttttgctgccccaaagctggttgaattagaaagctggaaagcaaagcaagagagagctttaaatatttagtggaaagagggtgctgataatgacagtcaggattgtgggtctcttctggactctggcttcttacgagaggaagggttaagaacatccccttttggggaagacaagctaggacttcagtccagttttgccatttactgttggagtgatcttagattaagttatttaatctctctatgcctcagtttccttggtggtaaaaaggggaatattgagagggctcataccttagagttgtaaggattcaatgcagtgatatatggaaaaggcttattgtagatgctcaggaaatgttagctaatatatakagaaggcatattttctgaagaattcaggaaaatgataccagaagggcttaaatgggcacccaggacacagttttatgtgccattgtggtccctatgaaactagcgaatatatgcagttgttttgtgagagtgacagaacaaagagtgacaggcagagggagggggttgccatagcattggggtaaacaagtgagccgcgtggtytagagaggaaagcatttgtgtgcatagtggctccaaagaggtgtgtgaggtgtgcgaggagggaagagcacacacttggtaatgaaggcctgagagctgcaggggctggaagagaacactcgtgtgtgtagaagtgtgtgtgggggtgggaaggagggtggagtgagggtttatgggcttggatcaggctattacattggatcccaaaggcattaggtgccactcaagctggatctctacaaaggggactcatacaaactgaggctccggaagaaaagagttctgtgggtttatgataaatccctagggtcaggcwtctcaaacttatctaatcaagtgcccctaggcataagagaattacccttgctggggccggttgcggtggctcacgcctgtaatcccagcactttgggaggccgaggtgggcggatcacaaggtcaggagatggagaccatcctggctaacatggtgaaaccccgtctctactaaaaaatacaaaaaattggccgagtggtggcgggcgcctgtagtcccagctacttggcaggctgaggcaggagaatggtgtgaacctgggaggcggagcttgcagtgagctgagatcacaccactgcactccagcctgggcgacagaacaagactccgtstcaaaaaaaaaaaaaaaaaaaaaagagaattacccttgctgcagttatttttaagtcttgttttttttttttactttaaaaattcagagatttttgcatttcataatctatttgtttcttttcgttctaaacgctggtatttttagtaaagttaatcgtaccaagggagaagtgccatgtttatctcatggcttctaaaaggaacccacactgcccttctgagattaatccaggagcaaggtaattaacagttatggtagttggatgccaggaaagagagaggtctttagaaggggccttgtactcacagcaggtaggcagttggtattccctcactgctgcttctaggcctttaaggccccatatcctttctgtaaggcaacttgtgagtttttgaaggcccactgatggtcctttagtgctcactacttacccaggctactgagatcctcccttgtgccccctgcagcagtggcctgggataggaggtaatgggtgcatttaatactcttgtcccaggctgggcaccgtggctcacacctgtaacctcagcactttgggaggctgaggtaggggatcacttgaggccagattctcaaggttcctccatgttgtcgcatgtgtcagcacttcattcctttttgtggctgaataatattccattgtgccacattttaaaaatccatttatcagttgatgaacatttgggttgtttctgctttttggctattatggataatgctgttatgaacattcatgtacaattttagtggacatactttcagttaccttgggtaaatattatacctgggagtgggattgctgggtcatttggtaactctgttttaactttctgagatattgccaaactgttttccacagcagctccaccattttatatccccaccaggaaggtatgagggatttaatttctctacatctttgccaacacgtattattttctctctttttgatgatagtcatcttattgggtgtgatttgcatttcctggatggctgatgatgttgaacatctttgcatgttcttactggccatttgtgtatcttctttggagaaatgtctattcaaatcctttgcctacttttggattatctttttgttattattattattacttttttcttttttgagacggagtcttgctctgtcgcccaggctggagtgcagtggcgcagtctcggctcactgcaaggtccgcctcccgggttcacgccattctcctgcctcagcctcctgagtagctgggactacaggcgcccgccaccatgcccggctaatttttttgtatttttagtagagacggggtttcagcrtgttagccaggatggtctccatctcctgaccttgtgatccacccgccgcggcctcccaaagtgctaggattacaggcttgagccactgcgcccggccaatctttttgttattaaggtgaagaattctttttatattctgggtataagtcccttatcaaatatatgatttgcaaatattttctcccatttagtgggttgccttttcttgatggtgccctttgaagcatgcaaatatttacatgctcagaaaatatttgtcaaagaatgaatgaaagaaacactaccttttattgaaagccttgcctgactttacacaacgttgtgatttygtctcttggatayctagggtgtatatattttttcatattgattataatactccccacattgctttgtaatttatttgtagtattttctccctcacccagtgataccttgggaggcaggtgctgtgtctactatgttcctaactgagtttctggtgtgggtaatagggtagtatgtgacggtcactgaatgttgcctgaatgaatgcatggatttctctgtggaactctgtcaagtgagaggggatgcagctggtccagattgttggtcttcaatttttatgaaccagcttagattcagattgtagagtgtgtgcagaaggctgtgattctccagcttgcagtccatactttatcaaggactgcttggaggcagacgagcttgaagaactcagcctccttgcatgggcttcttagtgtggagaaggggtggggagagcagagtgaatggcgaagtgttcagtgtgtgagcaggttgtcattattaatgtatcgtaatgaccatggtgtttatgggatttcttcaattttaaagtggtcattaccaaggttaattatcttcttaaccttagaggtgtaaagctgcttttggcatctttggaaacttcttttggagctaccagattagatggtcttagtatttatttatttatttgacagagtctcactctttcctccaggctggagtgcagtggcatgatcttgggtcattgcagcctcggctgctggggttcaagcaaacatgtccggctaatttttgtatttttagtagaggcagggtttcaccatgttggccaggctggtctkgaactcctgacctcawrtgatcygcctgyctcggcctcccaaagtactgggattacagacatgagccaccacgcccggccggtcttagtaatactttaagatttctttcagctctaagatttcataactcaaaactttgtcttcccaatgaaatctttcttgattactttagtccttaatgatccccatcttcttaacctaagtcatgcaagacatatttatgtgaacagcatggtatcattcattcattcagcaamcattgcattaggaacttggctagatgctggagtgacaaagatgaccaagacagcattttttttttaacagtgtttactgaacacatattttatgctatgccctgggggtaaagggtgactaagacgtgtaaggcacttgcattctacaggccattgcttttcatgggtataggttttctctccccagttagactgtaagccttgttttttgtatctcattcccccaaacatctaatacgatgagtaaatagtttctcaagcagtacttgattgacttctttttcctctttttttgaggtggagtctcactctgtcgccgaggctggagtacagtggtgagatctcagctcactgcaacctccgcctcctaggttcaagccattttcctgcctcagcctcccaagtagctgggactataggcgtgagccaccacgcctggctaatatttgtatttttagtagagatggggttttgccatgtttgccaggctggtcttgaactcctgacctgaagtgatcctcctgccttggcctcccaaagtgctgggattacaggtgtgagccaccgtgcctggccaattgacttcttgggtgggttttttttgtttttgtttttgctttttttttgattgccaagaaaagttttgcttgccaagaaaatgtgagaggtatttggaactttgaaatttataatctatacaatacgtacaggtcttgggcaagtggctactcaggtgttacggtggaaataatctatacctgtgcctgattcttgattgggaagaaaaatttggaagtagtttagagagtgattcaaaacttctcatattccctagctctwttaatctatttcatttctgaataatgaagtgatgtattcaaattttgcactcagaggacactggcrtgtgattttgggactgcatgcttaatcagaacttgaaagagtttttgttttgtttgctttgcttttaaaaccagggttctgcccttcttagtaaagcatattttggggcagggaggcatactgattgggattttttccaaatggttttcctcacatcttgccatcggaacctcttaaataagggctttcaaggcccccatgcaattctggtagtttcagtatacctaagagaagacaggttattaatgattttcagatgtgaaattcattaaactatatagtaaattaaagtgcttttggggaaggataatagtagggagtattgaaacagaacatctaaaacaactgtcttccttgcagtgttaacatgtgatataaatgtggtgttttttgcccttactgcttgccttatgttacctcctttgctctggaacagttgttttcagacttcagtgggcataggaatcacctgagaaattggttggagttgttgatttgctatcttttacctgggggatatgcagtccaggtggttcaaatgctttttgagcagactggatattgctttggcagtgtcatagtgcttgtttctaacctctacatagaggcctgttcctgcctgtcactccacaccccacgttcttcaatggcctcagtgcctttgctctattcattcctcctaagatggaaattcgtcttctgtctccttagggctcagctcaagaggaggccttcccaagaagctttgtctagtctagctcactctgatgatgcctttcccaaaatccctctgtacatacagtagttaaaaaaaaaatggctaactttccctgtttggctcttatagtatgtaattttttatttatggtctgtattgctcattggaccattcctgtatattgcactgctttactggttatctttcaaggttcccatgtgcaacttcagaggttgtgcagtgcataatattaatgtgctagtcctctgtctttgtatttttgtttctgagatgaggtttcttgctatgttgcccaggctggtctcaaactcctgggcacaagtgattttcctgccttggcctcgcaaagtgctgggattacaagtgtaagccattgcacccggcctagttattgactattactatatttcatgagctttcagacacctttttctgatagttttctactggtagatttgcttttataaaattttataaaatttcaacatggtaatatttatccttcctatagatggcatttgggtattgtggtgggagtgttttctttttcttttttatttttttgagatggagtcttgctctgtcacccagacttgagtgcagtggcatgatctcagctcactgcaacctctgcttcccaggttcaagcaattctcctgcctcagtctcccgagtagctgggattagaggcacacaccaccatgcctggctaatttttgtatttttaatagagatggggtttcaccaggctggtgtcgaactcctgacctcatgatttgcctgcctcggcctcctaaagttctgggattacaggcgtgagccactgcatcctggcaagtgggagtgttttcattatgccaccttctgtggggtcctcatggcaagtgaggtgttgagcaggatgaatcttgtcaccctcaggacttcgagaagggaagttaggggtgtcaggaggccgggcagcacctcctgcctctaagtctggtgccctctgcttcatgctatgtagatggttccatttaaaaaaacaacttccagctgggtgcagtggctcacatctgtaatcccaccactttgggagaccagggcaggtggatcacttgaggccagaaatttgagaccagcttggcctacatggtgaaaccgcatctcaactaaaaatacaaaaattagctgggcgtgatggtgcgtgcctataatcccagctactcgggaggccgagacagaagaattgcttgaaccttggaggtggaggctgcagtgagctgagatctcgccactgcactccagccaggctgacagaataaaaccgtgtctcaaaaaaataaaaaattaacaaaactctaatttttatttggaaataattttagacaaagtagcaaaaatagagaactcagattgcttcccctaatactggcaactaactgtcttttccaytttttattgctgagtatggttccgttttgaatatatgtcaccaccatattttttaacagctttattgagacataattcacgtactatacagttcactcatctaaagtgtgcaattcattagtttttagtatgttcacagagttgtataaccatcaccacaatctatttttagaacatttttatcacctcagaatgaaattctgtgcccattagcagtcactcctcattcctctcgctaccttctctctccagctgcaggcaatcactaatctactttaatcactaatctactttatgtatgtatctctggatttgcctattctggacatttgatgtaaaatttccaccatcattatatcttattaacattttcttttttttttttttttgagacggagtcttgctctgtcgcccaggctggagtgcagtggcactgtatcggctcactgcaagctccgcctcccgggttcacgccattctcctgcctcagcctcttgagtagctgggactacaggcgctcgccaccacgcccggctaatttttttttgtatttcttttagtagagatggagtttcactgtgttagccaggatagtctcgatctcctgacctggtgatctgcccgcctcggcctcccaaagtgctgggattacaggcatgagccactgcgcccggcccttattaacattttctatgcagatcctggctctccctcttacaagtgtctgactgtggacttgtcatttaatttgtctctaccttggtytcctgatttgtaaagtgggagataataatagtatgtagatgtagagttgtaagaattaaatgagttaacatgtggaaagcacttggctccaatttgtactctataaattttagctgctgttacgctaggatgtcatagtttttctttttctttttttttttagagatgcggtctcactctgtcacccaggctgattgtgtagtggtgcaatcatagcttgctgccaccttaaaatcccaggctcgagagatcctcctgcctcagcctcctgagtagttgggaccacagatgcaccaccatgcctggcaatttttaaaaattttcttgtagagacggcagtcttgctatattgcctatctatgttgctctattgtctcaaactcttggcctcaagagatcctcttgccgtggcctcccaaagcccgctgtgcccacccagggatctgtcatatttctaattggttcatttatggtcttccatattggtatttactgtttctgtgtcattaccagttaaccatacaagtatgtaacaattattcatatcagttttattattttgtcctaaatcctgagtttagaatttagtcaatgtaaacgatttcctgtcacaaagacttagctggtaaaaagaactgcagcatttggcattgtaagtatgcatcttcatttggcaccttggtgtatttatttgaatgagaggtgatgtacccatctgatttagttaaagtcaaaataaatctagggcgtcggtttctgaaaaccaagttttactttcattaaagtgaatttcaagaaaagttgcttttgaaactaattttttaaaaacacatttatttctcatagactttcaatatcaaaggggagacaatatgttcctataagaaaaattcatagtgcccaaaacatacccatcaccaccccctctatagatgggaaaactgctgaggtttaatttgagtgatgtgcaggatagttaaatgaagcttgagaaatacctgtttacaatagttacacattgtccaaataattttcagcataaataatgagtcaaatccagattaggatgtggcagagggattgtgaaataccagacaaaaaactggagatattgggctaggaaccagaagatctgggatcaggacttgctaccagtcagctgaatgacccggagcaagccacttaagttctttgggccagtttcctcatctgtaaaatgagacaactggactagaatagatggtctcttggggcttatccagagcaaaaattccttggtttctttcttttttttttttttctgagatagaatcccagtctctcttccaggctggagtgcagtggtgcgatctcagctcagtacaacctctgcctcccaggtccaagygattctcctgcttcagcctcccgagtagccgtgattacaggcacgcagtgccaccacgcctggctaatttttgcatttttagtagagacgggttttgccgtgttggccaggctggtctcgaactcctgacttcaggtgatccacccacctcggcctcccraagtgctgggattacaggtgtgagcccctgcacccagccttatttctcataataacaagatactaccaaatattgattaatttagagaaatctctaaatttgtgtttttgctgctctttttctcatccttattactgccatagcccttctagtttcacagtgaggtggctattttatgatttgtatttttacatttctgctgtcatatatatttttctctcttttaggcagctctgacctgtgatatgttcaaaaytgtattaaggttttagttacagatactctggttgggtagtggagctcaaaccaaaaccaaccttctctctttggtggtggaaatggaagctggcacattctgtgttccagtatgtcctggggcctttttatgagtagctgcatttcttaaaaattgcctgtgatgaagtaaacgtgcatatataaatgattttcatgactaattttgattttaaatttggaaatacagttttatagtgggaaaacattggtacctgacacacaataaattttcacttacgattcctaatatttactttaaagagccattctgcttgtaactaggcagttttatatttcatagtctctgccagtggtttctaattttgggccacgaatgctggagaggtatatgaagttgttataagggatttgattatccaaatgaacccctatctgcagactgatttgtactggtgttttcagatgtatatagggatttgtgactaatgaagaattatttaaggctggatcagtggttcatgcctgtgatcctagcactttgttaagccarggtgggaggattrcttgagcttggggargtcgcggctgcagtragccatgtttgtgccatctcgctccagcctgggtgacagagtgagaccctgtctgggaaaaaaaaaaattacttaaaagtacttcctgaattcataaaaatgttttgttattgtattttctttagtgatattaatgaagatccaagacacttaaaaacmttccaaaggttcatacacacaaaacttgaaaaacatccttttctaaaaccatgtcaagcaaagcatgatgtagacttaaaaagaaaaaaagaaaagaaaagaartgatgtcaagaggttagtgaartggacagagaggtcaacctgatagtatacatttgtttaaaagcatgcatatattttgtagtttcttttgtaagtagaacttagagaatttaagcaatctttgctttttcactgaataaaaaccacactgtttgtctttaggaccttaagtctcaagaaaaaaacaaacattttaaaaatccctcaagacttggttgatactacctgaaaaagctctctaaattacaaagaagagatattaagttcatttctgataagatggttagttttgttgactgaattgacatcatgctcaaaataagacataagctgtaggaactaaattcagttattgccagaagttcaccacataccaaatgtattattctaagtgaataagaaaatgagatttattgatattataatagaaatattgaacagtagagaagtgtgatgccaggtgatgccactaacgtgagtatgcttctggccattaaaggaggatgttgtatgacatcttgcattaatcattgatttacctttccactttctgcataaaccttgagcaggttcatgtgttttttgtgtttgtttttttttgtttgtttgtttktttttttgagatggagtctccctctgtcgcccaggctggagcacactggtacagtcttggctcactgcaacctctgcctcccagtttcaagcgattctcctgcctcagcctcctgaatagctgggattacaggcatgtgccaccatgtccggctaatttttgtgttttttgtagagacgggtttcaccatgttgaccaggctggtctygaactcctgacctcargtgatccacctctgcctcccaaagtgctagaattacaggggggagccactgcacctggccaggttcatgtgtttttatactcatttagttaccctgtatttttttagttatctttggagatggaagaggtgtggataatccagagatgatgcttgtagtcaagaaagagtaattgtggccttttgatggggagccaagttttatgaaatcccacggagtcagtcttcagatccagggttcttaattggctagagatcttgcaagttattttgccatgttgttttttgaagggaaaggaaatactgtcatacgtttatgcatctgtatataaaatggttagaaatggtatcatataggtattgyatgtttgtgatcataactgcctgaataaaggttaaaatgtcatgggaaaatgggaaaacttaagcaggaggaaatagagatagtttatttttagcaatttagaatgttccatttaaaagcagttaaactggctagagctgtgggcagggggaggggtactggggtggtttaaaggccatagctattatggtgagtgcctgacattttgatttgaagtgtgtctctgcctgtgtattttagaaccagaaaaattcttggaaaactacctttttttttttttaaactgtgtacccagataaaatagtttgttattccaaatctagaattgagattttaatttttattaatttttatttctgtcagtctttcaggcatttggcttctttgcttattcttttaagatttaagtcggagaagaaaaatcacatccattagttttgattactcagatcaataaattgaaaaggaaaattagaatcatttaaatttgactgcatatgatgagattctgctaaattaaactataaattacatgtttattaagcactttgtaaacacttattaaaacaatgttctaaattgaactatttccctctgtatatgttcttagttattgatgggttatggttcaagaggcgagctggatgaggtttcttaactctttgaggttggtttggcaaatttaattaagccttaagtggctcactcttttttttttttttttgagacagagtcttactctgttgcctgggctggagtgtagtggcgtgatcttggctcattgcaatctccgcctcccaggttcaagcgattcttgtgcctcagcctgtagagacagggttttactrtgttggccaggctggtctctaactgctgacctcaggtgatctgcctgccttggcctcccaaagtgctgggattacaggcatgagccactgtgcctggccaagtggctcactcttgagggctcaagcagtgttggaataatgttgctggataaacggtgaacaccaatacatcccagtgtatgatgcagaataatccacaaagcatgatttatagaagtagtgatatttaacaaaraaaatcttcaacacttaatatgtaaaatgaacagtgcaaattgtttttaagtcttggtcttgaaaaatactgtagatggcttaaccatatgcttggctgggcatggtggctcacgcctgtaatcccagcgcttatgaaaggctgaggcgggaggatcgcttgagcccaggagttgggaccagctcgggcaacatagggaaaccttgtctctacaaaaatcaaagaaactagcygggcaaggtggtacatgcctgttttctcagttacttgggaggctgaggcaggaggatcatttgcacgcaggaggttgaggctgcaatgagccatgattgcaccactgcactccagcctgggttacagagagagatcctctcttgaaaaaatgaacaaaaaaaccccaaaaatgcttgccaaaaaaaaagaaaagaaattagtatatattcttttagacttttttgtctacatatacatatatgtagacatgtttattttactttatttttttaaatggagccttgcactgtcacccaggctgaagtgcagtggcacaatttcagctcactgcaacctctgcctcccgggttcaagcagttctcctgcctcagcctccctagttgctgggattacaggtcaccacattgcccagctaatttttttttttttttttgtatttttagtagagatggggttttgccatgttggccaggctggtctttaactcctgacctcaagtggtctgcccgtctcagcctcccaaagtgctgggatttcaggcgtgaaccaccgtgcctggccagacatgtttatttttataaaaatagtactgtactctttctctctcactatatatatttttatgaatttttttgtgtgtgtgtctttgagacagagtctcactctgtcacccaggctggagtgcagtggcgcgttcttggctcactgcaacctcctcctcccgggttcaagtgattstcctgcctcagcctcccaagtagctgggattactggtgcatgcctctgggccagctaatttttgtatttttagtagatacggggtttcaccatgttagccaggctggtctccaactcctgacatccagtgatccgcctgcctcagccttccaaaatgctgggattacaggcatgagccaccatgcctggcctttttgtttttgctttttgttttttgagataaggtctggctctattgctcagcctggtgtgcagtggcgtgatcttggctcaytgcagcctccgccccctgggctcaagccatcctcccatctcagcctcccaagtagctaggtaactacaggcacgcaccaccatgcttggctagtttttgtattttttgtagagatgggattttgtcatgttgtccaggcatgtcttgaactggtgagctcaagtaatccacccacctcagcctcccaaaatgctgggattacaggcatgatccaccatgttggcctctgtgaatgtttcatttcctactgaaaagtttgtcatttttttttggttgtcttttttttttttttaaatggctgtacagccgggcgcggtggctcacgcttgtaatcccagcactttgggaggctaataggggcagatcacctgaagtcaggagttcaagaccaggctggccaacctggtaagactctgtctctactaaaaatacaaaaaattagccgagtgtggtggtacacacctgtaatcccagctactcaggaggctgaggcaggagaattgcttaaacccaggaggtagaggttgtagtgagctgagaatgtgtcactgccctccagcctgggcaacagagtgagactctgtctcataaatraataaataaataaatggcggtacagtcttctaaggtatgaataagtagttacttacttaagaccactttcttattgataacatctggagcatttttattttactgctgttgtaaacaacgctggtggggagctacttaagacatatctctgtgttcacataggggagtatgtctataggatacattcttaaaagtggaattctgggtaaaaaataaaagccttggtaggtgctgctaaattgctttagacgttgcgttttacatttctagtagagtatttgagaataccttcttcctacagtttaaacagttaaaatttaaagctataattttaaaaagaacaagtaacccgactttaggagttggaacatcatctgaatacttgaccatcattactggttaatcttatttttaaaagtttacaagctaaattagttagtgaggcagatagcatcacttccacagtgatttaagaatcctgtgtcatttgaagctcacctgtttaatattcctagagtacttcattatattgttatccttcatgtttagtaatatcagaaattttgtcagaaatatgtcttgccacatgtgcaaaactaacagcttgagtacagtttgtcacactggatacagtgtaagcagcctttatttagctgctgtcacaactgtttctggtgtttttgctctctaccaatgattctcacctaggggttcttttgctcccctccccctccccccaccacacacacgcacacacacacgcgcgcgcggtaatttggcaatgtctggagagacctggttgtgacacttgagagaggattgaagcgggaaagagtaaggacttgctactggcatctagtggcagacaggccagggatgctgctaaatattctatagttcacagaagagctgctcacaataaatagttatctgattagcttggcttggtggcaagtgcctgtagtcccagctacacaggaggcagaggcaggaggatcacttgagcccaggagtttggggttaaaaaaaaaaaacaacccaccaaaccaaaaaagagttatctgggcctgactatcaacagtgctttacacaaaggagttagggtgctctatcatacaactatctgatgattcttttgcttaaactgattctaccccatttcttatggctgcgtgccacactcacctttagtagatcagaattccttgcctagagcggctggctgctcttgactttgtgttgctgtttctagctttttcatgttttgctcagtggtagggacaggcaggccaatttagtagagcttgacaaagtgaagcctggtatcttctatgaggctataaacgttgtctaaagacgcaatttctggttctgataaggctcctggtaattcctggactggaagacttggctgtcattgttttgctgttaagtaccccttccactcaaatgcaaaagtaaaacacacacatgccaccatccttcccaaccaaaccaaaacaaaaaaattcaacaaacaaaaacaaaacacttgatgatcaaggagaacctatgataactcttcttattccacatttcaagtttgtacttgatctgtgccatcatacaagaaacccaactggtatgactgtcctgagtgcatttccagtgaagaggctgggagagtccaaaagaatgttttgagtcatcagatccttttaaaatgtcagattctttccatgggattaatttaaacctgttatgaccctttaaaaatttttataagaggcctcagagccataataacatggaatactgcttgtttagtagaagcctttctaaaggccacctttatatttggtttaattttttacattgtcaaccatcatgtaagagagaaacaggaatttttgagtccttaactgggaagaacagctgcttggtgcagaaagtctcatgaagtaagtctccttttgaataaaaaggaagatctcctattagaaaataaagcattattattttttcttcctttttcatgacaatttaggtttaggctaagcatattaggtatatataaagatgtaaaaaatcagtgtgcttttaagataaacctgtaattcttgttcagaggtagtaagctgtaggtcgggttattgaagaacagagaattattaggtttcttttgtgaacacagaaagtttctgggctcttccagggcctagggagtggaaagttttcccctttgtttcttgatgtgtttctttgtcccctttgtttcctttattgtcttactttagtgctccccaataaaaatatgataccacaaatgtaggacacatatgtaattttaaattttctagtagccagattttaaaaaagtgaaaaacagaagaaattgattaattaattaatttttttgagatggagtttcattcttgtcacccagactggagtgcaatggtgcaatctctgctcactgcaacctctgcctcccaggtttaagcgattctcctgccttagcctcctgagtagctgggactacaggtgcatgccaccatgcctggctaattttgtatttttagcagagacggggttttcccatgttggccaggctggtgtcgatctcctgacctcaggtgatctgcccaccttggcctcycaaagtgttgccattataggcatgagccaccgtgcccagtctgaaattaattttaataatatactttctttaactcagtatatctaaaatattatcatttcaacatgtaaccaatataaaaatgagctatttttagattctttttttcacactacatctttgaagtctcatgtgtattttatatttacagcatatctcaataaggactggtcatactgctttttttttwaaattatagattcagggagtccacgtacaggtttgttacatgaatatatcactctatgctgaggtttggtttcgaattgaacttgttatccaaatagtgaacatagtatccagtgggtagtttttcaacccttgccacctggcttcccccttctaaagtccccagtgtttattgttcgtatctttatgttcatgtgtacccaatgtttagctcctacttttaagtgaaaatatgcagcatttggctttctgttcctgtgttaattcagttaggataatgacctccagctgtattcacgttgcaaaggacgtgatttcattcttcttatgctgcatagtattccatggtgtatatgttcyacattttttttttttatccagtccactgttgaaggttgattccatatctttcctattgtgaatagtgctatgatgaacatgagagtgcaggtgtctttttggttgaacaaccatttatttttctttgggtatatatccggtaatggaattgctgggtcaaatggtaattctatttttagttctttgagaaatctccaaactgcttaacataggggctgaactaatttacaatcccatcatcagtgtatgagcgttcctttttctctgcaaccttgccaacatgttattttttgactttttaatagtactcattccgactggtgtgcgatggtatctcgttgtgattttgatttgcatttccctgatgattagtgatagtgagcattttttcataggcttgttgactgcttgtatgtcctcttttgagaagtgtttgctcatgtcctttgcccgctttttaatggggttgtttttttcttgttgatttgtttgagtttcttctagattctggatattagtccttcatcagatgtgtagtttgcagatattttctcccattctgtaggttgtctgtttactctgttgataatttctttcactgtgcggaagtgctttagtttaattaggttccacttgtcaacttttgattttattgcattccagaatgatatttcctacgttttattctagaatttttatagttttgagatcttacatttaagtccttaatccattttgagttaatttttgtatatggtgaaaggtgtaggggtcgagtttcgttctgcatatggttagccagttttcccagcaccatttattgactaggtaggactagtcatatttcccaagtgctcagtagttatatgtggctagtggctgctatattggttagcacaattttattcggcctagttcttctactctgcaagaattttactacttattagctagaggtcattcagacttaggtattcatatactaacatatacataaaatttaaggaaaaaaatatgtttatagttgcttacctcagctacttgtttttaagatactcaaaatatatcatgtttcagcattgtaggtaatgatataaattggcctggacttcattggatttgtggctgtgcgtgtgccagttttctagttccatgtattctttaaacatagataatgtagctgagaaaggcatcactcagagaaaaggaagatgacttgtacttgaattctgacataccatgatagaaacgttctaaatcttggtgtcatcaggaagcttgttgatacctaaaattaagaattttggtattggctgggcgcrgcagctcatgcctgtaattcctgcattttggaaggccagagggcagattgcttgaacttaggagttcaagaccagcctgggcaatgtggcaaaaccccatctctacaaaaaatacaaaaattggctggacatggtggtctgcaccggtagtcccagctacttgggaggctgaggtgggaggatcacttgagcctgggaggtcaaggctgcagtgagccatgatcgggccactgcactccagcctgggtgagagtgagactctgtctcaaaaaaaaaaaaagaaaacaacaacaacaacaacaaaaattatggtatttggtgaccaacattgagtatggggctatataaatccatgaagaagagttttgggacaaatagtttgtgttgagtgagggtatgtgagaggcagtggtacttgaaaagtgaattagcagttttctatgttcattttttactttccaaatcttctttggtgagcctatactatttttaaaatcagaaataaactacccccccaaattaatgcaaaaagtaattaaatcaaagcaagaacaaaaccaaaaatccaataccaccaatagtacacaaaagtaaagaggttcgaagacctggattctaattctggttctgtcgttaaccatctgtgtgattttggataagtcagttaacgcctctgggtttccatttcttcatctgtaaaaccagaaattaaagttgcttagattctttaggtctttttggtcatgtagttgggtaacacagttccatgatagctttcatgaaagtctttttgggaatttttaaatttatatttatatttatatttaattaaattaatttatttatttaagakggagtcttgctctgtcgcccagtctggagtacagtggtgcgatcttggctctctgtaacctctgcctcctgggttcaagcaattcccttgcctcagccttccgagtagctgggactacaggtatgcgccaccacgccaggctaatttttgtatttttagtagagatggggttttgccatgttggccacgctggtctcaaattcctgacttcaagtgatctgcccaactcagcctcccaaagtgctgggattacaggcatgacccacaatgcttggcccttttttgggaattttttagaaggaattatagagtctaggggattctcttaaaatcattcacacggctgggtacagtggctcacacctgcaatctcagcactttgggaggccraagtgggaggattgcttgatctcasgagtttgagactagtctgggcaacatagcaagaccctgtctctacaaaaagaataaaacaaaaattaggtaggcatggtggtgtgcgcctctagtcttagctatttgggaggctgagktgggaggattgcttggaccaaggattttgaggctgcagtgagcaatgattgtgccactgcactccaccctgggcaacagagcaaggccctgtytcaaaaaaaaaaaatcattcactgaaagaatatttattaaatgcctgstaagtagcaagcagtgccctttagcaggaaagcgtttggaagaaattgtcctaagtaggtgtgtgkgtgagatggggtggaaagaagcaaaaacatgagagcgaataatagaaataaaatatttatgtaatacagtataatgtaaaaggtgcttcccagttttgtgtctcatttcatgtcattttttattttggagacatgagggagaatataaggaagcagttgagaccatgtgaaagacaaataaagaagaggaagttactaaaaccttgatggtactgtaataaagcagttggagtcacctgagaaaagaatatttggactgaatctgagaggaaaattaagaaaaagtgattatgttgagatgatcaatgtgaggatggaatcctgaaattaagtgttgttgagttgtagaaataagaggaagtattctttgacagaggaaatacatagagcatacacgattgagattattactgggtttaaagatgttttgaaaggtgaaacactaatttgtatagaaaggactaaaattacaaatttgttaagaccctcaaaacatagatatacctctcaggcttatatagcagtctctgaatgcttttcagaaatcattagattgatttcgaaatgcctacatcgttggcattgaccccatccatttatccacacttttcacttcccttctttttaaccattctcaagcttctcctctccaaactattcacctgaagaagcaaaacatctgttggtgttactagcaacaatgtttaggagcattggagaaaaagacaagaggaatttaagaggggggggtggtaaattataatagttctaattccaaatctgatttcctactggactatatcacatttctcttattttatgtcttaacaacttgagctaatgtttattttcactttcaagtaatatgacattatggaaattgaggcaatgtgttaaaatactaggatactggttttgtgttacttttctcgacaaataactttctcagattcttcctaaggtaggaaatattcttgttagagggcctgagtatagatgtgggtttatggacagctgtattggaaatacattatttgttacagaagcatgtgggtttgagacagttcagctgtattcatgttatgtgctggtctcataggactacagggatgcaaatataattgtatataattcaagagggcagatatgattgcatcatgcagtcaaattaagtgctgtaagagagatgtgaatgaggggcccctgcagctcaaaggatgggagagatcacatcaggttcagggaatcagccaggaaagtcttcatgaaagaagtgtcatttgagagaaccctctaaggrtggttggagagaaaggctggagtggaaaggggccttcagagttaacagaccaggggttagacatgggattagctgagccacagactgggacttaaagtttatgcgggatggtggggaaaaaggaggcaggaaagcaggaacaggataggaaaggaaatgggagggtgggaaacagtggagtactgtggaccacatgtgttttgcagctttatattctggtataacccaaatgatggtattggtaaacacttgtgatgggattttgtatctagtgtgtatataatttagtatacatttcaaagtaagaatactggcctatatacataatagatatttatgtatgaatgtgtgtgtaacttataccagaaaagagtgctccttttgggatttgttagggaacctaccatttgtgcaaatgtttctacttgtgagcatcatgaagaaaaattgctccctggtagaaatgtttaaaggatgtgtgtgtgtgtgtgtgtgtgtgtgtgtgtgtgtaatggggaaagaaagatgggtggggtcgggggaggagaaatcaggagaggggaggagagaagtgggaattgggaaaagaggacctagaactttaaaatgggattagggtacattttttagaggaaatgcctttaggggacttcgccatcaaaaacgtttgttgtcggccagtgcagtggctcatgcctataatcccagcactttgggaggccgaggtgggcagatcacctgaaatcaggagtttgggaccagcctggccaacatggtgaaaccctgtctctactaaaaatacaaaaattagctgggcgtagtagcgcatgcctgtaatcccaactacttgggaggtggaggcaggaaaatcacttgaacctgggaggtagaggttacagtgagctgaggtcgtaccactgcactccagccctgggtgacagagggagactcagtatcaaaaaaaaaaaaaaaaaaaaagtttgtcagtatatgtacaatgacaaagataatagtgttaattcttatgaattactagaagtgaaaacacttgcagacttttatttttctctaccttaaaaaaatcatggctggctgggcgcggtgtctcatgcctgtaatctcagcactttgggaggccgaggcgggtggatcacctgaggttgggagttcgagaccagcctgaccaacatggagaaaccccgtctctactaaaaatacaaaattagccggacgtggtggcacatgcctgtaatcccagctactcgggaggccgaggcaggaaaatcgcttgaacctgggaggcagaggttgtggtgagccgagatcgtgctgttgcactycagcctgggcaacaagagtgaaactccgtctcaaaaaaaccccccaaaaaaygaacaaaaaaaacaaaccatggcttagtgcctgtagtcccagttactctggaggctgaggcaggaaaattgcttaaggccaagagttcgagacctgcttgagcaacatagtgagacctctgtctctaaaatacataaaataaaataaaatggaagagggtattcacatatcttaattcatattgttgccagtatgttttttttttttttttttttaaatgagtatagcagtagcagttcttttgtgaattagataacaggctaaacttctgtaaaagaaattgatgtttcttttggatagaacatttacttttgtgaaaacaatacaagtaaaaaagctgttgaaagaaatgactgttgaatttgaatatattaattgcttcagaggtgtttatttttcttttcttaaagtgctgaaaaactatttaattttaaaataagagtgctgttgcattgttccttaatacagaagtattgttgaaagtgcaacctctcaggaaagatgagcaaacttgttttttgtgggtagttctttgctgcttaggattcctgtaaatttacaagatactattggcttatgtgtttttattgtgaattactaaaatattaggccataaaaatcaaactttgtggtgccctgatagtgtttttgaacctctccatatcttttgctagcttaaggaaagtgtgaaggactttgaaaatatacctggcctagacttagaacttactgtgtctggccttcccaattttttcagtaggttcagaatacttctctttggtttgaattataattttgtttcttgtggttccaaaagttatctgtaatagcctcgttcttgtcattgcctcattcttaagaagttgctttttttgcttttgaatatttgtgggtgtttgacacagtgtatgcttaagacagatgaaaaaaatactaataatagtgttcatgtgagcaagttcattctgaaaaaggaaatgcttagaagtccttggtgttcttctttacacttgatacgattctttgtgtgtgtgtgtgtgtgtgtgtgtgtgtgtgtgtgtgtgagagagagagagaaagagaaagaaagagatcgatcatatccattctgatgccttcagtttcccctctcaggctttttagtctgtatctccaggctagaaaattttctccagtccagacttgtatttccagctactccttggtccggtccctttcacaggtttcctgcctttagggagtggccccatcatctctgttgtggcctgagcttcattgctttgggccctttatctttctgcttctaactccttgggagtttttttttttttggtggagtctcactctgtcaccaggctggagtgcagtggtgtgatctcggcttactgcaacctccgcctcaccagttcaagcgattctcctgcctcagcccccctgagtagctgggactataggcgcgcgccaccagtcccgtctactttttgtatttttagtagagacagggtttcaccatattggccaggctggtgtcgaactcctgacctcgtgatccacccgcctcggcctcccaaagtgctgggattacaggtgtgaaccaccatgcctggcctcgggagctttttgagtctgtgctgctctctccttcccccatctcggctctgctctttcctttcttcctattgtgggaatgtcaatacgtctctgtctctagcgtggcccctgtggacccacctttcatggagctgcctgcaggagctggtagtgtgctcccttggaccccacagcagaaaatggaagctctcggatctgaacctgcccagcttttctctagtggcgccctctttcctcctcccagttcatggggagctgcctgccgtgaatgcgctgtgtacgtgcacctctctgtgccctttctgcacgggctatttattctcttggctgggagagcccttcttcctcttgtgattctggccaaccccttctttttgctctctcaagagttggctcagatatcactacttctttgagggagaactaggtatctcctcctcattcccactgacagccttaatctcctatagtacttaccacactgatgtcataattaggcaaatatctatcttctttatgtctgcgagtgcattctgtttaaaactgtgaccccccctccccatgttcctttccttgctctgcttattttttctcttgcacttgtctgttttcaacatactgtatgattttttaaaaaaaattttatttatatttttaaagtacagatgagatcttgctatgttgcccaggctggtcttgaactcctgggctcaagcaatctgcctgcctcagcttcccaaagtcctaggatgacaggtgtgagccactgggcctggcctatattatgttcttatttctaatgtttattatctgtgcatcctgctagagtgtaaactccagcaggacagaaatctttgtcacttttgttcactgcggtattgtcggtacctagaacagtgtctgagccctagaaaatgctcaaaattatttgttcaaggaatgtgtacttgtatgttgagggcccagctcacagtaggccttgggtaaattaaactgatgatgaacaggttattctgttagattttctaggggctgtctgactatgccttgttttggtacttaaaagtaaatataattaaacactttttaagatttttatgcattcagataaaatgttttgttaacagtctggtttactgtatttattagtttcagatgtcggagtcagccagatgtgtttcatgccttctcatattacycccctttcttgcgtaaaccaaaccccaacaactaaataaataaagatttcaccaaaggtcatgttttcagaataccatctaaatagaggctaaaatcacgcgtgactcatggcaacagttttttkttgttgttgttgttttccaagacggagtcccactctgtcacccaggctggaatgcagtggtgcgatcttggctcactgcaacctctgcctcctgggttcaagcaattcttgtgcctcagcctcctgagtagctgagattacaagcacgcgccaccatgcccggctaattttgtatttttagtagagacggggtttcaccatgttggccaggctcgaactcctgacctcaggtgatctgcccacctcagcctctcaaagtgctgggattacagacatgagtcactgtgctcggcctccatgccaacagttttcaaacatttttgctcatataggcttgaaagaattttgtaaaacaatgtattttttgtattgattctgaaaagtttttttcctacatgtttacatagttgcataacgtgtaatttctaggatattttaaaatgttgacatttaataattaaactgttgcattacttttatatatgtatttaaaggtactggtggacagcaatttgtttcctaccatcatcttctaaaaaattgaatgaattctttaactgtttgttgaagttgtatttccattgtactcactccagaattttgtcagaataaaaaatatttttagactcgaaagtcttattaaccgataaccctctcatacttctcatactttaaaaatatatcattttaaaataaagaaagttaaaatgtcttgtgaccatgaggctgtgttaattcaattcagaagtaaacagaatttgtcattgccattatcacataattcaaactaatataaaggtattacattttgataaatgattgttaaaactattaaatagttattggaaatgtatctcaatgaaatgcataggactgtggctttttttaaattaaataaatgagctcttcatacatgggtgaatattgattattgccagaatggggatttagcatcaattttttttttttttttttttttttgagatggagtcttgctctatcgcccaggctggagtgcagtggtgcgatctcggctcactgcaacctccgccccctggattcaagcaattcccctgcctcaccctccctagtagctgggattacaggtgcacgctaccacgcccagctaatttttaaattttaagtagagacggagtttcagcatgttggccagctggtctcgaactcctgacctcaggtgattcacccgcctcggcctcccaaagtgttgggattacaggtgtgagccaccacacccggccaattctatttcatacttttcttttttattgtgatagagcactgacaaatcctaattatataaataagagataggaatgggaagtgttctgttattgcagcatcactcagtcccttgaactgtttctgagttatgtgtcaaaaatcaatctaccaccaaaaattatttttgatgacaattggttagatcctccttcagtattgttgaaagcagataaactactagatttgcaaaagaatttgttttccagttgctattttcttaacactcaaaccgaccctttgtttggtgacagggagggaagtgagctgtgctaaggtttgggatcagtgagcaggtgtgtttctccttttaatgtgagagaaggaagattttgaaagggaagctgaaaaagaagaatttgcagtgtcattgcagacaagatttcaggctggtggttttaggatgaaatacataaaaaaatggagtctggccaggcacagtggctcatgcctgtaatcccggcactttgagaggctgagaaaggaggatcgcttgagactaggagttcgagaccagcctgtgcaagaaagtgagtccctatgtctaccaaaaattgaaaaaatagcagggcatggtggcttgtgcctgtagtcccagcttcttgggaggttgaggtgggaggtttccttgagcccaggagttggaggctgcattgaactatgatcactctactgcacttcagcctgggtaacagagtaagaccccaactgttttttttgagacagggtctcgctctgttgcctagactggagtgcagtggtgtgatctcggttcactgcagcctctgcctcccagattcaagcaattctcccacctcagcctcccgagtagctgggattacaggcacaccaacacacctggctaatttttgtatttttagtagagacagagtttcaccatgttggccaggctggtcctgaactcctggcctcccatgatctaccctccttggcctcccaaagtgctgggattacaggcatgagccaccacacctggccgagaccccaactcttaagaaaaagaaaattgaggctgtggaaatgaatttccttaaaattatctgtggagtaagattggtaaaaggttggtaatttttgatcctgggtgatgagtatgtgaaggtttattatactgtcctttctacttttgagtatattttaatatttatattacaaaaaggaaaaacaaagcaaaaattctttgtggaaagttttactatgtatgcattcaaatttgagtagcgacctttggtgccttaacactgttagtctgagtgttaacaaaataaggcattcttttaggttgaaccagatgaaatttccaatatttgaccatcttgatgtataaaactggcacttgcatatggtttaacctaatcttttattgcatatattagttcttccctctccatcagtttcatttcactaactgggattcagtgagaatttttttttaggttctcccattctcagagatcatccttttcagttaagatttgttgaaaagaattttagtttgttgtcagtatggtgttaggtgctacatagactgagttaaacaggcagccacttcttacctttattgtactaaagacttaagttatgttttgttcagtgtctgttctaagtgtagacaaacaaaccagtcagttcatttagcaaggtgccaagtgaacggagctagaatatttagggacaggcaggtgaagctttcacctgaatagtacctgagaagttggctttatttattttttttactgtaaatgtgtgaggtagaaaaacaaggctgtccagcacgtggcagttctgaggatgatccttgaggggtgatgtctgcctccagtcttcgctgaggagaaaagcacccctcctcccccacccacagcaccatgggagagaggccctggaagttgactttatatagaagttaatcttccagagagctcagagtgtatctctgtgtgttttcatctttattatgaaatctgggaataacagactggagataggtattgttcttaatgatttttttctttctttctttttttgaaacagtctcactctgtcacccatgttggagtgcagtggcatgatctcagctcactgcaacctccttctcctgggttcaagcatttctcatgcctcagactcctgagtagctgggactacaggcgtccaccaccatacctggctaatttttttttggatttttagtacaagatgggggtttcaccatattggccaggctggtctcgaactcctggcctcaagtgatctgcctgcctcaggctcccaaagtgctgggattacaggcatgagccaccgtacccggccaatgatttctttattgagaaggagattggcatctagagaagttaagtgacttaatctcctctcagggtaagtcagcattggagccaggttctcatggtttctcagtgtgtacttcatatcctagattagtggttctcagagcatgctttggggatccccaaaggttcctgagaccttttcaggggtctgtgaggtcaaaactaattttatagtaatacttaagacattatatgtttttccctctcccatgaccgtgttttscagaatctgcattacctgtactgttgcaggaaattgaagcaaaagtgggttttgagaatccagttgctttctattaagccagatgttaaagagatgtataaaagtgtaaaatggtgccacttttctcactcatttttttgaggaaaatgtggtttaaagtagtttaaaaaatatttacaattgtattgaaatgaattaataaatattaaaaattttcccatttttaattttaatgtggtaaatattggtagatataatccatatttttaaaaagctctttgagatcctgagtaattgtgaaaccaaaagtttcaytgagacctctgggtttcagtttcaccgttctcaaaaagaggccagatgttaggttgcagaggaccacaagttgtcattcgatgtgtcccaagtcatttgaaaatagtctgttttcagttctacaggatagatatccacatcataaaaacctttattcaatttgcccttccttggtttcttatatgtagtttaagcaggtgaccaagtattaactgaagctatgtcatttttatttccccatttgaagtagaaaagcagcctcaagtgaatatttgaaggatctccaagctgaattgtttgtccatgttttgtgtaagagcaatatcagttggacttcattgtttctctcgtggatttttggatttgtagtttcagtatacatttaaaaattttatatatatatatttaaatttttttctcttaaaagaggtcatgctaatcttctctgtatcattccagttttagtatatatgctgctgaagtgatagcacttcagtgtacatttttattaagagctttttcagtaagatcctgtattgtatagataagagaaccttaaccttatggctgccttatacttttctttgaaaaggtttaaggaccttccttaaaatgagtatttgcatttatttggcaattaagttttataggcaatatatctaatttgtttttcccttttttttcttattccctcttctcctctccttcccatctcctttctccattactgctttttttctcttctcccctcccctcttttaattgccattatgaccttgggtgaaatacttagtctctatgtatcttggattctccatttgtaatgtgtgatgttgtgaaataatttctgtaaaccacatagaacattgcctggctgactatcaaggatcaataaatgttagctgcaatttttgttgttgttatcattaaagcaggttggcagttcctggaatgtattgagtactcaataaatggtggttatttatattatttaatattactacattgcacatttgcttttagatggtctattgagtttggctgaggcagatgtatagtaggtgtagtagtagtattatatgctgtcttaattttttaatgagaatggttttctttttttacgaaatgatgcagatgctgatactctatggctgtaatccaaatatttagtaggtattgtggcctttataagcctactcctgagaacagcccaytaattaaatgggaggtgtggagatttggtccttgtaaatcaccatttagaaatggagatgtattggattcatattttgtgtgtgtgtacgtttgtagtaaagtcataaaacagactctactactctacagtctaagtgcttcctcttgttcttagttttcagctgttagtggacactagtcaggtataataaagtagcttcttattcagttaagtttgtgttaaatatgtgatcctatctgtgaatgtcatgaataagtaatttatagatgattttatgattactaattgttaatggatctaaaggccttaaaaatctaaggatagaagaacagtgatcaccagcagtatagggttctctgtgctggtaatacatccatatagtagggcattgaatgcctaaaaactactaatcattgattgattaataaaactattagttgggtggacagtagagtctgatttagaagtcagagtatggtatgtgatatttgaactgattgagcagggatttgaagcctccttattaaaggatatgttattaataatataaactttagcggaaggaggagtggtctttttgtagcctataagatatgtacttgaatataatctctgttactgaaatatacttttgagcaaagcatttatctttggtgaatttgggtttttcaattgcaaagtgagtatcaaacctagccagcttagctcactgggttggtaggatcattaaatgaaataactcattttgatccagtgttgtgccttccatgagaacaacaacaacaacaaaaagcaaaagggggggaaaaagaagaagaaataatacattttgagaaagcttgaaaaactcgagcattatacaggtttaagttagcattcttcctactttcaaatgtgagggcattgtttgtggaatattctgactccagcttgtgttaatgcttttactttttttgttgttgtttaggtttatcaatgacagatagaagatttaagtatcataatcctctatttttatggccatgaattgaaatgaagaatgtatgtattcatgtttgaatatatagacatgcatacaatagcagtgctgttcatgacactgtagttaagcatttgtcagagtttccactgtaaacttccctttgaatgttttttcattttagcttggctttcctgtgggttaaaattatagggcctgaatatttttggatggaaactttttccttctttttaatagggcatgaatgcatgctatttaaaaaaactatcttatgttttttaatattttatcataaaagttttaaaagccacttctaggcagtgtttttctgtaaatcattaagtgtgttaaatgttgtgacttcatacctataaacagttcttctttgcctttgtagtttttcctccaaaaattgttagtcttcaatgtattatctaaatgaaagattataaataatttttgtaaactaattgtaatatataaaaaaacagtgatatattgaacatctggatatccatcccaagttaagaaaaagtaaactgcctagaatttataagcttccttagactttcatcactaaaagtgttcattggtctttgatttaagtatttgtaaagtgtgttggaaacaggccaggacttagactgcccctttatatccagacacccccttctaatggatgtcatgtggtaygtgtgttctggtttcacgtgacggattgggtgactccgtgacccaagatcatcccatctataggcaagatataatgtggcccagagcttctacccaacagagaagagagtgaaatgctgttccagcagaacctttctctagggaagtttgaatttgataaagagttgacgaaggcaggaatagatgctgaaagacccaagaaaaagaagcaaagaagtgataagccatgttgatagggcagggagggtgaggtgtgggttgatctgccttgatcatcgcttcactgaaattactcttgtcagggccacctgcatgtcacatgtctctcagcaacgttggacacttgtccacattttccttgtagaaacatactcttctttggcttctgtgaccctgctcaggttttccttttgcctctggctgtttcttctcattctcttagctggctcttcctcctctactcaacttgtaagtgttgggtttcttcagagctccttctgcttcactttctgcactcttgsygtaggtgagttcatccggcctattggctttaagaccacttatatattaccatttatatgttgttggtgtccacatttcttttcttcctttttttcccccaaatatgacatttcttttgcttttcttcttcttgtttttttttttttttttttttttttttgagatggggtatcactctattgcccaggctggagtacagtggtgcagttgtggttcactgcagcctcgacctccctgggctcaagccatcctcccatctcagcctcccgagtagctgggattataggagcacaccactgcgcccagctgaggtgcccacatttctatctccacctcactcttttcagactttggtcttgtatatacaatacatttccatgtatatgtcttataaacatctctaatgtaacacattgtcagtgtaacacttgatttcccccaccaaactatttcttccctcttttacttgctgactcctctgttcacccaggtgctcaaaccagacaacccggctcccacccactgaacgtggagaagtggggcaagtgccaagagtcacctttgatccctctctgtctgttagtcacttttcacctctgtattctccccccagagtagtttctatcagcaagcacaattgattctaccaattcttcttccagtaaattatctctaatttgtccactttgtctccaatccttcccacgattctgtaacagttgcctcctatgtagctgtagtctcctaactggtgtccctgtttcttatcttgcctcttttccattcattcaactcattgtgaccagagtgatctttttaacaatacaaatcatatgaatgtctctccctcaggttttaataatacaaaccatgtgctcactccaactttaatactgtcatgattctttactgaatccggaattaaatccaggttccttctctttacctttcactattttcttttcaccttggcttttctattgcaatttttctgacatcactaattagaatttaatgttaaagtcaaatgcatgtgggttaaaactcccaagtttctaaaaactttaagagacttgattttctctctccatgtcatccccttttcctgttactcttcttcatttaataaaatccacaccaaaaccaaattacaattagccctgtctcagcctcttgagtctgattgcatcagacatttctcagacttcctagagagctgttttggttgtttcattagcatttagaggcatttctttaaaattacggaaggttttactcttgtatatctttagtacactgttagcactgggaaatgtctcagagctttacttcttgtttttgcgggcacttcatcatcttggttctctgtcccttcctatcctgagttttctgcctcattgttgagttttctttagcttgtctctagctgccccatggttccatttttaaccttctgttcttcgttttccmcttactcagtcattgagcttatctgttcctttgatttcaactttcacctttatgggaaaactctggaatctctaccgtttaatttatagccccttgtttccagtyctatttcgagtctttttctcccttggagttacctcacattctgttgttgccactacagttcatgaacttccttgactaacttctctgtctgattgtttcatttttaccaacagtatcatcattcttccaacctggaaacattagtaatctttgactatctttcctttctgttatatctaatgtaatttaaaaaatccctttgtttcttaccttctggtatctcagcttctttttcttctattcttccacggccatcaacttcgtataagccctcataactcttcatacttggttctgatgacattgtttttggctaatttgattgcctcccttcagcccccgctaaaacacttctcattatgtttgctcctgtcccacatttctgtgttgtcagccacatgaaacccaggttaccctgcagtttgtaaagtcctttctggccaggtatgtcctcattcctccctctcatttcccactctttctagtcacctgtcttccatgccctagacatgcatatcttcttataatttctcccataatgtgctcactctcacctctgtgctgttcttgtctaaaatatcttccacctttcctttgtttattccttgttctattcatgcttcctttctgtcccatcactagctgaaagcaattcaacctaactggctttctaattgaccttaggctgtgctggtgataatacaggtttgaactctcagttagactccaaatcatatgcaagttcwacaaatgtcaggtgttcaaaacaaaatgaaacaaccaaacttctgtgtcattacattttcctgaacagtaaattaaatccaaacaaggttgaagtcttgaagtaagccagctttagtgcaaaggagaaggctggaaggttagagaagactttgaatcatcttttgagagacttaacactaatgtaaaggggtcctttattttatttttttttgagatggagattcactcttgtcacccaggctggagtgaaatggcgtgatctcagctcatttcaacctccgcctcctgggttcagccgattctcctgcctcagcctcctgagtagctgggattacaggcgcctgtcaccatgcccgattaatttttgtatttttggtagagatggggttttgccatgttggccaggttggccttgaacatctgactcaggtgatccacctgccttggcctccaacagtgctgggatgacaggcatgagtcactgtgcccagcctaagggggcttttaaatattaacagaaataacaggccagctggagaatctttctaacccttggtagttgcattttgcttggtacaaagaggagatagatgacagaatgcttgtcttcctcaatctatgttaaagagtctgttaggaagattaggaagattaacccttccagatggtccctccagtgtacgttgtagatattagatgaaaacaaaaatgatcagtagtgataagccagctctcattagtctttagcagaggtgggatagtgtacaggtgccagattgtggaggtctgaagctcagcagggccccctttccagctgtgtgatggtgggcaagttgctaaatatctttgggccaatttttatatgtaaaaataaggttggtaatacctacctcacagcattgtagaaaggattaaaggagttaatacatgtaaactccttataatagtgactgccacagagtaagtgcttactaagtttttactattattatgtatacatgatatgactgggaagggatgactcattcaagattttcagaaactatttattgtgaaacaggaaatggctctttagaatgcgtatctttttctaatacctgacctgtcttcagtgactcttgtttattttgggttattcattcattaattaacaagtgtattttgacattgcttatagtcaagatcctgaaagagtgtattgtctgtaggagatcatgatattttcaatagaggatagattctgaaaacttgtgagagttgtatgaatgaggttcttctggcccatctgggtctatgaacaatctatacataagacatctggttttatcagaaatttgaaacttacgcatttttatgtgtactctccattctcaaagagagcctggtgcgtgtttttgmagatttatgtaatatgagagtttctggaatctagatgaatgtcattcagagtggtctctcttgaacttgccccacttggcttttttcaaagaaatgttgtcatctgcatgctatgcttgctttggacttcagggtggggtaaaaaatggctcagaagctattgcttggtcacctttgtaatatcagggtgcattaatggtacaagcaagcaatgtagattgtcaaaatttcagaattagacattttatctttttattaggatgctgtaattttttttttttttttgtagagacggaggtctttctgtgttgatcttcccacctcaacctccaaaagtgttgggattataggtgtgagccattgtgctcagccacgtttttttttttttttaatctgttgataaaggcttgtttttatgatcctgtgaaagtagattaggtgtcaatagagtcttcagataatttgcttgttttatgctggaaattcctattaaaattatgcaattggatgaagccattttgttattgtcactatgaagtattttttaataatataaatatgttcttcctagagataaccccttaaccctttagtagacaggataatcaatcaccacattatcagagggcaagtcggtttttttttttttttaaacttatggaaaggttatgagtgcagagtgtgattgtggaatactgtgtgccttggggttggaactgggctataagtagggaggtaggaggctggatgcaggggctcacacttgtaatcccagcactttgggaggtccaggcggcaaggatcccttgagcctaggagttcaagaccaccctgggtaacatagtgaagcactgtctttacaaaaactacaaaaattagctaggtgtggtggtgcatgcctgtaatcccagccacttgggaggctgaaatgggaggattgcttcagccagggaggtcgaggctacagtgtgctgtgactgtgccactgcactctagcgtgggtgacagagtgagaccttgtctcaaaaaaagtggggggtgtggggaggtaggagatgaggaggacaaaaatcattgtttattctttataatcctactgccacatttatctgtccaaataaatggagaggaggaagtatttcattttggtgtaaaattatcccttctggttctttgtagtgaagttgtttttacacgttagccattgacccagaataataaaactgaatatcttgcagccttggttctcttacaggtaaaatgggaatattaacatgtattaggcaggaattttgtaagattttaatgggaggatataatgaaggacctaagctggaggtccatttccttgtcaggtgcttttttcttttctgtctctcaacttggtccatgaaattcagatactttacttgatttttttgaaacggagtcttgctctgtcgcccaggctggagtgcagtggcacgatctcggctcactgccagctccgcctcccgggttcacgccattctcctgcctcagcctcctgagtagctgggactacaggcgctcgccaccacgcctggctacttttttgtatttttttagtagagatgggttttcaccgtgttagccaggatggtcttgatctcctgacctcgtgatcagcccgcctcggcctcccaaagtgctgggattacaggcgtgagccaccgcgcccggccactttaattgtattttttgccattattaataggtgcaaatcttgcttccccctggactgtactttttttgagagtagatccatttgttttcattctttacaacatatgcccttataatatcttcttgtacctttttttgtaatgtaaaatgttttaacttttatatttatctatatggtcatttaattagggtttctctccatttggtctgtaagcttcatgaaggctaagaacatgaagtttggttttgcttaatagtgtatatttatagcctagactagtgcctggcatgtaaaaagtgttctgtaaatatttgtggaatgaatgaatgaatgattaagttaaacatggtagattctaaacaaattcgtgttgtgggaaggttgaaaccacctatcatatcccttccagacttagtctgaacccttctaggaggcaattaaaagtttgcaaaattttagttaagtccttagatctctaaataacagagtgtgtggggaaaagaaaggtttagagatactttgaagtggtttagtattttatgttattttagtgggaggttaatactgtttgttttgaatatgttgtaaagaactctaagtgtaagttactattattacttttagttagtatatataagtattaatatttgtgagtatgatactaatttaaaattttggctccaaggacaaagctgtcgaacattgcttgtttatttatttcctttgcacattttgcataaacctgattatatcagaagaagccttgatgtgtgagacccaagtggtrtccttgttttggcagtgctcatccagattgttgcagtcttcataaattctagcttctctgtcccagatgctctgtttgtcattcattcttccatccaaatgctaactctcttcacccttcaggaktttgacacgttgctgatgcatgtactgatagctgactcatctcacctattgagtcagcatcttacctttcctctaatcaagttacaactttattttgaagttatttcactgggtattatattagtaggtcaaggtcaatattattttcttcaaatatgcttacacaaccagacataccaaaaagggaggggagatctatatgtatcaacaatttatattgttcatttttgaaaaaaaagactggcattgtgtttcacacaatrcctagaatatggaaaatattcagtaaacattctgtgtcttaaacgctcgtgctatcactgtgacaaagctactgtttttaggctcattttgtaaaagatactaaggctcagcagtgctttttaacaacaacattaatttagcagttaaagtttattgagcaccaaatgtgtcccagatactcttctatgtgtttttatttttatgtactcacttaattcttaagtaaactctgtggggtaggtgctgttattataccctcatttatagatgaggaaactaagggctagagactcacctaagcttttccagctaggaagtggcaaagctgaccttggactccaggcagtctaactctgtagcccatcgtcttagctgtcacactatactgcccaaaattgcccagctggagcctgattggaacccaggtcccctgatttcaaagtctgtgtgtgtgtgaccccaaggacaacctcagccatctggaagaatgcagaatgggcttacatttctttttcaagttcccaattatgctgaaagaaatcgaattcatttgacatcttaaacgtttctgtgatgtttttccagaattataactgacagacttttgagatagtggacctagttgccgagcttagttttaactttattatacttattaaggtcaactcttatttctcatatgtggtctggctccttaagtggaagatagagttatataatatgttttctgaaagggaaartcattttcagtayaatctgaagagaaaatgtttgtactaccccatggcatgtttagctaaactctgggttacartattagacatagaatgctgaattatatcaaaattcagaaaaaggctgtgcttagaattgcactgtaagcatgcatatctttaggtttcagtgactgtcttacccttggagacggatgttttgtggctaggaaaccagcagcatagaaggaacatgttgtaaatagtgttttttttgtttgtttgtttgttttttttgagacggagtcttgctctgtcacccaggctggacagtggcaagatctcggctcactgcaagctccgcctcccaggtccatgccattctcctgcctcagcctcccgagtagctgggactacaggcgccygccaccacgcccggctaattttttgtatttttagtagagacggggtttcaccgtgttagccaggatggtctcgatctcctgacctcgtgatttgcctgccttggcctcccaaagtgctgggattacaggcgtgagccactgcacccggccaataatgtttttaaatacttttctgttctgaaagtgttaagcttcccagacacgttcgctgtcctttttaaactctctgcattactgttctccaagttttgattttggagtcatatactcaaaactgttcatacacacatacayacatacacatatgtatgtatacacatatgtatacacacatacatacgtaagtacacacttgtaagtttctccgtctttattgttttatgcttgaataattctgcttttatacacacgaggaaataaagctttgaaatgggtttcttgtctcttggcatggtatttcagatttgaattttggatttcctcaactgttctatgtggacttacatttgtatttaactatattaattaagtagtatcttttgtatgaagcatgggagagcttcacaattaggggactgtgtactacatgcctgtgtactacatgccatccctggattttactgctgagattatgactttaattataaatttacactctttattactcttgggattagaagctattccactgttctcagtcctgtgtcagtctcaggagcttaagctctcatactttaaaatcccaacagaggttcaaaaatagcatctctaagctggcattgcaacattggattgactcttgttgttgtttttttttttttgtatttttaaaactttttttttttaagtttcatgatgtctttgatcaactataaattatgaattaacagataagtgggctgttaaaatagctgcaggttcattttattctgaaacaattggtgttgatgttaatcttcaaaacaaatggaaaatacataggccattttatcccctttagaagtaatctcttggggaaggaccctcaattaactgaaatgcttgaaaataatgtctccttttattgccgtttttttggccgggttgtggggagggagggtcaattgaatgttacatgcttgctgaaaatctttaattccattaacttatttccttaccttataagcatggcgtaaataaaaaataatcttttttcttgaagatttttgtttctcatacttctgaacctgactgaaaattgggcttcagtgatgctgactctcaggcacatcctggaaatttgttccgtaattcctttttatcaaattaggattttatgatttgctccttgtcttaaaagacaagtgcagaagagaagttatggttatttgagagttctaaatagatggcctttgtttaattcaagtttggtattactagaataaaattttaacaaaaaattaatgtttctttaaaaaaaatttttttttgaaacagggtcttaccgtgtcaccgaggctggagcgcagtggtgcaatcacggctcacggcagcttctgcctcttgggctcaagccatcctctgacctcagcctcctaagtagctgagactacaggcctggctaatcttttgttagttgttgtttttttttttttttttttttttgtagaggtggagttttaccatgttgcccaggctggtctcgaactcttggactccagtgatcctcctgcctcagccttccaaagtgctgggattacgggcgtgagccaccatgcccggtcaaaaatttaatgtttctagaaatacttcagaataaaattaaaaaattgtttaaaactaattttgaaggtgtgccagaaatagcaaatataagtatttctgcacagaagatagttttaataagttatgaaataggaaattgattccatacagtatttatagatacttgataaatatttgtcaaacraatgatgacttttttgtggaaagcactttccaccctagaaatgatttttcatttaatctttactcaaccctgtgaagtacattttctttttcttttcttgtctttttttttttttcttcttcttgagacagagtctcactatgtcacccaggctggagtgcagtggcacaatttcggctcgttgcaacctctgcctcctgggtttgagcgattctcctgcctcagcctcccaaatagctggaactacagacacatgccaccacacctggctaatttttatatttttagtaaagacggggtttcaccatgttggccaggctggttttgaactcctgacctcaggtaatccgctcacctcggcctccccgaggtgctgggattacaggcatgagccaccgtgcctggccagagtatattttcttaattttacatgcaaggaaactaatgctcagagaagtaagtggcttgtccattgtcagtaaacagtaaaagtgtgattctaattcagaaccagattccaggccaaagtcctcaccgtgtttcacaagacccaagatgatcttctgcagccacttgtcctttcttcttctgtccttttcttccccactttccactccagctccagccacattcacttctttgctgatcatcagattcaccagcatgctccttcttcctgccacagtaccttgcacttgccatttctctccttgggacactcttccccagacagccttggctgactaccccacttccttcaagtatttgctcaaatgtcatcttccaggtgaatgctctgtttaacattgtacccttcaaccccagcgtgcctagtcccccttgccctgcacactattattccccatagcatacaccgtataacatgtttattatttttagtttctattatttgtctcttcctgctagaatgtaaagctcaggacttttgtctcctcttcattatgttatcacagtagtccctggctgttggtgggtgttcaatgaatatttggcggatcagtgaatgatagagtgagtgaatgaatagaggagcccattccctttgcactagaccttctcatttttcatttataaataataaatgacaaaattttcgggttattttgctatagagggcatttccaaattatgctacttaatgttgtatactcatcttcattttgaattttttccctatttttctcttatccttgaatataaaccattctgtttattttaaaaagtcaattcggccgggcgcgatggctcacgcctgtaatcccagcactttgggaggccgaggcaggcggatcacgaggtcaggagatccagaccatcctggcgaacacggtgaaaccccgtctctactaaaaatacaaaaaagtagccgggcatggtggcgggcgcctgtattcccagctactcgggaggctgaggcaggagaatggcatgaacccgggaggcggagcttgcagtgagccgagatcgtgccactgcactgcagcctgggtgacagagctagactccgtatcaaaaaaaaaaaaaagcgaattcgagttttaaataagttgwtaaaataaggcattaccttactggatattaatargggaacatagttcagggaactgaggaactaatgcatttttttttggttaggttctttcagataagctggctcttttcactccttcttatatttatacatattgggtcattaaaaactgtcttgcctgtaatcccagcactttgggaggccgaggtgggcgatcacgaggccaggagttcgataccatcctggccaacatggtgaaaccccgtctctactaaaagatacaaaaaattagctgggcgtggtggtgcgtgcctgtaatcccagctactcgggaggctgaggcaggagaatcacttgaacccagtaggcggaggttgcagtgagcagagattgtgccattgcctccagcctgggtgacagggcgagactctgcctaaaaacaaaaacaaaaacaaaaacaaaaaaaccatcttagtttttttttttttttttgagatggagttttgctcttgttgcccaggctggagtgcaatggcgccatctcagctcaccacaacctccgcctcccaggttccagcgattctcctgcctcagcctcccgggtagctgggattacaggcatgcgccaccacacctggctaattttgtatttttagtagagatagagtttctctatgttggtcaggctggtctcgaactcccgacctcaggtgatctgcccacctcggcctcccaaagtgctgggattacaggcatgagccactgtgcccagccataaaaccatcttacttttaaaatttgcatttcatgacttgatattattaatatactaggaaataatttattttattaaatacattatatcaagccttttcctctattctttagtctaattttatttctggaggaataaagttataatttaaaaatgaaaacatggggaaataagatgcaaatatgtagaatttacttactcaactaacattacgtacctactatattctaaaacttctgatacgaacagtttattaaaacgtgcaaggcaggtgtagtgctggttaaaaaaaaagttgcagtataatgtagcaagtgcttgaatggaggtatgtgcagtttcatgggaattttgtgttaagaattttaaggactgacatggctgctcttcctttacaattgcagaacgtatgatttatcttctcagcttttatgatgatctacagttgaaggctgggtgcactggctcacacctgtaatcctagcactttgggaggccgaggtgggcggatcatgaagtcaggagattgagaccatcctggctaacacggtgaaactccatctctactaaaaatacaaaaaattagccgggcaaggtggcaggtgcctgtagtcccagctactcgggaagctgaagcaggagaatggcgtgaacccaggaggcggagcttgcagtgagccgagattgcaccactgcacttcagcgtgggcaacagagcgagactccgtctaaaaaaaaaaaaaawrtacagttgaaatcggtactgtcattacagctagaattctgttgtccgtgcttctagaaaagtattggaagaaaggaataatatggctcagagatccccaaatacaggcccttggaaaagttgttggcagtactgggaaaagtgaaaaataagaagagaaaggaaggtcgagagagaatataccactctatgtgtgtatgtgtgcacatgcatgtgtgtgtgtgtgtatgtgtgaggggtaattgctaaccctcctttttatttttatttatatctttttgagacaaggtctcacactattatctagggtggagtacagtagcacgcttatagctcactgcagcctgggctgaagtgatcctcccacctcagcctcccaagtacctgggactacaggcacacgccaccaagcccagcaatttttttttttttttaaattttgtagagacgcgatctcgctgtgttgcctaggctagtctcaaacacctggcttttaaacgatcctcccaccttggcctcccaaagtgctgggattttgggtgggagccaacgtgcccagcaccaaccctccttttgaaaggaagtattgtcttttattctatgatcgttctttatcttcttttgttattataaaggtgctttatttttatgaaattatagtgaaaataaatggtggctatgtttttaatgcctttacctgaagaaaaattgacaaactgctttttttttttctgtaattttactggcacgtaacatcctcaaaagagggaaccactgaaatgcaaactgtagaatactgtatataattcttgcagctcttttttagtatagcctgtcaagctctaggaattcctcatattcaaaaggcctcggttctttccctcctggcattactgccctggaaataagcccttaggaaatgaattactaataaagacattgactttgtcagaacctttggtggcatctgtcctgtggtgagtttggtggcaggaaaataattaaacctctaatgaggagttgatcagttttaaaatattttttcatgtgttgacaagtttcagtaaccaacttggcattagaagataaagcatgagggataacatgcagtgttggaaacactgtgtcatttatcactgtgtgcatttatcactgtgtgtcatttatcagtgtgcatgtgtgtatgtgtgcgtgtgagtatattttctatttcttctgattagatcatagtgtcaaaataacacgaaagccctgaatcatgtaattttgctgcttgaagccatactagtttgtactagtggtggtgacctttggtttttatttgtaaattggagagcatattgttagcttttgggaaagggaaactggagagcttcatgacacaataataataaatacatgttcgttgtctcatttgggaagaataattaatatgttattattatctaaaacttaaacctacctgcctaaacttgttcactagcttaaggctgattttatactgttgtaagttttaaaacgtgaatatttgtatttaatagaaaagtcaaccaatttttcttttagactgcaacttctcttaaacaaataactaaccatagcaatggaagtatatgtacaactctaatgggggttagttgctgttatttagcatgatcatcaccattatcatcattgttattggtatgccccttccctcctccgcagcaagactgttggggcagtaagactactggggttcagatactagctgcagcccttccagtgtgtcatgttggacaaatgacttagcctttctgggtgtcagtttcctcatttgaaaaactgggatattaatagtggctacacctaagatattctgaggattaaaagggataatgtgtgtcaggagcttagtacagtgctttatggttgtaagtgttcatgattgttattgtctctattctttttacctggaaatttcagtcaatacccacaccttcatctcatccttttgacagtattctatctgtgctagtcattctatgacacgttttgaacctttaaaaaacgtgtatgctaataatcagcaaagtgtttctcaagctctctaacagattggcaagatttctaaaagcagccaactcgacattcacctattatagccaaggccaagaaagaacgctttcactgttgtaaatgtttccagggaccttccttagcttggaaactaaaagttttcactgctagctttaaataatggagagaaagaatttcaaaggaggaggggatgaaagaaggattttagagtgcttactttaaaaacggtggtttttaaccgtagtgacatactgaaatcactggagtcacttttataaaatacaaatgcttagcagtgaaatatcacatcaccaccaccaccaccatcaccaccatcatcaacaacaaacatctttgaactcacttctttgaatacaataataaagtaattggattggtcaagtatttaatgcttattttagttaacagattggttctgggttagttttttatttgcttatgtgcattgaaatatcctgtgtaatcaacatgttatatttggctccagttcataggacatgaagtctattatttgatttattataaaggcttatagttgtctcctcgttttgaggaaatattgttggttatatctgtgatttactggtgtcaaaagcaattcctgtaatggaagcttagttctactaataaaataggattatttctaggtttcttgaaatatgtgctatgaaaaggtagaggtaaaattgatagcaatgatttggacagactacatgggcaggtaattaggcattttaccgcatatgctagtgtacctagcttcagtctatcacggctcaatctgcttaataatgttttatttatgttaatgttttagtattaagcatctccttagaactatgagacacttagttttctgtaaatatagactcgtatgtcttatgcaagtaaaattctcagtgattttgttgaagtttatggagagttgcccgtgaaggacagagtatacatggatgaggatttgtacatcttaagagaaagttctgtgggatcagaggccatacttactattctcattgtgtgctggtcctattattttttgtgaaagttggagaaatagaagtaaaagggctaagtgagtaataccttaggacattttcaggtaaaaagtattgttaatttagaagaattttattttagatcttttgaatggaaatataaatataatttatagatattcattgaatgatattataaatattgttcattaggagctcaagcaatgttatagtttagcttccaatgcaaacatatgaacattttatagaaatacttattcactctatttccacatacatttcaatagtttatgtgtaaataatttgccagtccacattttctttattaacttattttttaaaagcaatttaccttatttttatgatatgatgggtaataaatataatgatgtaggcctcctttatttacttggctggcatatttgcaaatgtgaatttaacgttctgatttttaacaacttttgttgatcggagtcccagagtaccaaactcaagagactgggcacatattttatttcttctacccttgttactttttgctttgcaaagtgctgaatgaggcaggcctgaagaaaatgtgaggtgatattggatccatgattatgtgccccaaacattagatagggtggaatgatgraagtggactagtagggaagaatgagctacttctgcaaattgtaaacaaccttccctttaaatcatgattagggtgaggggagtgccccccagcaagagctaaactgtatatagatcctgttgacttctttagatacaaagagaatctttgtcttaatctgagattgcatcctcactctgtgttgagttttatgtccattttcccattgcatgtcacactcgtaaatttaaaaaatattcagatgtaatgaacaccttggaggtaggcgtagtcattttcccctgcttattgatgaaaattgataggtggatactggaagacggtgatataaagacataagggggagaatgactactgctaaaaagtaaagagaagtacagtgcagtgagaagtacagtttagctggtcattgcattcttttcttggtggagaaacatattctggaaaccaacttaaaattttaagaattcttctagagcagtggaatctgaccttatgggatcttaccaagctgtgataatgggwtcaattattctctcttttgaacacatacaaccttggatggaggagtcattgtgccagtgaccttcacggtattacataaccgcttattgattgctcattatttatggccrtgcttctgtgggatccctttcctgggagcagggatggcctctgctggccagaggttttcactggaagataggtgacggaagcatccactgcctggtctgctttgggattctaagatgacctttaattttcctaattcacatttatttcttaatgactgtaatttgtttttttcttcagtcttgacttctgaagtttttagatttccaggtgacttggattttggaggtgggtagctttgagttgttaaaatctagtgttactgtattgtggtcagaattcattgcctttatgatatgtttttgttttttatgagattctctttatggcttcttaagtgatccttttaataaatgtttatttaaaaagaatatttggatctacttcagggactgcttacatagacactaaacttttcttatatagtggaaaccttctggactactcagagattgttccttctctgatctctggcctgtcctgccttctcacattctaccttttcacatccacctgggactaggtagatgagagaggagattgggagcagtattagctatatgggacagtctgaggcccagacattatatgaagaacctcttgtttggactggtcatccttcaacatgtataaaactttcctaaattgttaccataaagggattgtctctttaagaacccccttttggttcatcttgactgtgcaagttttttaatttaatgaaggtaggtcattttagaaagaatttagtttatgataaaggacaaatcgcagcttttgctgtgttaattcttggtgcatgggctagaggggagatagagaaggggtttagcatgatgctttatgaatggagagtcatttgttcattttgtctgctttcttcctcctcttctgtgtttgcacacaccctgtgttctggaatagggtatcactctggtctttcactgtgtttcgtgttgcattgcacagtggtgaagggtccaggctttggagccaatccacttgggtttgaatcctgtctccactgcttattaactgtgtgactatgggcaagtcactgactctgtgttttggtttactcatttgttaagttagaaatagtacctactgcagaaggccattgaagggattaaaggagatataatatgtataagtgcttagataaagtgcccaataaatgtacccaatatattcaataaatgtaagttattatccttattccactggacaggtggatagcctgtttcacatttgtctatgacattatatcactttgcacaaataaaggataaatttcaactgcctaacattaaaaaataggactaagtgttaactgcctaaattttttgaactgctaagtatatgaatctcttgagtactattgcagtgaccacaaatgttaattgttgttgtcactgcttaaatgatgatgtactttaggaggaaagactacaattcatcgatgcttttataagttatatatgctatgttaaggagttcaacatgtagatagtctgatttttagactttattaaaatcactatatcaaatattgaattaattaaaatttccctaaagattttgacctgtaacgaatgttatattaataagctttttcttggccagggcggtggctcatgcctgtaatcccaacactttgggaggccgaggtgggcagatcacctgaggtcaggagtttgagaccagcctggccaacatggcaaaaccctgtctttactaaaaatacaaaaattagctgggtgtggtggtggatgcctgtaagcccagctactcagaaggctgaggcaggagaattgcttgaacaagacttcatctcaaactaaaaaaaaaaaagctttttcttgccccctttgcagcatcagtattcccattcggctgctaggtctggggtctgatttcgatctcgaaagattttagtaattaactgtgatggtcctgtgcatgaattagtcattggttaaggatatagtcatgctcataagcagccttatttcatttttatttatttattttaaacgcccaaagcaggtagcacttagagagtttggtctgactgaatttagttcttgtagtctaaggctaaatattgtaaaaccgattaaatccaggggggcataggataagacctatatcatgactgcaagacacattgtgcttttggggacctaggagtgatgggggaagggaaactcactggttaataatttctaaattcaatacttgtttttgctgagagtaggagtgatgctatacattcaaagatatggactgcttcttgttctctaatgtctggtagagaaagcctatgtatttaggtgtcctatccactctcatctaggtttacttaactggcagtgttttgccagaattgcctgtgaggtccgaggtagctatgctggcatttgggttgtggggtgtaaggtggggtagaaggttgtagagaggagcctggtgggtcctgtgaaaatgaggctggccttcacttcctgctgctggtggctgtaaggggggtgctgtatgctgttgccctcctctccagggagcaggcagcccaagccaggaggccattgtaaagcatttaccagaaggctggcaactgaggatgactgcaagtgactacacactgttaaggtccttcttgcttagtacaaaaggaacatgggagtgtggttagagacctgggcactttgcccagctctgtaacccattccctgtgggacctcaatgattgtctctattttgtgtgtgtgtgaaaaatggagaagaataatgccacctgcttctttctaaggatgttctgaggattaatgagctaatcaccttggatgaaggcagtagagcctaccctggttataattttcattgcttctccagggaagctccagtttgggggaatgaaatattggaaagaagataggaggggataggctgtctacagcttagtcggtatatttgaagtccaactgtagatcaggctcctttctagctgaggaatttcaactaacctaaaatttctacatattttttagaaacaacgccaagccaaatgtctgacctgctgtttgcgggaaaagagcagatgtccattctgggaacatattaatataagatgttagtggttttctctcacagtacaagaagatgggtaaaaagagaatgtagatttatatggcatttactcttattttcttattrctggtgtgctctttttgagagagttggtattgtttcatttagtagatttttcaggtttctttcagaaagaaacttcatacagatcaagccaaaacaaaacaaaaaaatataaacacacaacaatagctttaaataccaaggatgtcagcatgaaattaaaataaatcaactgacatttctgctttgaaattttttagtaaaactaatttaaaccacagcgaaagctttcttataagggaaagtttgacctttttcagtgtttttaatttaaaggtattgacattggggtgtttttggttaaaatttgcttcaaccttctaaagtcttttgggattttggtcaatccttggttgtggaatagcaaatacagtcaattttgttggtacaatgtagttttcaaagacaaggtctctgaagtagtagatacggtatcccctcccacccatgtgtaactgtgaaaaagaacactgttgtcatgtgaattcttatttttttttagcttgcctttgaagtaactttcacagagaattcctgttacctggaaattgatgacagacttacaccatttcctttttttttcttagacgttccatcctcagagcagcctgaactgttcctaaagaaacttcagcagtgctgtgtcatttttgacttcatggacacgctatctgatcttaaaatgaaagaatacaagcgctccactcttaatgaactggtggactacattacaataagcagaggctgtttgacagagcagacttaccctgaagtagttagaatggtgagtttctttttttctccgcggacacttttaagcatcttccatagtgactcacaggtgtatatattgcaagagtgaggtcattggaggtcaactccacaaatgagagccaacctttggagagctaagcaaatgtagtcggcacagtgctagaatttgaagagcatgatttcatgagaacgaaatccagaactttaactacgacagtgctgaagcaataaatgacttcaaaatatgaagccaagattgccagggtattactggatttctagctttggcaaaagaaaagacacaggaaaataacaaaagtcttagatccgtgtttgaaaaatattcaagcctgttggatgtcttttttttttttaatcttattcattgtggtatattagaaatggcttaatgcttaataaaattgtgatttgtagaatgtagttaaggcctctcttgggctttataactaacgcttctctttataatctccttgaagtcagggttgataccttttatgatttttgaatagtgtcttagattttgtgtggtcattaggagttatgaggaaaaacattattaacataatgtgagtaattacattcttactgtgtgaacaattattttagtttttcaaaagctgagccaaaatgtggttttctgatagatttctgtgggagagttgcctttcttggcatcccagaagatcttggagctggagagtgcacgctatttggggatgggctttgcagggtggggaagctggtctactgactggtgaaatagcctcagagatccttaaggtcagtgcatcgttgaggagtccattgcaggatctggcacactctctgtgtactgcggaacatctgcctggcttttgtatttagttctttatcatttgtattcaaccaatgcagaaaagagacttttgtgatggagtagatatgtttaaaaatgatagttcagatttgcaaaggcacttgaatgatctcagcgtgagactgtgactgaaataatgaaggtcatctgaaaacgatgcccaatatattcctcagttctatatctgaatgtatattggatttgttgttaatttacaggaatgtagcactagaatgttttgtaggttaaagatgaccgtgtggctcttgagcagtgcttctcaaccaggtgtgattttaccttacaggggacatttgtcagtgtctagagacatttttggtagtcacaactagatgtgagaggagagtactaccagcatctagtgggagaggccagagatactgctaaacattttacaatgtaccgggtggcccccacaataaagaattatctggccccagatatcacaagtgccactgttgagaaaccttgctcttgagtttgcatgctatctaaacctcttaatgtgatgcagaggatcttctctagtctacctgccttctgcagagcacagtccctggttttagcctacctgtatcatcagccaacagaggtatcggttatgactttcttctgtatcttcccatggatagttcatgaatatataagtatatgcaaacatatgtataaatatttttttttgtaagcacacaaatggtggcacactatgtattttctgtaccttgcttttttcacttagcaatatatatttcagtacatataaagttgccatattctttttatagctgcataatatttattgtgtgaatgtaccatatttaagcagtactctatgaatatccttatacacacatcagtttgcctttgtatgaggacatctgtatacttatttatttttaaaaatttaattttttaagagcagttttaggttcacagcacaattgagaggaaagtacagagatttctcatatgcccctgtccctgcacaagcacagcctcccccattatcaacacctcccccctcactcccaccagagcagtacatttgttacaattgatgatcctacattgacgcatcattatcacccagaattcagagttcacgttagggctcattcttggtgttggacattctgagtttagacaaatgtgtaatgacatgtatccaccattatagtaccatacataccatacatcactgccctgaaaatcctctgtgctccacttcttcatcacccaccaccttcaactccctggcaaccactgatctttttactgtgtccataattttgctttttccagactgtcatatagttggaatcatacagcatgtactcttttcagatgggcttctttgacttagttatatgcacttaagtttccttcatgtcttttcaagacttgatagctcatttattttagtgttgaataacattttattggttggatgtaccatagtttatccattcacctactgaaggacattttagttgcttcctaattttggcaattatgaataaagctaatataaatatctgtgtacaagttttttttatgaacataagatttcagctcctttgggtaaataccaaggagtgtaattgctgtatgtattgtatggtaagagtatgtttagtttttttttaatttgcatttacttttattacttgttataagtaacgagtatgtttagttttataagaaactgccaaactgtcttccagggtagtggtactattttgcattcctaccaggagtgaatgagaatttctgctgctccacatcctcaccagcatttggtattgatttgatttaaatagcctttatttccttgtttctggactttcacgtattccccactccctcacctctagttctaattctcattttcccttcaagggctgacttaaagtgctactattgttttcctgaaaaaacacagtgctttttccttccttcagttcctctgcttcttggcaactcaccattttgggaatttgttcatttgctccttttttttttttttgtcttttcacatatttatctgatttttctaattaggtgtaagcacacctaagaaggaactgtgtcctgcacatatctgtggcatccataatacctcctacctagtccaggtcttcttgaaatttgttgaatgaatgaattcctccttaaaatgtaggcatttcagtctctcaaattatgattaagatattggatgtcattggattatacccagattttaaactgagtgtttagcataatccaaaaattctgtcatccatatggaccagcttggtgttaaaccagctttggtctcctaagggagaccgttttctccctcttttcctccccattctccagccaaaaaaagagactcctatcatttgtatgtgttttaaaatacactggagctttatcttaggaggcattgagtctgttagtgtacatgctgttctagggcattagaaaattctagatggtagtttcggcttcttagaagtataacttatttttcatatttggtgatttctgaaattgttagctactaattatatacggtacttagacactctggagcatttacagaaaggggatattatgatagagtagaaagagacaaggcgctgggcgcggtggctcacgcctgtaatcctagcactttgggaggctgaggcgcgtggatcacttgaggccaggagtttgagactagcctgtccaacatggtgaaagcccatctgtactaaaaatacaaaaattagcctggcatggtggcacatgcctgtaatcccagctacttgggaggctgaggcaagagaatcgcttgaacctgggtggtggaggttgcggtgagctgagattgtgccactgtactcctgcctgggtgacagaacaagacttcatctcaaaaaaaaaaaaaaaaaaaaaataggaaaagaaaagaaaaggcaaggctttggaaccatacagacctgggttcaaatgccagctctggccatactttctacatcaatgtgagcaagttactttaacttaggggttctccatttttgtgtggtgctaagaggtacatagggtggggggagggtagccatagttttcccagtccctccttaaatattccacctaggtaacatgcttgtgcttttgtttgcatatcagggtactcaacaccatacatacatatacagtccatagaacgtgtgcttactgttctgtaaggaaaactggaaccacgtcccacttggtgccctcattccctctaagcccattgtatatatacatcctggtgctggtcactttcctaatttgtgtaatacctgtctttggggggttttgtgaggactagcgacaatatttrtaaaagttttagaacagtctctaacatgtggcaagtattcagtaaatactatttttacatttcaatgattttattagatacttgattttacgatcattggtggaacccactgttacttctttgtacttaaaatactccgtcactgagatgtgttttattccattgccacagtggttcttaagttctctaattccaagatgatcctgcctgttgggtaatcactgtccccgctgatttctctttcgtgttactgtaaaacaaaatcacttcaccagaattagtgagggaaatgatagtgttttttatgaaatactaatgaagtgatagatgggttttgcaaaccaggatgagtaatgatgtataatggcatgttacagtatcagcattagtaccgagagcttttgatccaacttgatgggacttgtactttgagaactggtattcctgttaggggaagaaaagagtaagagataaaagtaatctatgtgttgtggaaaccatttttaacaattaaatgaagtctggataccacctacagacttctagaattaggaaagcaaagcagctcttatgggtataaacaaatcacatgcacacctcgttttattgcacttcatagatattgggggttgcttttttttttttttttttttgacgaagtcttgttctgtcacccaggctggagtgcaatggcacgatcttggctcactgcaacctcccgcctccggggtttaagcaattctcctgcctcagcctcctgagtagctggcattatacacgggagccaccacgcctggctaatttttgtatttttagtagagacarggtttcaccatgttggtcaggctagtctcgaactcctgacctcatgatctacccacctcagcctcccaaagtgctgggattacaggcgtgagccactgtgcccaaacaaattgaaggtttgtggcaaccttgtgtggaacaaaactgttggtaccattttttccaacagcatatgcccctttcatatctttgtgtcacatattgataattcttgcaatattgcaaacctttgcattgttactatatctgttatagtgatctgtgatgagagatctttgaagttactttttaaaaattatttatttatttatttatttttgagatggagtcccgctctgtcgcccaggctggagtgcagtggctctgtctcggctcattgcaagctctgcctccggggttcacaccagtctcctgcctcagcctcctgagtagctgggactacaggcgcccgccaccacgcctggctaattttttgtatttttagtagagacagggtttcaccatgttagccaggatggtctctatctcctgaycttgtgatccacccaccttggcctcccaaagtgctgggattacaggcgtgagccaccgcgcccgacctgaagttactattttaattgctttgggacaccatgaaatgtgcccctacagcaaacttaatcgataaatgttgtatgtgttgtgactgctctgctgagcggttgttcctcagcctctgtccctcttctcaggcctccctattccccgagacacaacagtattgaaattaggccaattaataaccctataatggcctttaagtgttccaatgaaaggaagagtcacatgtctctcattttaaatcaaaagctagaagtgatttagcttagtgaggaaggcatgtcaaaagctgaaacagaccaaaagctaggcctcttgcatcagacaattagacaagttgtgaatttaaaggtaaagttcttgaaggaaattaaaactactactccagtaaacatgtgaatgataagaaagtaraacaaccttattgctgataattgagaaagtttcagtggtctggatagaatatcaaaccagccacaacgttccttatgccaaagcctaacccagagcaaggccttggctctcttcagttgtataaaggctgagagagttgaggaagctgcagaagaaaagttggacagtaacagaggttggttggcttatgaggtttaaggaaaatagccatctctctaacataaaagtgcaaggtgaagcactaaatgctgttgtagaagctaaagctgccgcaagttgtccagaagacttagctgagacattgatgaaggtggctacaccaaacaacagagtttcaatgtggatgaaacaaccatctattagaagatgttaccatctctgacttttacagctgcagaggagaaatcagtgccaaagcttgggccaggctgactctcttgttaggaactaatgccactggtgacttaagttgaagccagtgctcatttaccattctgaaaatcttagggcgtctaacaaccatgctaaatctaccctgcctatgctctgtaaatggaacagcaaagcctagatgacaacacttctgtttacacatggtccaccaaatattctgaattcactgttgaggcccactgcttagaaaaacgttttgtttttcttttcccccaaagtattactactcattgactatccaccttgttacccaagagctctaatggagatatacaaggagatgaatgttgttttctttttcttttttttttttttttttgagatggagtctcactctgtcccccaggctggagtgcagtggctttatctcagctcactgcaagctctgcctcctgggttcacgccattcttctgcctcagcctcccgagtagctgagactacaggcgcctgccactgcgcccagataattttttgtatttttagtagagacggggtttcaccatgttagccaggatgatcttgatctcctgatctcgtggtccacccgcctcggcctcccaaagtgctggaattacaggcgtgagccaccgtgcccggccgaatgttgttttcatgcctgctgacataccatccaatcttcagctcatgggtcaaggagtaattttgattttcaagtcttattatttaagaaattcatttcttaaggctgtagctgccatagatagtaattcctctgatggatctgggcaaaacaaatcgaaaaccttctgaaaaggattcaccattctagatgccatttagaacatttgtgattcacaggaggaagtcgaaatatcagcattaacaggagtttggaaggggttgattccaaccctcatggatgaccttgagagcttcgacttcaatagagagagtagctgcagtgcagatgtgatgggaatagcaagataactagaatgagaagtagagcctgaagatttgactgaattgctgcaatctcatgatcaaacttcaacaaatgaggagttgcttcttatggatgagcaaagaaagtggtttcttgagagggaatcaactcctgaaaatgttgtgaacattgttgaaatgacaacaaaggatttagaacattatgtaaacttagttgatcaagcagtggcagggtttgggaggattgactccaatttgaaaagaagttccattgtggataaaatgctatcagacagcatcacatgctacagagaaatttttcatgaaaggaagagtcaatcgaagccacaaacttcattgtcatttttttttttttttgagacggagtctcactctattgcccaggctggagtgcaatggcacaatctccgctcactgcaacctccgcctcctgggttcaagtgattcttctgcctcagcctyccgagtagctgggattacaggcgctcaccaccacgcttagctaatttttgtattttagtagagatggggtttcaccatgttggccaggctggtcttgaactcctgaccctgtgatctgcccgcctcagcttcccaaagtgctgggattacaggcgtgagaccaccacacctggcctcattgtcatcttattttaagaacgtgccacarccacctcagccttcagctaccaccgctatgatgagttagcagccatcaacatgaaggcaagaccctccaccagcaaaaaagattacaactcgctaaaggctcagatgattgttagcattttttagcaataaagtatttttaaggtatatccatttttgtttttttagacataaagctattgtgcactttatagactacggtgtattgtaaacacaacttttacatgcaccaggaaaccaaaaatgtgtgtgactactttattgagatatttgctttattgtgatggcctggaactgatcctataatgtatgtgaggtgtgcctgtaaagcaaaatagcccataaagagtcccagacagagaacatggaagccactgtcttcatttctcatcttccacttaactagtggtaagaacttgggtaagtagttttctctctaagcctcagtttcttctgttataaatagagggagttgatgatgaatcccttacatctttccatttctgaaaactaacacctcttttgatcaacacagtctaagaaattttgaatggattatgcctttcttaaagtttacaggccattgtgcaaagtagttccttcagaaagtggtttgtgtcatgtatttctcttggggtctcctggagtcatagctgatgaaaaaatgagaatcaggacttccagctcctttaggctttgctccattctgcttcacatcatctcaagtgtcaggtgtctgtccctgaggcatattttttttaaccacattatgctaatgcctttttggttttgttgttatgtatccatttgaaagatttcttggaatttctggctttccaaatcaccttgtgtaaatttttatttacctgagcttgaactctgkgtattttatattgtttatatttgcacatcttttttttttctcgaaaatgttttttttggggatacttcaaatatgagatgaaatctcatgggtgaagacattgttttagttaattcttaatgtttatttaaatgactcagtgttacacttttacattttgctaataaaaaagacagggcttcactttgccagtgagctcacaatctggtagagggaatactcacgtgaacagtaacaagataatgtcatatatatagtartaaagtctgtacaaggcaaggaaggagtaaagggacgtgaaggtagatagaagggtggttaaggaaggcttgacagaatgattatagcctcagtagggtattaaaagatgaatgtggctgaacttaaagagaattatgtgatgcaaaggaattcccaaaccacatgttatatacagggaaacacagtcatgctacgttgttacagtgttatgtgtatatgtgtgttggagagtgggaggaggtgaatggtggcagctgaagatgtggatgtgggccagtctgaaagaacctgacagacaatggatggataagtgttgaaaggttctgtgtggcggagtgacatggtcagatttgtatttcagtgacagtgggacagagagattggaggaggctgagattgaaggcagagaggaatcaattaggagactgttttattggagaaattgtggagggcctaagcgaactgcaggcatggaagtagagaaggagaggaaaggaacatttgagattcacctaggaggtaaaattgatgctgcttgttagcatttatgtgaacttttggagtgtgagagaggaaggagtctcggatagctttggcagttgggtagtttgtggtgtggtgctgctgttggggagtagggagagcaggctttggatggaagctgaggagttggttttcgatgagttaatgttgaggttcttatgggagacctagatgtggaaagtaggaggtggaaattggtagttatcagaatgggagtagggcaggggaggraaagaacaatgatggaactctagatgataccagtgaatcattgtttcagtgcagtggtacaggtgggagctagtgggttgaagagtagattaaaaaatcaagaggttgagatgacggctgtagataattgctcgcaccttgggtgtactgtcttcattagagtaaaatcctgtcacttctctcctacaaaaagtgttcaaccttgtcacactgatcatttgctgttattatttttattttgtctctaggacttggcttttcttggtttcaaagtctgcttcaattctcaatctctgcttatacctcaaatggtagaatatgtaattttccaaagttaatttagttttaagataaaatatattcactggtttttccttccttgctgttgaggtctttctttgagttcgttacgttgtttcttggccactattagctttgttttttcctactctcaaattataacctgtcacttggttatctaagtgctttatttttttttatacattctttgatttaactggaaaccagagctctggttagcctcttaatacaataatatgacattgtagaaaattatgaagttgcaattaaatctctcagagtctgccgacatgtactcttagtagtgcttggttaacctcgctacattattagctgaagggcagagagtttcttttaataaaagaacaactatctaaaagtagctttggaatgataactgccggggggaaatatgaaatttccatttttcatcttcctgcatctgataaagaatataaccatgatagtccccccttaaccatggggatatgttacaagaccccagggatgcctgaaactgtggatagtactgaatcccatacgtatatcctatgttttcccctatacatatatacctatgataaagtttaatttataaattagtcacagtaagagattaacaataacagtaaaatagaatagctataacaatatactgtagtaaaagttacgtaaatgtggtctccctcttccttctctctctgtgtctctctctctgtctctctctcaaaatgtcttattgtacttattccatgggtgactgaaaccatgggaagtcaaaccacagataggacggggactactgtatacatcctggccagaatttgccttggaggtgactctttagatccaaaggagataagatttgtagatatgcattaatagcaaaagagccattgggggtgggtgggtgagggtggactgtttataatattagaattatacataatggaagagaaatgagtgatatctgagaagcacacttaataactgaagctggtgggaaatttgaaggataggataagcgtaaaagaagacctgagaattagattagaaattaaagaattccttggtacaaaggaaaaaatttaaggatatgataatgagatctcccaaagacatttgtagaatgaaatcaggaggaacttactgctcaaggttaggaacagtttgttagcattcgtaatttttcaaagggtagggaaactggtctgtacttcctcaattcccacaatttaactgtgctaatccagttaaagctcatttaacagtattgatttagcagcttggggtgcccatagatggatttcttggggtcactgaaccctcttaggttaactgcaaaattttgtgtattctgtgtattttttttttttttttttagacggagtcttgctctgtggcccaggctggagtgcagtggcgcgatcttggctcacggcaagctccacctcccaggttcatggcgttctcctgcctcagcctcccgagtagctgggactacaggtgcccgccaccacacccgagtaattttttgtgttttagtagagacggtgtttcaccatgttagccaggatggtctcaatctcctgacctcatgatctgcccgcctcggcctcccaaagtgctgggattacaggcgtgaaccaccgcgccctgctgtgttctatgtatttttataggagaaaataacttgcttttgcttaaattttcaaaggtacatgtgactcaaaaatggtttaagcgcgattttaccctgtgtgcactaaatatctatgctggatgctgctcacttggagagtacaagattggaaaggaacggggtccccccatttctggcagtaactaaagatgaaaaatgaagttgttagaatgatttcaccagtgaaaccatttgggctagagtttctctgtgggaaggcttttggtagtgaactcagtatcttaaatacatgtctgactgttcagattttttgttttatatggtgtgaatttaggtaggttgttgtaaagttacacgatttagacttgtggccatatacttaatccttagagtctcttcacaaagstgtgtactaatgaaagaagatggccagcacccgtatgccttctattgttacctgcataaaaatctgcaggaacaatatatgarttaattcaatcttcacattgaatgagaaccacctgtgacataggtagtatctaatagataccattttgtagataaggtaaaggaagagagaggttaagaaacttgtccaaagccactcacctgggtgattgagatttgaaccttggtgatctggttccagaacccatactctttttttttttttttttttgagatggagtctcgctctgttgcccaggctggagtgcagtggcgcgatctcggctcactgcaagctccgcctcccgggctcacgccattctcctgcctcagcctcccgagtagctgggactacaggtgcctgccaccacgcccagctaattttttttttttttttgtattttttagtagagacggagtttcactgtgttagccaggatggtctcgattccctgagctcatgatgcgcctgcctcggcctcccaaagtgctgggattacgggcgtgagccactgcacccggcccagaacccatgctcttagatgctaagccataatgctttcctggaattattctttccaataggaatgaggtctaaaacccctaaaagttggagtcttgcctctgtgctatgtttgtttcttgagctcttctaaaaaagtaaaaaagcctttgatttaagcccttccctgtattttgctgcttctgacaaggccagaccacatagtatgctctggggttaaatgttcattttttttttttttgcttaagaacagtttcttcttcactccctctctcctaccacttctgctgccctatatagtagctttacactccctttgtgttattcttgaattgttaacgctgcttctcaatttttctctctaccctaccacttattcccagtctggaaaagtaaatagtgattgaggaggtgaggaggagcccaggaggaaggccgtgtatttcagaacacccctctctctcttccacccagatagcagtcccctgagttcatgtgctttcccactccacttctctctctgccccacccttagaagttccaaaaatcaggctcctctgcccgttggtgctccttatgtggtaacattggcgtggcgataccttacctgtgcatcatagaggggccccaccttgcagccctgtttgtgttgaattggtaggacccacagaaaacgtatatggaaattgaaagtgccagtgtatgaattcagagtgagaagggcactgctcagtggatagctgtttgtgtgtatttgaactgtgccttctctccctgcaggcaagctatgcgagctgccaaggaatccttaggttggttggttagcctgaattcagagcaaggggagttaattagatgattcaaacatccctccatctccatgatggacatcctaatccttggaagcacttatgtgtgtacagcctgcttttcctttttactgtccttcctgggtcagtggcatagacaaacagaccagaacccggctgggcgcggtggctcacgcctgtaatcccagcactttgggaggccgaggagggtggatcacctgaggtccggagttcgagaccagcctgaccaacacggagaaaccccgtctctactaaaaatacaaaattagccaggcctggtggcgcatgcctgtaatcccagctactgtggaggctgaggcaggagaatggcttgaacctgggaggtggaggttgttgtgagccgagatcgtgccattgcactctagcctgggcaacaagagcaaaactccgtctcaaaaaacagaaacaaaaacaaaaacaaaaaaaaaaaacagaccaggacccagtctggccacttactgaactatgtgatcccaggtgagtctcatccctctaagcttgttattatactataactctataaggttgttttgaaaattaatttatgaacagtgcttagcactgtggtaagcattgttaaagtcaccatatcattattatcattattcatggtaccatctctagcaccccagtagacttaacctgtctatattggttaatacatttttctggttacaatgaagtcttgctaacctgaaagcttttttttgtctttttcagatgactttccatatcttttgtctgactattgatttcaaactctctatgaagttttattttcataccttttttttttgggagaactgcctgtgaaactgcatatgcccctgtgtttatagttatatatacatttatatatatactgccctaagttcatctaaatgaattcctgatatacttgcatattcacgtccccaactctagtaataatttagcatttctctccgcaatcattctctcttaaggaatctgacaaggattttaaagtgtttagttttaatttaaatgtgctaaagagagggtttttactcaggaagccactgagctactcgagattgctatttgcttcatttacaagctgtagtccttctggcttaactgctttaaaggttgttcagagtttttaatatacttaaaattgtttgacagctgtgacttgtctagcactgatatatccaataatatctcactgtaatgagtatactccccctgtctctacccctccccccagtggctggcagcagaattttgcaggataagttacagtactgcattcaagttttggtttctcttttctcccaccttttaatttaaccttgaagctgaaaatgtggtttaaaggtataagcaatgcttctgggaaatctattaagcacatggatgacaaagtgtgaaatcttgcttgtggcatgtgcaagtgggtcttggataatcccagctcttggtgttagtttgtatgatttggctgtctctctactgaggagacacagaaatgaaagagagggatttattggctgattgtttggaggaagctggttacaccacagtggtgcatgatgagcaggaaaaagctgagaaaatgagtgtcctcaatgtggaattcacagagacaggagtgcctgaggcaagaatctggcaagcagacaatgagcaggtcatttccaggaggcagttggctgctgaccagtatttaaagccaaacttgatctgtaggaaaacaagaagaaatatgctattcagtgacttctcaggagcaagttgcctctgaaaaatggtgcaaagacactagactatagagtagaaatgccatttctgtgatgagtagagagaggtgagggttggccaagtagtggagagggacagctggtggggtcatggtgaggagggtcaggagtggcacacacaaggaaagacatttctcagtaaaaatcaggctggttataattatttgctaagttggagagcaagtgtatttttttgacaaaatggacaaggaagttctattggaaaatatgatgtttctatacttttcagaaaggtagggagtggggtcttgggaggataatgttaggtgctaaatgggctactttgaaatactgtggaattggccttcctgcagaaggtaagggctttatgagaataggatagaccactctctggaataaggcaggccacttcattttcagagatttctggcttttttctcttagacagattaaaaaaaaattgtagacaatagagaaactgttggaaaattaagttttgtatttgtgctgcccttaataacaaagtgcaaaatgtgttatatcctattctgtaaagtgagagtagttgtgttaccggaaaggggtcctgacccagaccccaagagagggttcttggatctcatgtaagaaagaatttggggtgagtccayagagtaaagtgaaagcaagtttattaagaaagcaaaggaataaaagaagggctagtccataggcataaaaatagtcatccatttttatggttacttcttgattatattctaaataaggggtggattattcatgagttttctgggaaagagataggtagttcccgaactgagggttcctctcccttttagaccatatagggtaacttcttgacattgccatggcatttgtaaactgccatggcgttggtatgtggtaccatgtagtaccatggtgtagcggtgaggacgaccagaggtcactctccttgccatcttggttttggtgggttttggttgccttctttatgcatcctgttttatcagtaaggtctttatgacctgtatcttgtgctgacttcctatttcatcctgtgactaaaaataccttaacttactgggaatgcagcccagcaggtctcagccttattttacccagcccctgttcaagatggagttgctcaggttcaaatgcctctgacagttgtttcagcartaaaataatcagaaggcagtggtgtttaaagcacatttaaaatgtaagcttacagggttggtggtcagttcctgcccctagatccttctcttggtttccttcagaggaactaagatgaagccagctatgtgtcactgtcaacggggagggctggctgtcctgtcttcccctggagtggcatatcacacttaattcattatgaagcagtagttttgggataaggaggaatgttagtttatggacagaacctatggttatatgtgctaaatatggttatatggttatggttatatgtaggtcaggtgtgttttaattactcaccaactagctcagggctttgttttgctaatgaaaggtcacagacacacacagagacgtgcacatagacacagagtataagagacagtgacagttagttttggctgtgtttcttgtttattttttgtgatttcaattaataacacatacctagtagtcagaaacacacatcaggagcctcaaatgttttgtgtatgcttttttaaaaattcgcaattcaagaggcttaatttttgtttgagcattagctgatttggaaccatgaagtcctcatagcagatgtttagaatttgtgttctcaaaaaagccttatgttggtattgttttatcaacttgtgcactgtggcttttacagaaaacactyaattcagttttagtaaccttctaggacttaggacccacagtccccagatggtgaaatgcagcaaagccttggtatcacatggttagcctgtgtggggcgggagtgcttgaggccaacccaggcggtacgagggcctgcactgatttatacacagtaagcactatgactattgcaatgtttacacgtctatttttggattctaagatttaatatcaacaatgttcacttttggactcactgctacatttccaattttggagcgagtacaatacagtcatctctgtgtgaaatatcatttccctgtgatggttttgtgtgaggataacagactctagagataattattttaacattgctgtcaccatttcagcaggtaaaaagttgcctcctattttgagcaaagtttgatcttgaaataggagccgaatggaagcggagggttcatggtcagaatttgtgggcagtaaggtggagagaggcagggatgagtttagattagagagggtgtggcaaattaagcagaggaggttagacttaatcttgtagatggcgagcagggagttgtaaggatttttgaacaggaggtgaaatgaaactatattcttacttttctttctccagaccctatgaagaaagtctgtgctcctttaaggaagattaggctggcagatataacccaggatggcctgtggcagagggctgttgtcttaggtttgtcagatgattgcagaggaagaggaaattaagaatatgtaaagaactcaccatcttccgttttttttctccacccttatcaaaaaaaagaatcacccatagtttcggtatttaaattcaatcattacccacattttggccagtctgctcctagtctgctttttttttaatatgacttttttccctttaaaaaatttagatatacttaacttgtaataaaatttgaagaacagatcttaggcaatgaacgttcaatgaatttagcaattatatatacttgtatagtcatcaccccaaatgagatctggaacattgtcatctccccagaaaattccccttttgctctttcctgtttttccttgttaaacctttttttctaatcttactatatatacattatcattatgatgtaaacatactctcctgtaattaaataatcttttaaaagcataattctgatggttcctaacactccattatgtggatgtaccattgtttacttaactgattttccaatttgggatatttaaacagtttccaaatttccactattaaaagtaataccatcatgagcaccaaagagacattttgaagtaataaataaaatgacttgttgacaaattgtatatagcagataaaggagaagagttaacaaaaactccaaagrgttaaaaaaatagtgaacttcttgaaagaatggggaggtgggaggagaattctctttgagagataaatggagtccaatgagagtgaaattggttttgaccagcctgaatttgagatgatagtgagatgtcaaaactgctctatatgtaactggaagtaaagaaattaaggatatccatgtgccctggacacagaggtcrtagtggaaaaggtgataggggactgagtattgagaggagagcagcatactaagggctgggacttgttctacctctagtgctgaccttyatttttctttttggggaggttgtgtacttcttcactggatgaaatcatgacttggaggcgttcatttgaattttgcattcagtattcccagatcctgaacatgctttatttttctattttattttatactaagacccactaatgtagttggtgctaattctgagaaagaaactcttgtgaagatctctcagtttattttggctaagattagagtatctgccattttttgtttgtttgtttgtttttttgctgttatactggactcttccccactaaaaagagactgattttttttgcataagcaaattaaattacttgaattagcagaagttactggagaatggaagaaataacttaataggaaataatcactaacttttgagtaaatagggtatattgaacccatgcatatgtttacttttattccctaaaatctccccacaattactgaaatgaaaaagttattactgaaargaaataaaacccacaagaacaaagcaaaatagagagatctcaaaattaacattttggaagctagaaagcaaatgaacagtggttactaccttggtccatcagagaaagctgaacccaaagcagcagcaaggaaagtcaagacagggcaagtcacatgcacaactccgaggaacttcagaaagataacctctcaaaggaagggtgcatgggggcgaaacaggagattcgctggaaagtctgtataagaagtagccagaattccttttctcccattctcccaaaaccaggtagctatgtaactgctctctcaaatcccagcagaacactgaagctttactctctggagaggctaaactagagggaatctggacttggggacattacgcacagctgagagcagcgcgcacctttctgaaagtaggacactatgttgaattgagactaaacccactcagttcccagataccttatgcactctagccaggagattagatgattcttctctgcagaatcaggcaagcccaagagaaaagacctaaagacaaaacttaaaagggagttctggagggaggggcatgaacaggtggtaaggaattagcccagccagtctcactataggcaagcccactagtcaactggtgccatgttgtacccacagagcccctattttaaatatgactgtagacagtggctcactcctgtagtcccaatgctatgggaggccgaggcaggtggattgcctgtgctcaggagtttgagatcagcctgagcaacatggtgaaatcccatctctactaaaaatataaaaattagcagggtgtggtggcacatgcctgtagtcccagctacttgcggggctgaggtgggaggatcacttgtgtccaggaggttgaggctgtggtgagctgtaatcgcaccactgcactccagcctgggtgacacagtgagaccctgtctcaaaaaaaaaaaaaaaaaaaaaaacaaaacaaaacaaaaaacaaaactgtatgtggcgctgtggttaagactttttaggtttgagtcctctctcctgacattaatacttaatgaaaacttagtttgacttagtttggtctaatttagaactttatatgaaaggaattaaacagcttatatatgtttggggggtttggttatgactgcttatcctttttactgtttgatgaacgtttaggttgtttctagtttgcagctattataaattctgcttctattaacttgattatactagtttggcattagtgatcactgcatagagggggccagctcaaatgtctttctttttcccttgaatctttctttctttcttccctccccttcccccagtctcttctcttttcctgtctttgtggcacctctgtcttctgatgaacatgccacaggtcaaggagagtggaaacaaaagacaaaatcctttctttcactcagtttttccctgttgtccccttctaacgaagtgttgacatagtcttccaaaccatgcctatatttacatttgatctgtattcaaattctattgtttctctattcttgatatctcatggacagattcctttctttcatacagttggcagtgctccgatcttctagagactccgtgtctaaggggaccaaattatttgtagaagcaatcaccgtatgttaaatctagttataccaattcatcataacaattatcagctaaatactccgactgcttctaacagcagtaagcagcaataacaatgaaaacagtgtttgttttttggtctgtgtaaatctgtagtgtatacccagtagagtaaaaaataaatacttgatgcaggaaatataaataaaaatgatgtcttccttgtgtgttatgaaaatagtacatggccaagacttctattaatttaatactgccttttgaatattggctatatttaaaaattctaattgggtattataagttttaagcttttttttttttttgatattccctttcttcaattgcctgttaaacttctgatcattttaatatgttctttctgcctcatttcaggaatcatatttaatagaatagttgttatgtcctaraaagccctgctaatacagatttaagtatgacattaaatgtgtaacaataattactaattattcctaaagtatatttgaataattactaattatttctaaatgtgtaacaataattactaattatttctaaagtaattactcgctttagaaatctccttttaaatcctcttccggatttctagatgttgtaaaacaaacctcacaactgtcacaagtgcatgtttcttagtcacatgtaaacaatgcaccctgtcattggttcagtgaatgtcttcacaaaagtatagagctttgtccgcaaatgcagttttatgataaagatatggacaggcttgctggagtggcttgatcatacctacttgttacagtatttcagatagttcttatcatgcaactgagatctacatttgtgataaacaaggatattgaggagattgttttgactcaaggaatcatatgtaactcaaataaacatgtttggaataataatgtctgaaaattataattattgatgacattacatagcaaatacagttaaatatttaatgtgttaggcaataaagctagacctgcagtggatggcttattctaggaaattgtcaaactgacttaaatttaaatttctgatccttagaattaggtgttaaggacatgctttttttttttttttgatagagtctagctctgtcgccaggctggagtgcagtggcgtgatcttggctcactgcaaccgctgcctcctgggttcaagcaattctcctgcctcagtctcccgagtagctgggactacaggcatgcgcccctatgcccagctaatttttgtatttttagtacagatggggtttcaccatgttggccaggatggtctcgatttcttgatcttgtgatctgcctgccttggcctcccaaagtgctgggattacaggggtgagccaccatgcctggccaggacatgcctttatactataataacagatttgaatggtttcttaaattcagataacttttaagtagctgtgttaattcatatagatgacaaggtttaaaaaaagactttatacctagtctgaagtggaaactacagtagatttattgtggtaattaagatacatagtttggctttagaaacaaattatttgattgaacaaattaccagtgaattaaattaagcggtaattgaaagcttacagattttgccatttgtttcctaattaaagtatcggcttaaaagatatttgtctgctctgattctaagtccctcaggcataattacaaatgctttgagatctttctatgtttatttatcaataattatctataattaatttaaaggagctgacatttaaaaatgtcagatttgagaggttctttattattgagaccattaacaactcttaaatttggtgttaccaaaagtaacttgacgttatatatgttattatttattatttttatgttagaaaatttggttagaattttagttcttattcttacagttgaatatgtatgtatgcatgtatgtatgtatgtatgcatgtatgtatgtatgtatgtatdyatgcatgtatgtatgtatgtatgtadacatgggttttctccattgtggccactctggtctccaactcctagccacaagtgatcctcccgcctcggcctcccaaagtgctgggattacaggcgtgagccactgtgcctggtgttagggttgaatatttaatataaattctaatctgtttgaaaatagtcttaggtgtttaaatgtctgatttagagatttaaagtaagtcttgcttatattcatatttttgtttcagatttaattgttttttaaaaaatgacattcatggtaaatattgatgatttgcctattttctttcaaggttcaatttcaccgtatctacttagattcatcttttgtgctaacataaaatattatgaaaataatacggccgggtgcaggggctcacgcctgtaatcccggcactttgggaggccaaggcgggtggatcgcctgaggtcaggagttcaagactagcctgaccaacatagtgaaaccccatctctactaaaaatacaaaaaattagctggacgtggtggcgggtacctctaatccagcttctaggaaagctgaggcaggagaatcacttgaatcggggaggtggaggttgcagtgagccaagatggtgccattgcactccagcctgggcaacaagcatgaaaatctgtctcaaaaaaaaaaacaaaaaacaaaaaacaaaaacaaacaaacaaaaaaccatgatgacctaagtgacagcattgcatttactagcccctcctggttgtaaatgattaaatcattttggtttctttctaatgcataatgaattattgaatgaatgaatacataaactggatgagaaaactcagggataccattgaaattgttacttgcatgatgaggtcttaatgtgaatagtgctggagaaatagtggcaactttaaatttcctggaatgttttctgtttatcatcattcatatagtctttttggttagaaaatttaccttttagatgtaatcttaaaattcactttatagccatgataacattctttttgtatttatagttgatatgcttgcaatattgtataattgtatgaacttacagtttcacagatgaaagggggaaaatatctttgaggtcagctagttcatctgcttttattcaagaaagatgatactcaaccatctagaaaatacattctaaatcacaaagatgatttaaattgacttgttatactgtggtacaagtggtcccctgatcacattacatgcccagtgtaccagagcctcaaatcttaacaaaaatataactacaggaaattcaaagtattcatgaattttaaaaaagcactcattgtattgtccttatctttcgtgtgtatttttttgttaatattggcagatatttaatgagtagctattaggtgctagccacactctgttctattataatattttccttaacaacaaaatgccaatcaaaatcatagtgtaaaattagtaatttctatggaaatggattaggaatggtgattttttttctgcagtaatttaaataactatttagaaatataacagttgtattttgctcttgcaagtcaaaaagtagtaagtttaataaaaaactgataaaaatatgcctaaatgcttcttcctcttttgtttatgaggtcatgaacttggaaactttgtagtctcttctttcacatttggccaagaatttgactttttttgtttttgttgcagcaccatacttaacaatagtcagcagtaaactaatgtactgaaaaataatagagcagccgggccctgaaagcaagcagttatgaggtccttgaccttgccccttcagtagaggttcttaatattagtgttattttagggttgtcagatttagtaaataaaaatacaaggcatctaattaaatttgaatttcagataaatagtgaataattttttagtataagacagtcccaaatattgcatgggacgaacttatactgaaaaattatttgtcgtttatctgaaagtcagatttcaccagtgtcctgagttctatttggcacctctagttattttcatttattgkatattaggtgccagacattctgagatgaatagagtccttgagtgcttcaaaatctaactgggggagacaaaaagaagggatgtgaggaagagagtaccggaaaggaaactgtgcagtaatcaagatgtttgctgctggaggtctgaaccggcagtggggatgagagatcgttatagttctttgttaatgctgagcgaagtcatcctttgagtggcactggcaggcaaaaaaactcggaaggagctgatgagaaaggagagatgagaaaatgagagtagtaaaaatgttaaaaagaaatgggagtagggaagatgagaggaaaaagagagaaataaagaagtcaggtccatccacggtcttcaggggtcagggtggaagtgatgtatcagaaggaaccctgggaactttctctgtgtttcatggtaatttgttaccctgaaaaacttgcaagctctttgcaccacagtttcctaagatgaaggggctggataagataatttctaacctgatctgattctaaaagctcgttagtggaggttttctgtctttgaagaggggttgtccaggttttgacatcctttcctcccatcccttcagccttgctttgtccttatagccactttttggaggccaggccagtgacttcaagcctcctttttttctttctttctttttttaatagagagatgggggtcttgctatgtcaccagggctggtcttaaactcctggcctcaagtgatcctcctgccttagcctcccaggcatgagtcactgctcccagccccttcaagcctttagtttgatcctaacatccgatgtgtattctaatatctttggtatgaaaaggaattagactacctcagaggcatttatttcttaaactttttttttttactttgcactgacaccagtgtagtttaaaatacaatatttgaaaaataaatgtatctaatatactgtaaaatttccttttgttcatttttgatagtccacttttgaatgaataaaataggaggtgtagggctagaacctcatatattttaatataatagagaccgtttgtgactttggaaatacctgaatgcattttaatctagccgcataggctcttcacaaaactgttgcatggtggggagtgatgttggtgcttactcatggctgtgatacatttgcataagcatgcaagtgccctatttaataatccatttaaccgtaaactataaattaaaagtgactgccagtgataaaggaagatttaatggaagcaaatttactatttaggaccttggtttttaaccatttttagatcttggaagtcttttgaaaatctgatgaaggcaactggccttttcccaaattggactaacatacaaactgttgcagataaatcaggggatttagagacacgcctccccgcttcctcccccgtgccccaatggaagcccatccatggatgacctgattttaaatttatgattttggagctcaactgtacagttaaactggttcattcatttaattcttaaatcattcattcatgagccaagctctctggtattgtgggaggctgtgattttttttttttttttttttttttgataagcctttggcactcctggaggctgtgattcttaactctcgcttgacagcagtagtcttatataaacaagttcaagacccattttcatcttgcaatggaaggtgtaactcacagtgtatatctttaacgtatgctttaggactgtgtttatcattcatagtcctcttgctttaatacagcttttaatttccatttagtggaccatttacattcttatccttataatcacacaattttcaattgcctttccgtccaaatctttatttataaacttttttttttttggtgctcccatatagccatcatctttaatgctgcacaatattccactgagttgataaacctctctgatgccggacataaaggttatttccagttttacattttttggagaatgttgcaagtgacagctttaagtagctttttcactcttgtcttggattagtttctcagggcaaattctcaaggatgggagtaatggctcatttataacatttttattaagtacctagtatattccaggctgggtcagaggtttggccatttctatgacacttgatatgctttgccattctttcccattgtggtagagaactacttcaccaatccagtcaactctgaattgtccaacccagcagacatgtgctttctcattcctcatttggtgaatgttgagaagtaaactaaataaagcatgacaggaagataaatctgaagaaatgacagtgtgtagctaaatgaaatgtatatacttatagaactacctgccttttggattatttacccaacttggccttcttttgctgtaactgagagatgaagttttgactaagtcagaagattagaacacaatatagggataaacatccttagaaataacttaaatttattcaagtcaccaagaaaatgttgaagtttgtttaaagcaaaaccacaatacccagctttattaatatatccaaacttctattttgtgaatatttattaaatgcttagtatatgctgggaagacaaatgtgttgtatattcctrattagttattagtagggagagacaaatacctaaacagatagttgctgcagcgtgcagtggacactgtaagagagtttatatgcccaggagtacaaaggaagagaagtttctgtttctttacccagattttttactatagagaagcccccttttcccccctttcatggtttactttcatgtcttgggagaggaaaaacacttgttaaaaagtgtagtacgtataaatgactcagttgggatgaagactcagtttttgaattacatgtatagtttaatgaagattcaaagttgagtaattaaagaacctttgccctgtcaattacattatagctggctggttgaagggaagtcgtaggttgatagttatctgaaaagtcatttatttcttcataaaaataatttctagtaatcactggaagggacaaaaataaaayaatagaactgtgtgtgctgtcattagcgatagcaaaagcatattctcacatgatcatttttttctgtcatctaggctaacgaataagaaagttggtctaccttttcttctagaaagaacactggggatcctgacagcctgggtccagttataactctgctggttactaattgtaaccttagagcttaataacacccatgcttctatttcctcaatggtaaatcagggatcgtaatagtgtacacttcataggaccaccaagtccaatagatacggctctatgctcatcttagtcaatgctctgaacagcatttgctgctcttgacctcttccttaaaacactattctctcttagcttctgagaccccaaactctagttcttttctattatcccctgcttcttttcatttgctcttctttttctacccaatttctaaatactgggtgcccaaggaccctttctgtctttttttttttttttgagatggagcctggctctgttgcccaggctggagtgcggtggtgagatctcggctcactgcaagctccgcctcccgggttcacgccattctcctgcctcagcctcccgagtagctgggactacaggcgcccgccaccacacccggctaattttttgtatttttagtagagacggggtttcaccgtgttagccaggatggtctcaatctcctaacctcgtgatccgcccgcctcggcctctcaaagtgctgggattacaggcgtgagccaccgcgcccggccgaccctttctcttctttttgttwactcctttccaaggtgatccctttggtctggtggctttaagtattatctatatgctgctgagtcttatatgtctctggttctgacctgtccagctcagaggtccaacttcatatttctaattgcctcctagatactgctcccttaatatgtctctaactagatccctgaatctctccgctaaaataagcaagtaaagaaataaacttttcccttttccagtaatctccatcttcggttaatggcctcagatctatgtcttgtccttaattagttctttcacatcatatatccaagccagcagcaaagcactacctttttgaatcagtctatttctgtcttccctaccatccttgccaagccagcgtcattccttgtcacattcacagccttctaacttgtcctcttcctgcctattctatacatagctgttggagtgatttttttttttaagcaaaaatcagatcatgccacttctctgttttaagatccactaatggcctctcattgcactaaaataaaattgaatctccttcccgtagcttacccatctgagctcagtttccatagctaggaaatggggataattgtggctttaactagaatatrgtaagttccatgagggcatggrtttttatctgctttgttcactactgttttcctagtgcctagaacagtgtgtacacgtaataggcacttaataattatttactggatgaataaacacattcagattatgtggataycccaaagcctttcttctttcctctttcagagcagtatattatgtagctcagtattttctgcattacataggaaggccagcwaaggcttctgatgcaatatctcctttctttttcccttctcactttttacgcatgttctcctgtccctccctgtcttatgtttgggtcattaggaggatatgtttgggtcattaggagaaagatgagtgggtgagtggggcaagaaacagaaaccagaaaggaatcctgagactagtaccaacaacatttaaaacataaacattttactatagaaatcttgtaataggccaggtgtggtgtctcacgcctgtaatccctgcactttgggaggctgaagtgggcaggtcacttgaggtcaggagttcgagactagcctgaccaacatggtgaaacctggtttctacttaaaaatacaaaaattagccgggtgtggtggcatgcgcctgtaatcccagctgcttgggaggctgaggcaggagagtcacttgaacctgggaggcaggaggttgcagtgagccaagattgcgtcactgcactccagcgtgggtgacagagcgagactccgtctcaaaaaaacaaaaggaaatattgtaacatatacagaagtaatagatagtataatgaatccttatctcttcatcacccagtttcaacagttatcaactcatggccatgttttgaacaaccattgtttaatttggatcttgcctatagttaaggaatgcctagtttatagaggtttatatcacagataggattttactctgggtatcattactattttgtaaaccaacttgttgaggacagataaggaatatttttaaggttattagaaaagcctgaaatttcactgttatttcaaccataagtttgcaaatagtgaataagcctgataagggaagcacatgaagcccattaccagttttttttttttttttttttttttttttttaaatagacggagtctcgctctttcatccaggctggagtgcagtgccgcgatctcggcttactgcaggctccgtcctccggggttcacgccattctcctgcctcagcctcccgcatagctgggactacaggtgcctgccacctcgcccggctaattttttgtgtttttagtagcgacggggtttcactgtgttagccaggatggtctcgatctcctgacctcgtgatccccccaccttggcctcccaaagtgctgggattacaggcgtgagccactgcgcccggccagcagttatttatttcttatgtcagttggttaatcagaaacatgcttgactggtaagtaaccaagagcaggctttgatgggaggtatgaaatcatggggacctagggagggaagggttaaataaggacgattaatagtgttcaagagagtaggatggtgctgctttgctactttccagcttgcctggaggtggtccccacctcagagcctatagaaagaggtccttattctagtttggtgatgttccttgtgcattgttatctgggttcccctcagcttggctccaaggaccttgtgtaaaactgtgcagaaggtgcttcccgttaactctgctgcttgtttatttttaggtatcttgcaatatattcagaactctccctcctagtgacagcaatgaatttgatccagaagaagatgaacctacccttgaggcatcgtggccacacttacaggtactttgaaataccatttgttataaaagaaaactccattaactcattagctgattagcatgggaattccttgaagggctttattcaccaagaaatcaaattagagtacactamtggaaagttagagaatgttttttatgtttcttattcttgataattagaatgccaaaagaataaaatagtgtcagtgtgatgctttagtgtcccccaaccccacgttgcaggtacagccagcagttcttatttctctattagagcttctttatgatcctgccctctagagcctccaacaaagcacagaattattttcacattagcattagttggatgtgattagctcacagagtatatatctcatttttagtggtatgtaccctgggaactttgtatgtctgtcatcacattaactacaaatgtgtttctttagttagaaggacaaaaccaaactgtaatagctatttcgttcacagtactgtaaggaagagtaacagctgagagaaagcttgggtaaaggccaattctgttctcttgcactgagaaggccatgttttccaatcacacttatgtgccaggatggatcaggggcatcactgcatctctgtttccagcattagagccatctgtattgtattaacttgtataatacatactggtaattttccagctcgttccttccttgtgctgccttctctgaaggccaaaatttctcaaaagaatagagcaaggaaatttgtacatgttgaaccccaaagtcacccttccattgagtcagaatatccttaggttgctcgacaaatagcaagggggaaggggtggaagaaaatgaataataccttgtacatcttcacccctaggcagaagctgctgcattttcgtagaaatgtattcatggttcaggttgactttttttttttttttttttttttttttttttttttttgagacggagtctcgctctgtcgcccaggctggagtgcagtggcgggatctcggctcactgcaagctccgcctcccgggttcacgccattctcctgcctcagcctcccaagtagctgggactacaggcgcccgccactacgcccggctaatttttttgtatttttagtagagacggggtttcaccgttttagccgggatggtctcgatctcttgacctcgtgatccgcccgcctcggcctcccaaagtgctgggattacaggcgtgagccaccgcgcccggcctcaggttgactttttgaagagcaaacaaactgtgcagcagagagagaaggcctagagatattctaagagtttttcccccctacttcagaatttctgacacaaatttgcaagtctgtctgtcctgctttgacaactcaaagtttctgcaagtacacacgtgtgctatttcccgttgttacgtagagagcttttgggggctctgttttctcagctcttactcaggcgtgttatgcatatgtattcctgcctccaatgctaagactgggtaaattagttaaaacacggtaattgatttactatcttagatgtttgattttttttttaaggtcccagacatattgtctgcaatctaagaaacttgtaaaactatttgtgcttttcataggtatatcccagattgtgacacaatccaaaaaagaattacttttttgaatgggtgaattgtcatgtcttactcttaatgtttggtgacagttcattgaattacagtttagtctggaagaaacttaacaacaacaaaaagacgatctcctcagtagtctcacatcttatggtggaaaagacaaggaaagagatgtcttcaaagcctcagcatattgtcttctctgtattcgaaagaagacattgggaccactcttgccatttgcaagagctttttgaatattctatgtcatgataaccatagacataaatttcccctaaagtacaataaacttttactcattattacagttaatccttcccatacttaatgactctgtaaaatacaggaccaaattaatttctgaaactctttaattctgccacaaaaaaccactctagcttacactgtcattactgcaggaatattaaccattagttaatctgaaatcctaaaaccaaagaaacagtgaagaatggtaatgagacctgtgcccttttggatataaaggcagaaacggtattataatatgggctggtttcatgtgtgttgacatcctgttcaaggttattatcctttggtcctttctttagctcaaggggaaatatgacctactaatgctggatcaggtgaaggaaccttttaaaattcgtaaatcaaccttcattcatagtaaagtttaggtcactaggcacactgttgccttcaccatctgttgcttttggaccaaggctcctgacttggtctcaagaatcctgtgtttcctttgtatattcttatagcacaaattagccacctttccattttcagtgttaggtggttttagcactaatgagggcagtcactgaatgtataagaagtctctttttcttttcatgataggtcattcatgtcatagtcacctatcatgaagtttaacattttactttttagttgatccaactgtctatttttctgaccaaaacacagcatagttttagaccttttcactttttattaacttcataattagcagtacgcttccttttctggaacacattttgcaaggaagaaagtataaatacctgacgggaggaggtcaaaacaacaaaatgacattgagatgtggttgttgagtggttggctgtgctcattgcccagctaattgactgctcctgcatacctttttgatttaaatttgtggcatacacaaaattacccattggccggacgtagtggcccatacctgtaatactaacactttggaaggccaaggcgggtggatcacttgaagccaggagtttgagagcagcctggctaacatagtgaaacctcgcctctatgaaaaatacaaaaattagacaggcgtggcagcacacgcctgtaatcccagctacttgggaggctgaggcacgagaattgcttgaacctgggaggcggaggctgcagtgagccaagattgcgccactgcactcctgcctgggcaacagagcgagaccatctcaccaaaaaaaaaaaaaaaaaaaaaagtaaaaaaattactgattataacaaattgtggatcttttgggatctttaaaaatagacaaaagaataatttttagttcaaatatgtcaaaggggtctactctgtatgttattcaaccttttcagttatccaaaatagtatcttgtttatgtattttctgaaattaggtgtgtcttcagtagaatacaattttataggactttcatttacaattaagaatttgtttttagtgctttccgtttgagactgacaaacaggaatgctagtcttcttactaaagttccttggagaattcatttatgtaaccttgaaaagtaatttgtcctccccagcccccagtctttctctttagaaacttaagggagatttttgattttgacgtagaatctttctcttaagtgcagagaacacttatgcttattaataaatatgtctgaagtgtttccaccaaacattttagaccataacygctttcaagtgaccagagaggagagagcactttgccagtcttgctggaaagccttgccagtccacaggccagcttagaagatgagaatctcccctctttgtggcaatygaaagagggctaaaacccacttgatggggtcatttgaataaggctgacattytgtatgtaaaactgagagttgacagatgagtgtattagaaaaggaacaattctctgaggtcttaggacttgggcattattttgactagcaaaataacatgtgaaatttggcaacgtccggatcattaggaaagaaatttttctgaattcagagagttccaaggagaaaaacatagttttataaggaagtaaaatgctaacgtgaatccctaatttaagtcttaaattagagtctgacgtgagaagaaacatttaaatcagtggtatctgtggacccttagaggggctctgagacctgattttccatgtcctgcaaggtcaaaactacctttataacagtgctgtatatatgatttgtcctttcactgtgttgacgtttgtactattcattgcaaaagtggcggtggttaaaattgctgctaccttaacgagaatcaaggcacttgtgtcaaactggttgagtattcttcactgccacgtacttgtaattaaaaatgtaaaaaagccgatttcacttgagaacatctttgaagaaacagtgaaaattaataattttattacattttgaccctcaagcacacatttaaaaatattctacatgatacaatgggaagtatgcatagtaacatccactgcatactgaaatataatggttatcttatggaaaagcatttgtgtaatagtttttgagctgtaacccaaactagccttttttttttttttttcctcctcatgaaacatcatttttacttgaaggaatgactaacaaactatgattattcaggcttgggtatttggcggatattttgtctgaaacaaacaagaaaaccatttgacaatatttgttaccactgacaaaattagagcattaatgcagaatttagaattagaattttagaaaacttgtatctgtcttgcatctgtcaccttgagcttgcagcttcccaaagcttaaagactttttaaaaataaaattgagataataaagaatgtgattttttagatactgtataataaaacatgtcaacatttaaaagagctgcgtaactcaatgaaccaatattttccagttggcaaatgatgttaggaaagcatgcatggataaagatccattcaaagtgcaagacagatgattggattttagtgtaacaaagtatgaaaagttcattgatatcatttcagattctgtgttgcaactaatctttaagaaatgacaatttgttgaatttagtgtagcatcaaagaagaatatctacaattatgtgggagaaaaagaaactagtaaaatactctcccttttttgatggagatctccctggatctccgtcagccttgattttctttgtatacttaaaccaaaatgacatatcacaacagattggatatagaagcagatgaaaatctgtcttacattaagccacatattaaagagatttataaaactataaaacaatggctttcttctcaattcttttggaaagtaaagttttttttttctttttttttcaggaacataattatgttaacatataatgcaccttgtttttaaatgaaacagtgaaattttaaagtttttttcactttttatttctgattagatattatatatatcatatatatctcatataaacaaaagctttggggtccttgttaatttttaagtgtaaaggagtgagaccaaaaagttagcaaatgttattttaggaatagtgatgatgatacatgttagtcattgtgcagagggctttatgtgtgtattttcacatttaatcttagagactatccatctccattataaaatcgaagagacaaagtttcagagaagttaacttgctcagggttacacagttagtaaggaaaagagttaggcattcaacccagtattcatggtttaaaaagttctggattatatatgtattttttagagaaacagagtcttgttctcttgcccaggcttgactcaaactcctgggctgaagcagtcctccctcctcagccttctgagtagctgagactgcaggcgcaggcagttgtaccagttaaaggttctggttttgatatactgttgcatacctcgtcaggatctgatgtagcctttgacataggcttattatgcaaagagaatacgcagtgattccccactgtttatcagaacaattatttgaggctgactttttgcagatgggtatattgtgccacaccatcttatgatccgatgagtagaaattgccataaactttctgaaaagaaatttgtcagtgagtatcaaaaattctgaatgtttggatatcttgtgatctagcaattccacatttagaaatatttcctcatgacataattgaacaagtacatactgatgtatgttatgtgatgcacgttgtcgcagaatgatggagaaataattcagaaactacttaaatgtctaagcctgggaggttggttaaattaattatgaataatggaattattcattataaattataatggactacttacagctactaagaatgatagttgagatattattgatgtaaattgttcataatacattgtttaaatggtaaaagtagtctgtgaaactgtaaaaatatatttatatggtatgttaaatgaagtatatacataatatattgtttaaatggtacaagtagtttgcaaaactggaagaatatatttatagtacattagtatgttgtagaaggaaatatatacattgaaatgttaacagtggttgtctctgaatggcaagattatgggaaatttttctttgctttgtttagttgtattttctaatttaaaattttaaaagttgaaagcataacagcaactgtgagccacaagaaaggctggcctggtttgttgattgatattaaaatcaattttctaagccctgtcacttttagtgttacaggcttttggtggtttttagtactgttctcagtgagtcataatttgaaattaattataatctgtttgttgcagcttgtatatgaatttttcatamgatttttggaaagccaagaattccaacccagcattgccaaaaaatatatagatcagaaatttgtattacaggtaagcaaattattgtggttgtgtgtatttgtcatccagttaacactttatctcattttctcttcatgtttgttaaaaaagttttgcaatgacagttatatcacccacaawatatatatatatatataaacataagttaatttccattactgcctattaaaagtaataggtacatttaagtttatttatggtagaaatcaattacattttaaatagccaggaatgctaatgcctaaatccctacagttttctctaaaaatttaattataaaggaatttcatttatataaccttggtttgtgggaatcgttatatagcttaaagacttacatttgcgtaaggattcttaaagaagtgtggtgtagatctgttaaaactgagtaggcaagctcagacttcaaagcataagtaacctgtaataaataatcaaagtcagggtactgatgagatttcactgctagaaaatagcatagcttaacattctaaaatttccctaaagggattaactctcatgtctccatttggaacatctccgggaacacttttttcctgactcctcattgtgcatgttataacaatggatcttcctttttacctggaacttgggtgctttcatggcactgaagttttaggtaacacttccttgctcctgttgttgatatattcgtctctaaaaatgggtgcttgagccaaactggtgtagctctcttctgagtgacatgtggggcatctaatgtaggaaagaataaatgtttatctcctagtaagccggtaagaagaatttcaaatttaaaacattaatttgatctagcctgggcaaaagagcaagaccctgtctctaaaaataaaataaaaagtaaaacattaatttggcaggaaattggtctcctgtgccttactgggatggggctgataacctttgtgatctcatttccctccttaattaaattaatacatttggaatttaggatatataggttgaaccatagccaattttttgactgtttttgacactcaaaacagcagtttcatagggttcaatccaacagggtcaggcaagcttccagagagctgaggggcatggaggcctctctacatcctaagtaaggctaagtggaattaaacccaaagttcagatgtcagctcagagctgaaaggagctttggtgccttgcctgtgcggctcattagtacctgtacaccctattcccctaggtacatggggcggatccttgagcaatacttcacatttagagtactttggtaccacactggtgaatcctggctcacactttaacatgagagggtttggaaaagtgaggtctgaaatagagatggaaaggtaggtaaatagatggatacgtggatcacggggtaaataggtaaattggtatggattgttatgccagggaagcataacttatttcaaaaaaaatgtaagtgatacatagtagatctacattttgtattggaaagccttgcatgtatatagtgctgtctaattgtcagagcacctttgcctgcgttagttgatttgtacaacagtcttgtaaagtagtcatgactaaatttttatgccctccctcaccctccgccccattttatagatgcataaactgaggtctagaaagattatcaagtttgctcaagcacatttcctattctggatttctgtccatcatgccgtgatgccttcttgtgattccctcactgtaacttggagtgacttcaagggagaagtagccctcacatctgaagactaatgaaataatagggttctcctattttttgtgaattaatgtgcctaagaggatcagatagtaattctctattagagcctgtatttagttgacatggaatcagtaaatcctatggtcttactatgaagccagtgcttttcttacacaaaaacatccagggctcagcccagtgtgctgtccatggtagacagtactgaagataatgaaacttataatacgaaaacatcagagaaacccagatttggaaaggacattttgggttatgtattctagttctttagcaaattagtctcctttgagaccctttttcagtgaagaaaagccatatacacaggtagcttgttccatttttgttaggaagttctttttttatgttgaacctctctatgccttgtaccctttgtctttattctccccagaataatttcttagtatatctgtagcccagacataacctttcaggtcttagaacacagcttttgtgttcaccctttgactctttttctctataacagtggttgcaattcaaatgctcatagcctcatacatagtaagtctgaaagccaggggtcagacaataggatgtagactggttcctattaaatggggctttggctacccctcttcattcagttatccccagacttttctcctcgccaatccccaagataaatagaaatccagattcttctgtgaagttttctggtattactaaaatcttgtacagaatgaactagcccatttgccttctggatctagcctaccagctgtcagtatgcattttctcctctagaccgagttcttcgttctgtcaaccttctctcatttgttagttttgaagccttcagtatcctggttgtgtccatttgtcctctaatatgacatctatatttgaacagaatgccctgagcctggtcagcccagtgcggcttagagttggctttttcattcccttgtcgtgactttaggtttcttaaaggaaaagtctcatgagcatttcttgctgtagcatgacattgccaacttatgttaagcttctggttatagctggcttctaattgagctttctgcatattgctgcatgtttctcttcttttcccttttttaaacaaacagggtcttgctatgttgcccagattgggctcaagtgatccatctcagtcttccaagtagctgaaactacaggtgtgcaccaccatgcctggcttattgttggttgttacacagttggcttttttatctaagtgtagtacttggcatatgttcctgtggaatcatttatcccttattcatatctaccttattcactgtgtcttccatctttatgacatctgtaacctaaatatgctatcggcctcatctaagtcattgattaaaattgtttaactaggataaaacactacctattgggtacagtgcacactattatatatgggtacgctaaaagcccagacttcactgccatgcttctagtagtctattttgtgttgctgtaaaggaattcttgtggctgggtaatttatgaagaaaagaggtgtatttggttcattgttcttcggactgtacacgaagcatggcactagcatctgcttctggtgagggcctcaggaagcttataatcatggtggaaagcaaaaggggagcatgtgtgtcacgtggtgagagaggagcaagacagagggggcagaggtgtcaggcttttttttttttttttttttttttwaaacaaccacatctcacggtagctaatagagtgagaactcactcattacttcaaggacagcaccaagccattcatgagggacccacctccatacctccatgatccagatacctctcactaggccccacctccaacactggggatcacatttcaacacgagatttggagggaacaaaaaccaaactatatcaatgcaatatatccatgtaacacaactgcacttgtactcccaaaactataaaaataaaaataattttaaaaaaaagaaaaagttgttaaactagccagggttgagataggagcctttagaaattccctatattacacagcttcatcattaatcagtaatctttgagttttatccttgatccagaaatttactagtatattatcatccttcctgcatttcttaattttggttgtatggagaacatagagactattagatgctatggtaaaagccaggactctgtgtttatagcattactgtcatctataggccttgtaactttatcataaaaaggaatgccatttatctgccatgtggtattagtgaacgtctagagctagtgctgtttactgatgatcctgccctaagtgcttgcaaaccatgggtttgttcatctgtcctaaaattttgccagagacaagaaataaagtgtcagtggtgaagttcatttatatactttatgttttcagccccttcctcatttttccaattgttgccttctttactttccatctgctggatctgttataaatttgaccttcacaccagggctcaccccagttcctgaatgaattgtgaaagtggcaagcaggggtattggcagaatcagcaccaccattgagagcttgaatgaaatcatctgactaatcagtgcattaactgccatgttgggaataagccctgggcacctgttagctcccattttccagaataccctgctcattcatgttggtaatctgtaagttggcctcctgtccttttccttaccctttagtctgctgatgacttaccttcgctcccggtgccttctaagagggggccttaatttcttaactggttctcctgagatcccttcctggccagtttggttctgctggggagtgggtgggcctttggggcttgagggattgatgctgatattttaccccattatcccccgtctcactcattcctcctcctctttcccactgtgacttmactgtccttgaattgacaggtccttctaacctctgcactcggtagtcaggtctttttcacacccccgcttgtccttgcatttttctgaactccatcgtctcccatggtgccacctgttcctagtgtgtttctcttatgacatggaaacctacatccttttccttttgacaaatcaggatgacgtttaccctgtttcttttctttgggcagatttctattttctgtgggttttcagtggtctcaaaaaagaatcttggtaatctcagcttaaaatttctttcttcagttagacagaatttattgtatccatgagatttcaacttattttctgtagcagctgaatatgttctttgcagtcagtcttctgactgtcattcctctgtcagtgaatacaaaagcaaaataggaattgagctattttactatgacgtagtggaaagttaggaagctttgggtttgaatcttgacttccctatatattgtaagtatattttaggagctgagaatgtgaactttggggtcagaagaaactgcatacaaactctggcttctctgcctacttgcagtatgactttcagcaagtttgtatacctgttgtccaagcctgaatttcctgattcatgacatgggataacaggataaatgagatactgttaagtaaaacaggagacacgtcaaaatcgacagttgtcaaatctgcttagttcacttggcagtgtggatacaaagacaggatccctgccttcaatcttaaacaggtgactgaaaaccttgggcagattattgaccactcggagcctcagtgtcgttttttataaaatgacattaagatcacctatcacaacaagtcacagcaagtaggcttgttatgagataaaatgagatgacttgtaaaaatgtctactggtatcacctatggggcatagtagttgctcattaaatattaattcatcttttcacaaccccctcatatgttatctgcccgcattgatagaatgtattatttttcttgattccaataattttagttttatttatttattttgagacagagtcttgctctgttgcccaggctggagtgcagaggtgtaatttcagctcactgcaacctccacctcccgggttcaagtgattttcatgcctcagccacctgagtagctgggattacagacgtgcaccaccaaactcagctattttttgtttatttgattgtttttttgagacagagtcttgctctgtcacccaggctggagtgcagtggtacagtctcagctcactgcaacctccgcctcctgggttcaagcaattctcctgcctcggcctcctgagtagctgggattacaggcactcgccactacggctggctaattttttgtatttttagtagtaayggggtttctccatgttggtcaggctggtcttaaactcccaacctcaggtgatccacctgcctcggcctcccaaagtgctggaattacaggcatgagccaccaagcccggccctaatttttgtatttttggtagagacgtggtttcaccatgttggccaggctgctcttgaactcctggactcaagtgatctgcccaccttggcctcccaaagtgctggcaatacaggcgagtcactgtgcctggcttccagtattaattttaaaatcttcattttttgaaatagaattttaaaaatatatatgaaagttgaagaaggcttgaataaatgcagaaatgtagcatattgctagatggaaagactcaccatcagaaagatgtctatataatctccaaattatttatacattagtgcagttctaattaaaattagttttttaaaaacttgaaacgtttagagttatgaaataaatttttgaaaaagatgactaatgatatggtacttattaaataatatactacaaaggaaaaggtaagttaattaaaacagtatggctttggaacagtagaatggaacataatagcgccttaggtggagatgaccctgctgagcgtgccataaaacccataagaagatgtaccaaataaacgaatgaataaatatatgaatagatggctatatacacatatacgttaaattggcataattgtcctgaagagaaaaccgatagtattctatcaacttaaatttagacccaacaattctgtgagaaataatcagatatgtacaaaagatatatatacaaaggttattgaatgcaccattgctaataattattagaaaattggaaaataacttcaaagttccttagtaggaggtaattgtactgtggacattcatatagtgaaatattcatcagtttgtaaaaagaatgtgatagacctactcaatgatctattttaggtgaaacatgcattgttatagaacagtataatttttgagcctgtatctgttattttagggaaaaataatgttagtatttttgtcttagttcttttgtgctgctttaacaaaatgcctcagactgggtaatttataaagaacagaagtttatttcttacagttctggaggctgggaagttcaagatcgaggtgctggcatctaacgagtgtcatcttactgggtgtgccctcacatggtggaaggcagaaggatgagagagagtgaacccatgtcccaaatcccctttcatagtggcattaatctatttatgagggcagagcccttatgacctcaacaccaaaaggccttacttcccaacactgtttcattggagattaaatttttatcacacgaattttgggggacacattcagactatagcaatatgcattaacaattttgaaaggagttctaccaaattgttgttaattggctggaagggggtgattatgtgtgatgatcttcacttcctattttttagatatctctattttttatataaaaaaaataagcatatatgttgtaatcaataagaataaaaaatttcatctgcaagtacattctcattttattgccttgcatttttcataaacctcagctgattttgtgcattagccttcctaagactatttttgtatgatagcaccattcttttatgcccagtattcgttgcttccttcctttcaccatttgtatctgccctttgaaaatctaaagctcaaatgaaagcttcctgtgttgcctcaagtgcctttttcaataccttgaatttttcttccttatcaggaagcagtatagattggtggttaagtgtacagactgatttgaattcgggctctgccattttttttgtattcgaccttggacaagtgacataactactgtgtgcctcagtttcctcatctagaaagtagatgcaaaatatcataatcacattgtaaggttgttgtggagatttaacaactaaatacctatacaaactctcagaagtattcccaacacatggttcatattcagtaaacgttatgctggtggtgtcactaatatttttattaggattcttgttttgagaactttcttaagctctgttttctttaatagcttcagtccatgaaatcatatagtgttagcctgtcatgtcttacctagcatgttatgaattatttgaaatccaactcttattctaaaaatcattggtatccattcaactctacgtatatggttcttcacaggctgttgggttctcttaagatgttacatgggtttcctgtgtctctggattctcttcagttccactttgccaactgatttcctccaatcagtgttgaacataaatgtttattagtgccaggaacgtataatttataatgtgtgaaaaccagggatagcccatttaaatctttacagaggacagacaaatggtacatgattaagtagtgttggtatgaccaaaggagtgatggaaactgtggcgatttagagagcttggatcctgctgccaatccgctcccagtaacggttggtctctaggtaagtgagccaagtattgctagatcttttggcttttcaagagaagctggaaagccatattttggtagagccagacaaaacagtctgttgtttttctttttcttttttttttttttttgagatgaagtctagctctgtcacccaggctggattgcagtggctcgatctcggctcacggcaacctccgcctcccgggttcaagtgattcttctgtctcagtctcctgaataggtgggactacaagcatgcaccagtatgcctggctaattttttgtatttttagtagagatgaggtttcaccatgttgggcaggctggtcttgaactcctgacctcgtgatctgcccgcctcggcctcccaaagtgctgggattacaggcgtgagtcactgcgcctggccaacagtctgtcgtttttcattcaagggttttgaatgtttttgtttgaagggttttgttgttttttattctagaatagtatgactggctcacttgaatttcagtgtgatttttattaaatctagatttacataacctgtagcattttttgtgtactcacttaagtgtttggacaagaaagctgttagagatttatcaaagatagtccattcattgcatagtgcacttttgtctgtggtaatgttgatttcagacttaagtaacttggttaactgccttctagagctatgactatgtagacttgcctaggctttatggaacaattttgtctattcttaataaagataattttcatctgtattgggatggttgggaaaatggtttctttatgatcccccaaccccttctttagacctaaatgaattagcaatacttygattatttcattgggtggattattgtggcaagagtttagcaacatatttctaaagattactttcaactactctgcaaatctgaaaaacagtcagtggttgctgagagacatactattcaagtatccccgtaaacatatgtactgctggagattgctatttagtaatttgtacttcacatttgctgttatatttagctgaaaggtactgtaattatcatgtaaattatgcagatcatgcaaatcattcagcctgtccttaaaagtgaccttttgttattgtgtttttaaaaactcaagacaaattggacatgacacaaaccaacctattaaaaaaattttagttctaaactgaaataaattccacaaggccttgaatctcagctccaatacaaagaactattttccaaacgagttccttgaatatgtcaaaatgtttacatttctctctcacagcctatagcaagtaagtgttgggagcatttatttctacctggaattttatgagatagccattgccaattaccagttaacatcacttcatcctgtcctgtccagtgtataactcaaaaatcttgtaaaaagggctttattgctctgactcctgcattcagagccagcttcctggttgtataatttgtgcagttgtgctgggccctgtgcttagaagggccctgtgcttggtttagtgctctgctcttgctgtcttgaaactcttaatactttttgagcagggaccaccgcatgtttattttgcactaggccccacaaattatgtagctagtccctgcctgcttcccactaagtgcatcattatttagcacaatagctctttcttgaattgctgaccaaataggttgtcttaaaaatttaaatcacaaggttgtcttgaaatagatagtatgctcaaggggaaaaaaatggacttctttggtttgtggaaagaatgcttgaaattaaatggaggaaaataaaagcgtgtgacttggtggagttgttcatatttgtacgccttacactttcgaaagttttgtattgaatttccataggagtcttggagtcagaattgccagaagcttgtgatcgcaaccttttgatgccttgtccccattgtcctttctcagtatttgccccataggttgcttcattttatacagtgcatcccttgagtcgttctgattcactggagtcagactacctttggctctggtttctttgttctgggctgttttctctgtatttggccaaggtgaaagtatgaggaagatagttttcaggtagtaggagaaagttgcaaacaaagccagaaatgtggacatctgattttagtgctctgtggcactttggatgaaaacatttagaataccaattttatcggttatctatttgaagaattctgatgttctctaaaatcttactttacatggaatagggcagggtaattctttattatagcagagagcaactgggttgttttgctcgaaaycttttgctcttaatgacttttaaaaatagttttgataatgcctacttttaaaattccaatatgtttatatgatttttaatgaaaaatagcagtctcttgcctcatctttctccaaaccagagtcctatttcctagaagtaaccacacttaagtcttccagttgtttctgtatatttatttccatatttctaaacagcatgcttatactgctattttttaacttgtgattttagattttatttatgtctattgacttcctactgtaagccattatgtatctcccactataactccctctctacatttgttatatcacaaaatttgaatgaatcacatgatagatgagtactattgtatacatgttgttcattccaaggcacataattacatttgttttcttgtagagcttttttttttctttttttaaccctggaaaataggtgccttatttttttacttgctttcctgtgtattcatcactagtgtgtgctttaattctctgagagtaaccatacagcccttctcagtatggcccacatatcaactagtctatcagttactttttttttttttttcttggagaccttcttcctggagccctggtcatcctgctctaattggcactctgggccatccacacagtcatcccagcacttccctttggtgcccttctagactgtgtctttgcttgtttaacttcttctttggtggagcatatcttctagattcttcctaagaaagcatgaatgggatgtaagtgttctgagatcacttgtctgaaaacgtctttattctgcctacatttttttttttttttttttttttgagacagactctcgctttgtcgcccaggctggagtgtagtggcacgatcttggctcactgcaacttccagctgctgggattacaggtgtatgccaccacgccagactaatttttgtattttcagtagagacagggtttcaccatgttagcccatgttggtctcaaatttctgacctcaagtgatcagcccgccttcgtcttccaaagtgctgggattacaggcgtgagccactgtgccctgcctgcctacatactttattgacattttggctaagtgtaaatttggaactttcccagatgttttaaggaattgatccattgttttccagcttccagtgtgggtattaagaaggcctgcaccaggtgaatgccttatcctttataatgacctgtcttctttgtatcttctttgagatcttctctttgtctccacatccagaaagtgatgtgctttggtgtggatctttgttcatttattgtgcagaacacttaatggaccatatctatattgacattgatgactttttttttgttggaaattgaattgaattattcttcagataatttccttctcttcattttctgtttttctgtctccatgtctttctggattgctattatgtattggatcttctggtttttaaaatcttcttctatatattatctctgttttttggttatatgctctggggtagagttgctcattttaatgttctagtgcttctgctaaaatttttatttattatatgttgaacttctaaaagcttttaaaaaatttcctgaatatccacctgaataatagcactgttttatttcaaggatccagcatatttgtttatctttgaagatgttaatagtttccttcttgcaattttttttggtactcctagcattgtgcctgtttcctctgagttccttataattgtttgttgtggtcttttatgttaaaatatctggtgatctttgacttcatagtcataattacatgttagtctaccgaaaagttgcttagaacttgtgtatgttaccgtgtgcacatgtgtgtttatatttgcatggtgacacttggcaactggtgactttgaatggcataactggtcagggaccttgccatttcattaggaaaccctcagctgttagcatatctgtaggtctttcctcttgaggctgtcagtttcttccaaaagggactttctgatcttctgacttatacagaattgggagcctggtcagggaagaaagctggcaaatatgtcacttttaggtatgcagagttttatttcatcccattatttccaataagtgctttacttaacgtgtatgatgtctccaagattagatacttactcattctctccagacttacattgtaaatcatcaatacaccacatgggatagggatctggggggtcttctacagactttcaaccagtcctcctgtttttagctatttctcacacccttaccatcaaatatatctggtgcctttagtttttaagccttgtaagggttccgtggtgtgaactggcctgcttctcgttggctttcttccctgcttgcagaatggaaaaacacttagcagactggagaaagaggaaacttaagatagttacctcttgtcatccacttccatctttgagaagtctacaaataagtctaaattttctctccagtcctgtctatgccaaggctttcttctattcttattctttcactgtcattttagggaggattcaagaggagagaggttcaatccccctgcctagctggaagacccttacagccctttttcatttcactcttctcatttcattgtagatttatgaagttcaaagaaaggttatttggctaaatcactatgtagtttaaccctatttgtgagcttcaagaaggctggtttttgtaaacctggagttagtatgttgacaggtctgtctttgctctgtaatcaccttggaaacgctccagcttcttaacttcttttctttgactacaagctacctgttatattagggatggcacagtccacttaggcatttacaggtgtgggattatatttcttttttgtgtgggagtgattgggactatagatatgactaagcacactcatattattttgttttggaaatcagagctcatcagagttcatcctacccccccttgttttggcctgtgcactattatatttctctctcatacatcataaaatcatcaaaagcatgttctctacagagaagcagaaaaatagtttaatactgcaattcatctttctcatagaatatgatacatttaatatttgtggctttgtaaatatctaaagttaggcactcggcaatgcattttgttgagagcctaatgaaaacatcaaacatttcttgcttaattattgtgtattcattaaactcaagattaacagtatacaaggaaggttgattcaagttttgctaatactacacaccctcaaaccttctcttatgttggttacaagttattcattaaagccttttgaaacacttaaaagtagaaacgaaatttaaaaaataaaacttacaaggttaattatttctattaaccttggaatgggaatgggtggatgggtggattgggtaggtggattagaggtcttatgtcatttggaacatgttatagataaagagatactgagtctatatggggcctttttttttttttttttttttttggctggttggggccacatgcctttctttcctagatagaatgttttcctgtggaaatgtattaacttgcccattacctcccctgatgggctccaaaattgttcaacaatgtgtatgtccagcaatgaggaccatcgctggcacatagaaagaactcagtacgtatgtatttattgtattgctgaatgggcagagagctgtagttaacaacatcttctgtttggataggctgctaggaaaagcatgtactattgaacctgtgaggagcactcatatcccacttctaactcctcatttcttcatcggtcagcctggatgtctcttcctttagaagcctttgctgatcactccacttcttccaaatacagtagatgtgtctgctgtgtatttatacaacatcctgaactacttaacatgctgtttatttacttgtttgtattccccattagaataggctctgagaaagcaaagactgtatctgtcttgcttatcattgtatccctgacagctcgcccactggctggcttttaataagcacaccataaatatttacttgaaatactcatttttaaaatgaacagatgaatgaatgatagatggatggtggatggcattatgtagctaaaaattgtgtcctgtctctacctatttttgaagaccatcctttagtttgcgtttcctgccatgtttgaggggcctttttttggtccataactcttgtcttttattcaaaktaaaacaccgaacaaaagcacattcgattattgaccatgaggtttttattctgctgtcagtgtcaacctcatgtctaaatcacctgaggtcaaacttacatatatctggatagcctttttgatgacgatggtagtctaatttgtgtgttatgtgctcttgaaatgttttgctgtaaagacactagaactgaatttygctttattgcaatgatgatgaatgttaaaaaaaamaactcagtaacattcaaaccaatttccaagtttgttcttcagccagaggaacttgcacactgactttttgtaaaggtagcagatttattgtgttgtaattcatacaccataaaattcaccattttaaagtttccaatttagtggtttttagtatgtttacagagtcatgcaaccatcaccacagtatcattgcaggatgtttttatcatccctcaaagaaatccagacccacaggaggctgaagcaggagaatcgcttgaacccggaaggcggaggtttcagtaagccgagatagcgccactgcactccagcctagtgacagagcaagactctgtctcaaaaaaaaaaaaaaaaaaaaaaaaaaaaaaaagraagaaatccagacctattagtagccactccccattctactttctgtcactatggatttgcctattctgcttatttcacataaatggagtcatacattgtatggccttctgtgtctggtttcttttacttacttagcatgatgtttgaaagattcattsatgttgtaacatgtatcagttactttgttcctttttatggctgaataatattccatggcatcccattttgtttatcagttgacggatatttgggttgtttcagtttttagctattatgaatattgctcccatgaacatctgtgtacaagtttttgtgtggacatgtgttttcggttctgctggatatatacatgaaagtggaatcgcttagtcatatagtaactctgtgggagatttaaggaactgccaaactgttttctgaaatagctgcaccattttacattcttaccaacaatgtatgagggttccagtttctccatatcctcgccaacactttttattatccctctttttcattatagccatccaatgagtatctctttgttggttgggttttcttttcttttctttttttctgagatggagtcttcctctgttgcctaggctgtagtgcagcagcgcgatctcggctcactgcaaactccacctcccaggttcaagcaattcttctgcctcagcctcccgaatacctgggattacaggcatgtgccagcacgcctggctaatttttgtatttttagtggagacaggatttcaccatgttggccaggctgatctcaaacccctgacctcgtgatctaccccctcggcctccaaaagtgctaggattacaggcgtgagccagggtttgcttttctgtaatgatcaataaaatagagcacttttcatggtttattgaccattcttgttgaaaatcagttgaccataaatgtgagggcttacttttgggctcttaattctattccattaatctgtatgtctgtctttatgccagtaccacactgtcttggtattttggactaagttttgaaatagagaagtgtgaatctttcaagttttgtttccctcaagagtattttggctcttctggttctcttgcatttccatatgaattttaggatcaacttgtcaatgatacaaaaacaaagcagctagaacttttgatagagattgagttgaatctgttgtgctcactggcatttggctgaaactttagcttgttacctcttttggactagttgcgtggacctcattttgagcatgtagatgtgatgttatcaggatttggttattaactttagattacaaatgtttgggaacttaaacatgttattcacagccaggcatggtggctcacacctctaatcccagcactttgggaggctgaggtgggtggatcacctgagttctggagtttgagactagcctgaccaatatggtgaaaccctgtctctgctaaaaatacaaaaaattagctgggcacggtggtaggtgcctttagtcccagctactcaggaggctgagacaggagaattgcttgcttgaacacaggaggcggaggttgcagtgagctgagatcgtgccactgcactccagcctgggcaacagagcaatactccatctcaaaaaaaaaaaaaaaaagttattcacatataacatacaacagaaataatcaatgttcacttcgttgactatttacagagtgagcacacctacataacaagagtctggatctaaaaaggaccattgccagtatcattgagacattttgatgtttgttttgattcaggttttttcattttcctagatgttctagtagagctgaaggcttatccttttttttttttttttttttttttttttaaagaccgaatcttgctctatggcccaggctggagtgcaatggcgcgatcgcagctcactgtaacctctgcctcctgggttcaggtgattctcctgcctcagccttctgagtagctgggattacaggtgcccgccaccacacctggctaatttttgtatttttactagagacggggtttcaccatgttggccaggctggtcttaaactcctgacctcaggtgatgcgcctgccttggcctccccaggtgctgggattacaggcatgagtcaccacaggcagtcagcttattttaactgcatatttggaatatcagtaggtagcatagtgcagtggttgagctacggacttttggcctcaactgctggggttcaaattctagctttaccacctattagctgtgagaccgtgggcacgttacttaaccctatgtgccccagtttcctcttctgtaaaagggggacaaaactatctcattgggaggattaatatgtagattgcttggaaaattgcctgatgatcacagtaagtgccatatgtgtattagctattattcatattattacttttattgttgttattttgtatttgtatttctttagtggaatataagctccttgtctgacttgtttatcatgatatgcccaaagactagcactgtgcttggcacataatagatattcaacacattttttgaggaaggaagaaggggattttaaataatagaattcctaaatccttttctgaaaccgcctttgacagctataatgtctttcatttacaacagcttctggagctatttgacagcgaagaccctcgggaacgggactacttaaaaacagtcttacacagaatttatggcaagtttcttggtcttagagcatttatccgaaaacagattaacaatatttttctaaggtaagtggagtgtgatgggggaagaaggagaagcaaagttggtgtttttatgagtattaagtaaatctcaaatatctgaaaacggtgtactgacttctctttctccctttctgcctgccttccttcattctactgactctcctgcctcttcctctaccccctccccctcctctcctcccccatcttctcctctcctcccccatcttctcctctcctcccccatcttctcctcccaccctcctcttcctcctcttttcctcttcctctccctcctccccccactgcttcttctctatccctcctctccccctactttccccctcctcttccctctcccctgcttttctcctcccccttctcctcctcccccatctcctcctcctctcctcttttcctctcctctctcctcctcctcctctatcccctgtcctcctcctttctccctccctctcctcctctcctccccgctctcctcctctcctgccccctcccccttctcctcttttcctccctctcctcctctcttcccccacctctccctcccccatcttccccctcccctctcttccccccttctcctctcctcccccgtctcttccctccttttctccccctcccccttctcctcctcttctcctccctgtcctcctctcttcccccacctctccctcccccatcttcccgctcccctcctctcttccccccttctcctctcctcccccactcctctcttccctccttttctccccctcccccttctcctcctcttctcctccctctcctcctctcttccccccatctctcccccgtctcctcctctcttcccccctcctcctcccttttccctctgctcctcctcccttccaccctctcctcccccctcttctcccctctctcctccgctcttccctcctctcctccccctctctccccatcttctcctccctctcctctcttcccccatctctcccccatctcctctcttcccctctctcctcctctcttccctcctctcctcctctcttccctcctctcctcctctcttccctcctctcctcctcctctcttccctcctctcctcctcctctcttcccccctcctctcctcctcctctcttcccccctcctcctcctccttctctcttcccccttgtcctccctctcctcctctcttccccgctctcctcctcctcctcctcttctcctcctcctcccccttctcctcctcctcctcctctttttatcccttccttctcctcctcctctcctcctttctcctcccttttctcctcttctctcaggtttgtttatgaaacagaacacttcaatggtgtagctgaactgctggaaatattaggaaggtgagcacggtttttctaattgctaatctcagatgaatattattttaaaaattaggttcaggtggcaccaagagatgctcacctagttctcttgctgtatgtacattgggtctctctcatttgtgcctattagcataytttccagctgactctacaagacacaatttcctgttccccttgttccacaagtatgcattgccatttccactggaatgactgaaagagctgacagttcattcattactagaaagatggtacatctaattgtggtcaggctagttactccaaaacatcttattctcattagtttttaggctatctggtcctttgccttatctgttgaaagcaagtttataataaattggaaagattgccattttcaaaggagttgtgtatccaggtatagtccttgaacagctgcagcctggagtagtggaatgaattggaaagagcwgtggtgtaagtttctacacacaagggaggataatgtagctggacaatatgattacttaatcttttctcctaatatgaagagaaaaagaaggtggagtcacatggctttctctcagtgatttccctaggctgggcagaggtttcaggaatgagaaggaatgatgtctggaaatggaaaaggtcatatttaaggcggaagcaagcaaggcgggccattatttggagaaggaaaagggagggaaaataaagggttttgataaagagcttttggaaaccatctgactaattttaggagcacaggagcctttgttgggtgaccagaagcaaattttcttctcttaaatttccttccaactttttgtattccttgaagtcattaagaaatcctggctgggtgtggtggctcacgcctattatcccagcactttgggaggccaaggtgggcagatcatttgcagttaagagttctagaccagtctggacaatatggtgaaactccttctctactaaaaatacaaaaaaattagccaggcatggtggtgggtgcctgtaatcccagctacttgggaggcctgaggcataggaatagcttgaatcccggaggcgaaggttgcagtgagctgagattgggccactgcactccagcctgggcaatagagcaagatgactctgtctcaaaaaaaaaaaaaaaaaaaaaaaaaaggaaattctgaatgccactggggtgggtattatgttgttttgtacaaacaaactgattaagtttaattaatatcacaagaacagtttgtctcagttcaacttgtggtaacattgctaatttgtgtctcttttttctccctagtattatcaatggctttgctttacctcttaaggcagaacacaaacagtttctggtgaaagtattgatccctttacacactgtcaggagcttatcactcttccatgcacaggtaggaggattttgtacaactacttttagaagcaaaataaaaagtttgcaaactcgtttttttgatattgatataaccttcattttgtttttttggtttttkttttttgagacggagtcttgctctgccgcccaggctggagtgcagtgggacagtcttggctcactgcagcctccacctcccgggttcaagcaattcttctgcctcagcctcccgagtagctgtgactacaagcgcacgccaccatgcccagctaatttttgtatttttagtagagacggggttttaccatgttggccaagatggtctgggtcttctgacctcatgatccgcccaccttggcctcccaaagtgctgggattacagaggtgtgagccacggcgccgggcctatcgccttcattcccaaaggaaagagacttacttaagtttaaaatrctccccgagggaaataaaaatgtatgcattttttttctatgcacagtagaatcatggaaatatttttaaagtgggaggaacccttgtttggtcattttattttacagagaacttatatgactttcccaagtgcacacaataacatactgaacctattacatataataaaatgcacaggagcttagcagatgtagatctttggactatgtaatcatgttttaatgttcttgaatattttgttccatcctactttgcgttagtctatcagttgccctttttgcctcctgttctaggtcactcaccatgtctttatcactttctacacacaagcactctcacaagtaaacaaatcaatcagtattttcacattttttttttcctttaagccttcatcactttaaaaagcataccctgtcttgtccccattctaatttttgtgctaacactgccttgcatggtcaccatgtcactgggggtagataagttattgggtagtattttaaattttggataggaagattttaaatactgccagactctgactccctcttccccccattgggaaggttttgagtttgcataaaaacgtgacacatttttctaagcactgttcctctttaaatgtgaaattctctatttcgaggaaaaattaatccatatgtttctaatttagaacaccatcaaaatgttcttttgcgagggtggttttcttgtccaagaatctttacaagcccttttacaaatcttgcctttgatttttgaaatgggatatcatatttcatgattattattttaaacaatcttacttagatgtgttagtaccagatgtagaactattcttacatttctccaggttctgactggcaggtacaaccttttatctcctcgtgaaactgctttagtttgcatgtgccatttcaggcaattggcaaagtttttattaagtgcttacttcccatagaggactcttgtggaactacagtaaaactcagtactgttgatattagcaaagagagaaaggaagcccctgagatgtagctcaaagtgtatgtaggtgagataattccacaatatgctgaatgtgatgtctcacctctgcttttcattagctgcatatttcatgtcctaatactcttttttaaagaaaagttccctggagccttgttaatattagtctttggcttgaaaaagtagtttcttattttactttatatagattttatgataattaaaatgaattgaatgtgaagttattaaaagcagtctggaaaccttttaggaagttttaatagtgtatcttttgagcccttactgtatagaatttaaaattttgccttttattttattttttactcagctggcatattgtatagtacagtttctggagaaagatccttcactcacagaaccagtaagtcttttttccataatttcaaaaacttaagaaaaattacctttcccagaagtatatatgaaaaagttaaatgccatttgtttttctccttttcattttaggttattagggggttaatgaaattttggcctaaaacatgtagtcaaaaagaggtaagtgcttactgtcagagagtgttcatagcttactgaatattttgctgagtgccaaggattgggctaagcatgtataaaaccgcatcatcagggctgggcgcagtggctcatgcctgtaatcccagcactttgggaggccgaggcgggcagatcacctgaggtcrggagttcgagaccagcctgaccaacatggagaaaccctatctctactaaaaatacaaaattagccaggcgtggtggcgcatgcctgtagtcccagctacccgggaggctgaggcaggagaatcgcttgaacccgggaggcagaagtttgcagtgagccgagatggtgccattgcactccagcctgggcaacaagagtgaactctgtctcaaaaacaaaacaaaacaaaacaaaacaaaacaaaacaamgcaaaactgcatcatctcatttaaacctcattgtaactctataaggcagggctgtcagaactcttgttttactagttatgaaactgtagagaggttaaatagcctgccccagtacactaagtaagtacagatgattaggccagaactcgcctccttgactcctaaaccctgtctttttattcactgtgctcttcagcctcgctaagcccaggccaggccccaatcaggtgtccagttgtctagctttgttgatgttcccttccgagtggcccccttcataatatgaaggttttgctgtcactgtacatagaygctagagcagcctgcccaaatactcattttaaagcatggtataggtggatcttgctgtgtcatcttagaatagacaacagacctttagtttcagccattcacaaatgaccctggggggttcaggcctacaatcatttgtacctttgctgagaattcaccaggcatgtgctactttgtgaggttgttatggggtagtgcatgagtttcttagctggagttgagcctaactgagcaccagatctgcagccattcttctggaaggttagcaaccatgtggaaaatggctcagaaaaaaagatcagctgttagttttatatttggttaaaactttgggagaaattccatatacatattaacaaatggcaagggtctactatattttacttttagcagaaacgccttccttctcaaatcagcttcaattctccaaactctattttaatttcagaaagtcatttaatttcttaaaatctgttagataaaattgaactgtgcattgctacccagatacatctcaaaatatgaaggcattgttatttttcatattttgattgctcactttattttttcaaagtaattattttttcatagctaaatacgtaaactggtttttatttatctgtcattttcccattatatttaaaacaattgactctactgcagatttggctccatattgtgatctaaaaactctgtttcttgcggcacccggtgctgagttcacaagattcactgtgctttgtagagagcaagcgtgtgtgtgtgtgtgtgtgtgtgtgtgtgtgtgtgtgtgtcgagaatgcgtcagtgcatgcttatgggtttgaagtggcacctgcatgtgagtgagtctgctcatttgtgtttcttgaactttttgttgtattaatgagtgcgttctagagcattgagcatgtagcaggggctgtacgtatttggcaaataaccacatttgaacttttgcctcttccatttaggagggccaccttctcattgttttttttaaaaaaaaaagtgttgtggaaagagagctggattactaataatagagaggaaggccctacggggtcagttttgcttctcaggggccggtgcagtgtgtgagtgtccctcgttctatgtaatatatataccaagyagagtattttttscaagtaygyagaatttttccaagtaccctatggtgaattctttgtggaaygaacatcttctaacatgggataatgactggttcrtgtatgtttggttttatgtgtaaatttttcttaaaataatccaaactctcattaatcctccttgttcttatggattttttttcatgawgtgcctcacatcttgtattttgcttgtacttacaggtcatgttccttggggaactggaagaaatattggatgtgattgaaccttcacaatttgttaaaatccaagaacctttgtttaaacaaatcgccaagtgtgtatctagcccccattttcaggttagtagtaaagaggacatgagccagggagcatgagttattttggttaaattttatttgtttcaaaagcaatgtaatggaccctagctacctattgtttatttgctatcccctcacatgatgataattttaatagtggccagcttatcttgagcacttgctgcctaacagccacagtaatggtgctttctctccagtaactttaattctcctaacaccctgcaaggagggcattatgttttttttttaaagacatacagatgtgaacactgaagctcaaagtggtcaaaagtatttcagataatttctaaataagtgggctggtgaggtttctctagtgtgtaagagagaatgctaaataatgtttaagaggaaaaggagaaaacctaatattccttactatgctagatactttaggtacattatttataaatgtcccattatcctctgaagcttttctagatgaaaaaaaaaaaaaaatgaggcttggagaacaatttactataggtcccaagttaatagagagtagagtcaaattttgatctttggtgtagctgcttgctaaagccggtgaccttcccatagcactgctctgcctcctcgtggccactcggggcaacacttttctttcttggggccatggctgcagtgctgtggaacccacacaggagggaagaagggtaaactgggggagcacacgttaggtttgattctttggctgtctcacctaaggcccgtttcataaacctagactstgcctattgattggaagagattgttcagactgtggttcttagcgcagaaccagacctctaacggtgtcatttgatggcggactttttccctaagctgtcaactatgctgtatagttagagacactagctgctgctgttgttttgatttctgaccaaaagacatgttaatatgttaaagcagtgactttatggcagtctagcagttgtaccgcaaagcaagaaaaaagaagatagaaatcatgacaagcctgaataaaaatggaaaaattacagaacagtatatagatattttgataccactcagggcctttagtgctcacacatctggattgtttaccttatttttttcagttttcagcaggatgtttggcattatggaggtcaaggaacaagtatttttttaaaaatgagcatcatcggctgggcgcagtggctcatgcctgtgatcccagcactttgggaggcygaggcgggtggatcatgaggtcaggagtttgcgaccagcctggycaccatggtgaaaccctgtctctattaaaaatacaaaaattagctggacgtggtggcgggcgcctgtaatcccaactactcgggaagctgaggcaggagaatcgcttgaaactggaaggcagagattgcagtgagctgagatcatgccattgtactccagcctgggcaacaagagcgaaactccatctaaaaaacaaaaaaagaaagaaaaaagaaaggagaaaaaaaaaaaaagagcatcaccagaaaggcytaagcgttactcagaagcttagaaaagagaggccatgtcttkgtcagcttgggctgccataacaagactggcgacttaaacgacatttattttctcacagccctggaggccagaagtttgagatsaggatgacagcatggttggtttctggtgagatcctgctttctggcatgcagatggccttcttcttgctgtatgctcacgtggcctttcctggcatgtgcatacagagagaggcaatctcactctcttcctcttcttataaggcccctgtattatctggttaggaccccacccttatgagctcatgtaaccttaattacctcctaaaagtcttgtgtccaaatatagtcacgttggggattaggacttcaacatatgaattgtggaggggacacaattcaatttgtcgaagaaagaaaaaaggattttaaattatttggcagaagwaaaattgagaacaaagggaagaggctcttatttattaagtgttcattaataaatgtttgctggttcatccacaaacatttattaatgaatttgctggttcatccatttattgagtggccgccttatgtagccagacacttatcattgcttgcttcaggtatggcattaagatctgaggtctgcacgctggtgacactgcctctgtgtgtgcagaaggacagtggatcccaggaaagtagtggctctgtcctgttgtcagacacagtaatttttaactttgcataaacaatacctttcctctttaaggggctggatacatacttttattagtgggtttacatattaaaatggatatataagagattaaggaagttgttagagttaaatggcaggtaaatattggattctggaggaatgtccaaagagaccacgggaggatgccagtaaagaaggaggcacctaggattttcctctaaccagttagaatgttcagaacagcctcattcttactyctttttttctccctctccttgcctcctgctttatctgtgtcagttacgtcatttgctttgatgattcccaaacacattgtcctcgtccatgcctctgtcctcctttccttaatgccctctacctggaatgccctttccttcatccttcgaagccgagcttaaatgccacttgcctatgttacatttctttcttcttttttttttttttgagrtggagtcttgctgtgttgcccaggctgcagtgcagtggtacagtcacagttcactgcagcatctgcctcccgggttcaagcgattcttgtgcctcagcctcccgagtagctgggaccacaggcatgccccaccatgcccagctaatttttatgtttttagtagagatgggggttttaccatgttggccagactggtctcgaactcctgacctcaaatgatccacccaccttggcctcccaaagtgctgagattacaggcatgagccaccacacccagccccacctatgttacatttctgccacccttctgtttcccaagtcatctggattgttgattctgctcttttcccctccttcccctgacactttattcatatatctgatatagcatctgtcacagtttacattggataggcttgtagatgccccttctcccaccagtgtgcgaactctttagggataacagagtaaagaggttaagaatagagactttggaatctgccacttactagccatgtgaccttgagccaatggcttctctgagtctcagattcttcatccacaaaatagaaaagtaatggtaccaactctgttggttgtgaggaaatgagatattatatatgtgggacacttagcacagtgcctggcatatagtgaacatgcartaatgattgttttctttgtactctcagggtctggtgcctaatgagtctcagggttttgttttgttttttgaaccaagctgaataatgtaaatggaaaaattctgttttctcagtgtctttcggtagatacatcttataccattttgttctcttctaaaacagggcttcttaatctgtataaatgaaggaagccacccctttttcccttttcccctgtaactaccctttttagagattttaggttttgtttttgagatgttcttttgaattcatgaaatccaagatgagccaatcaggcccagcagaccaaattagagccagttgatagcatggtgggcagagaaaagggatctaagagagcagagagggtaggtgcagccagtgtccctgagaccagaaactgagcagacatctcctggcttgcacaggaagggaccagaaacaaactctggaagaagccctagaaatgaggccccagtctttaccatattgtcagtgtaaccttgcctacattactcagtctccctgagtctctgtgtcctcacctgtaaaatgagcacaatggtatctccttctgggatggtggtaaggatgatacattctacttgctgtgtaggcacagtgcctgcccataggaggtacttagtaaatattggccgctctacagggatgagcaactgtgggtgttcctcagtagctgtgactgaatgctaaccatatgctgggccctgggttcgatctaagtgtgtgtgatgaaaaacataagaaaggggaccagtgagatgtgctaaagtgatgtcaggaaagtgtggaatcagatgacatgggcagaattagagaagaatataaattaacaggaaaacttcttttccttccctgagtcgatgaaccacttgaaccactctggactttttttttggtgggaggagaagacacggtcttgctctgtcacccaagctggagttcagtggcatgatctccactcactgcaacctccgcctcccaggctcaagcagtcctcccacctcagcctcccaagtaggtgggactataggcacatgccaccaatcccggctaatttttgtgtttttgtagaggcgaggtctccccatgttgcccaggctggtctcagactcttgggctcaagtgatctgcctgccttggcctcccaaagtgctgggattacaggtgtgagccaccgtgcctggcccactttggaattttccaagagattaaaaatccacaaacatttaaaatgtgggccaggcacggtggttcacgcctgtaatcccaacacttttgggaggctgaggtgggcggatcacgaggtcaggagatcgagaccatcctggccaatgtggtgaaaccccgcctctactaaaaatacaaacattagctaggcatagtggcatgtgcctgtaatcccagttactcgggaggctgaggcaggagaatcgcttgaacccgagaggcggaggttgcagagagccgagatcgcgccactagcgagactcccatctcaaaaaatatatatatattaaaatgtgattaatatttaattttacctctaattgaatgatttacaaatagccttttgaaatacttttgtttggraagatttataattttgttttatctttgtctttttctctctcttaacattttatttttcttttcccaaaggtggcagaaagagcactctattattggaataatgaatacatcatgagtttgatagaagaaaactctaaygtcatccttcccatcatgttttccagcctttataggatttcaaaagaacattggaatccgtaggttttcagtttctttcctccgttctcttcctcccttcctctctttctttcccttcagccttattatgtgccagatgctgtccttgttgctgaagacgtatgtgaaaagataaaatccttaccttctggggattcactgactggagaaaataaacagatactttaacaaaataccggttaaagtatctgtttactagacaggcttcttgatctgtctatgaaggtagcagatctyttggggaggcactgcagctgagaggagaggtgtgtagatactgacagcatggccatgcttagactgaatctgaaaggaatttggcaggtggatggcatggggagagccctttcagacagtgggtccatccatcatgttaaaaggcacaaagatgtaaaaagcagctgtcagtttctgagacctgtgagtttgggagggctgaggcacaaggtcttttggggagggtgctagaggatgtggctagaaaagactgtgggactcgtgtgagccttcaccaagtagatgatgaggaagtactgaagggttgttaagtggggaagtggtctgactaggttttcattttagtgtgatctatttaacagccaactcagtcgctatatgtatctcttggaaaggaaggagtttaaaatcatcaagggaagtttaacatccagccctatgaaagttaaagcattctgaatttgaatgcctttacatttttctctgtggaatagaaggaaaatttaatgtggtatttaaaaattgggagatacaattcagtatattcataatatgtttatctttaaaaattttgcatgtaattataaaatatcacatttctaatttttcaaatttgcctaattatattaatagaacttgtaaaaataaggagctgataaacagttaagtccctttatacagatagtctcttgaggacctagagaacggttctagcaagtgtctgtaactactcagtatactacatttggtgctttcccatcactgcccttgggaggaaggtcattctggaaccttaacagaaaagaacttaaattttccttttaatggcacaaggcagaagctacacagcaagtgtactttcttgtaaatgttttggaaacatcagactcatggtttatttaatatatggctaatttttaccaatgcatttttcagtggtattaggagcatgtttgttgcaaaacggaagcaacggatatttttgcaaaaggaaaagctatttagactctagtctgaagctatcaagcccatcataaccttgtcctcacattgcccaagagctaattcttgttaagtatgggctaccattttggctgtttagctgtatagtgtcccatagctaatagcaaccatcccagcttgccagttatcagcatatattttgggtcagcaggactggtgcagatcagagctagacagataattcatattgaaccacccaacctacatgagggcttgatttcatttctttggataagaataatttatatatatacacatatatatataacatttgtttctagggaagtagcttctgattttgatgaattatgtgttatttagaaaatagaattctatgcaaattcagatgtctaaggttagtgctatcacagatccttattttagggtgaaattgctttactattatacttgcctttttattaaatgaaattatcaaatgcccacaggcagctctattctgggtgccaataattagaagggcaggccaggtgtggtggctcacgcctataatcccagcactttgggaggccgaggcaggcagatcacctgaggttgggagttcgagaccagcctgaccaacatggagaaacctcgtctctactaaaaatacaaaattagccaggtgtggtggctcgcttctgtaatcccagctacccaggagactgaggcaggagaattgcttgaacccaagaggcggaggttgcggtgagccaagatggtgccattgcactccagcctgggcaacaagagcgaaactccgttgcaaaaaaaaaaaaaaagaaattagaagggcaaagttagattttttttctagttctaccacccctcagaaaattatcttgccttgaaatctcttgatgtggaaatgaactgtaggtcattttcagttgttccaactaaaaaaggatacagacagtgtgcagtacgagaaatcattcagacaaaagttgtgcttttgctttcttcattcagtatcccattttataagactaactaacacactcctttttttctgtgctttccagggctattgtggcgttggtgtacaatgtgttgaaggcatttatggaaatgaacagcaccatgtttgacgagctgacagccacatacaagtcagatcgtcagcggtaactttttaaagcttttttgtcagctgtgcataaagctattgagttttttccttgctctttgctgaagttgcctaattgtaccccaaatcttaagcagcacaattttgtttacagtcatgcattrcttaacaaccagtatatgttctgagaaatgcatccttaggcaattgtattgtgtgaacatcataagtatacagtaattacacaaacctagatggtgtagcctactatgacacacctgaactatgtagtattgcctgttcttcccaggctacaaacctgtggtgaataccgtagccaattgtaacacaaatcactaggcagtaggcctttttcaaccctgttaaaattttatgggaccaccgtggtatatgtggtctgtgttgaccgaaatgttgttatttggcacatgactgtatttatatattcatttttgcacacttattaactgtgtctttatttatttattactgtgccactgagtaacaaagcttcstgacactgtcattttgataaagcccgctttctttcctttctttaataatatttcasttctgcctcagggttaagagcccagcatttaactggtattttaggttcacttaaagggaccatcaggtagtttgctctctgggattcactcccactctgaacttacttgaagtataattgggcagatcttgtacttcactccaatagcagggggaatgaggcaccatttatctagctcttgggcccaggacttactagaacccaacaaatttattacaatttaaagatcagtgaaaagaacatgaaggttaatagtctggtattaaccagaaatgtttgagaccatatgggagaacaaaccagtggaactctttgcaataaatgcttatggcttagtaaaaatcttgtccaatgcattctactttccaaaagatgtacttggggagattatagaagtctagagagctcttagtagttgcgcctgtggtttggctttgatcayccataagcagatgtcagctttgtatatcataaagctatggaccttagaggacccagagatgtgtgcgagtgttcatacccagggtcttgctgaacctctctggttcccttggtgctttgctttgtctcatttttagtctgtcaacttgcattttattgataaaaagagcaatgaggggaaaggtttgatggcagagggaccattgcaatgatttttttgttttaagttaccagggatgtggtttatgaaaaccaacttaattatggaatgtggtgagtatttagctgagaatctcagaagaggctgggattttttacccagaatattgggattattatcaattatgggatatgttattccatactcacagtttaaacaacttttttttttttgttttttgagatggagtcttgctctgttgcccaggctggagtgcagtggcgcgatctcagctcactgcaagctccgcctcccaggttcatgccattctcctgcctcagcctcctaagtagctgggactacaagcacccgccaccacgcctggctaattttttgtatttttactagagacagggtttcactgtgctagycaggatggtctcgatctcctgacctcatgatccacctgcctcggcctcccaaagtgctgggattacaggcgtaagccaccgcgcccagccctaaacaacttttaattcagtatattagcgattgttgcaaattataaatttatgataaccctccttgccccaaacttaaaatctttaaaggatgttacttaaaaaaacggccaagggtacattttaatactgtgttgcatcgttaaaggtgctttgtgcataacatcttctctgaaagcacattattattatcctagttgaaccaggattaaatccgtagaatctcatcaagaatattgaagaacttggctgggcacggtagctcacgcctgtaatcccatcactttgggaggctgaggcgggcgggtcatctgaggtcaggagttcgagaccatcctggccgaatggtgaaaccctgtctctactaaaagtatgaaaattagccaggcacggtggcatgcgcttgtggtcccagctactagggagactgagttgggagggtcagttgaacccgggaggtggaggttgcagtgagctaagatcatgccactgtactccagcttggacattggagtgagactctgtctcaaaaaaaaaaaaaaaaaaaaaaaaaagagagagaatattgaagaacaacttatttccactcaaattatttggtttgtatttagtgaacttcaataataaaactattttctggttattatctaaactaaatagactaaacccttgaaaaagatgagaattaactaaggggaccaggaatagataaaactattattttatctattcctggttgaggttgattatgatattctggcatattacagttatttataatgagtgtactttcttaatgagaaaatgggggccaggcgtagtggctcacgcctgtaatcgcagcactttgggaggccaaggcaggcggatcacctgaggttgggaatttgcgaccagcctgaccaacatggagaaactccatctctactaaaaaatacaaaattagccgggcgtggaggcacatgcctgtaatcccagctactcaggaggctgaggcaggagaatcacttgaacccgggaaggggaggttgccatgagcagagattgcatcattgtactccagcctgggcaacaagaggaatcccagctctttgggaggccgaggcgggcggatcacgaggttaggagatcgagaccatcctggctaacatggtgaaaccccgtctctactaaaactacaaaaaattagcagggcgtggtggcgggtgcctgtagtcccagctactcgggagggtgaggcaggagaatggcgtgaacccaggaggcagagcttgcagtgagccgagattacaccactgcactccagcctgggcgacagagcgagactccgtctcgaaaaaaaaaaaaaagaaaatgggtttttaaaagcaagaataataatttgtcaaatgagcaatagaagggtgtactgacagatggaaacattggtttctccataggtgtgggaataggacaagggaatgaagaaatttagttggtactgtcagagaataactgaatggacaattttacttcaggatggcaagaagttaatggtttcagttcagatcaaattttgaagtattacaaatctgaaaatggtgggtggaataagtacttaacactgttagatacatatgccaacattagtgctatgtaaaattgaaattagaagagaatttgacaatatcccctgcatgacagtgtggttaagcgttaaaatttccacctacagggagagagaaaagtgggaaagattgggggtgacaataactgtgtcagcaatatttaggatttttaaagatagagttgtcagtatgaaagccgtgtgataactgagcataatgctcagttggaggaaaagcccaacaggataaattgcattgagtgccatatttgatcaaaaacatgaaacactttagtaacaagatgatgaatgttttaatgatgtcaacacttaattaaccaatttatgcctagtgttccattattggaacgctaagcttgtgggagttatttctatcccactgctcaaggtcatcgtcaaggtctgatttttcacaagaaagttttacaacctctggcataaatgggttaaaactgcaaattagggcaatgtgaacctgaaatacattgaaatgttttttagttgagtaaaattccaagcccttgcttaccatccccttatctctccaaataaaaaggtcatattcatcgaaagtcagcaggatctatacaattgatttatatatacccaaattgtgttttttgctaacattgatttagacctcataattattcccagactgtactgagaaacaaaaagtgataatttgtcaaacagcttgattatgtttagaatctggaatgcaccaggagtggtggtgcacacctgtagtcccagccactcaggaggctgaggcaagaggattgcttgagcccaggtgattgaggctacagtgagctatgattgtgccactgcactttagcctgagcaacagaatgagaccctgactctaagaaaagaacaaaagcaaaaacaaaaaagccagaagaagattggaggattatctaatcttgcccttattgtcctataagtgcaattttttcagggtcaaaattaacaaataggtaattttatgaaaactagtctgcttactgaaatttatattgtgcagatttgtatttgagatagctgaaactaattatggtaaacaaggcctaagttatgaaaatattacctattagatcatgatattaattaccatatggctttactaagccataaacatttattgtaaagagttccactggtttgtgctcccatatggtcttaaacatttctggttaataccagactattatggcattataattcaacatttcctcaagtctctagtggaataagaatataaaattacttaggtttttcttgagttttttgggagttggaggggatgaagattaatctctattgctctagatattaatataacttttaaaaaacattggttataatgttttaaaaaaaatgaggcattggaattacatacaaatttcactcaacccatgtggatttccctgcgtagaaattgtactgtggctgaagttttaatccttgctaagtggggtagtgcatggattacatccccatgcctgagatggtggagcccccattttcaggaattatctgaattcctggatttatgaatgttaatctggatcagcatttttttttttttatttttttttggagacggagtcttgctctgtcccccagactggagtgcagtggtgtgatctcggctcgctgcaatctccgtccaccacaatctccgccccccgggttcaagcgattctcctgactcagcctcccaagtagctgggactctaggcatacgccaccatgcccggctaatttttgtatttttagtagagacggggtctcactgatgatccacccgcctcggcctcccaaagtgctaggattacaggcgtgagccactgcgcccagcctgggtctgctttttattggttcgctgcaacatggaaaaaaaccagagacagtgtagtgaattatttttagtaaatgtgaatttatataacttacaatatagtcttatattcctgcatcatgtacttcctacttggttgatgttaaaaatcctttttttgtaaaaatgtaattttaaaatgtccttggcaaaatataaagtttgtcgattctaatttggacatctaatttttgggggaagttttaccaaatagtgaaatctcaaagtctgaaaatcactaaatttaaaatcagtgaaattgatattgaacccaatttgaaggcttgatgcattaaaatttaatacttaataatatcaaccaagttcttttcagatcattaaaagtgaaatcacaagttttcagtttcttctaaactactgaagaatttaaatatgcatgaggtgggaaaaataggaataaaggagcagatatattttcttgacctactatattctctgtatcagtgtcatctccagcatcctttttgagaaactatttggagataaagaaaaattaagattcttactaagctgcaagtgaaaatcactaatatgcccttgattttacaataactgatgcatataagtcattcccatttttgtttcttagtaattttaaagttaattttctcaattaagctaagtataaaggagtgttaaggtgaaattgtaaaatattcattgttgcataatctcattaaacctcagctgtttacattgtattctgtttcttcctcagtgagaaaaagaaagaaaaggagcgtgaagaattgtggaaaaaattggaggatctggagttaaagagaggtcttagacgtgatggaataattccaacttaacaaaaacaatgacaacaacattactaacctgtggagtcacacgtttatgtagtagaagatggagcaacagttttctgtattgtgcaactttacagtagatttcacctttgtttcattattacagcagcactgtatatacctgtctctaagtaaaggaaaaaacaaaataaggacttcaatccaaagtttggacagtagatggacttctcagaactttgcaaacataatcattgttctcaccctcttttaaaaaaaaaaatcggtcttcaaagatctgttgatgaaattgctatgttaaaattccattatcgggagttccttatttatcactagcagagagtatgatacaattttcaaatgtgaacaatcttaaatttagcttgtctttctgctaagctgttaaatgtatttatagtaaaggaagaaaaaaagactgtcatttccttataagtttgtgtaacatcctcctctggataacttgactgtaatttaacatctttttcttttgcacatcttcctgagttgaatgtccacgtggaatggggtcatgaattataaaagtccctgataaaagttttgtttactggggtgaacatctttccagtaaccaggtagtcctggtactcctttagttttaaaattaggagttaagagagaagaggtgataaacatagtagggaagggaatatcggattcatgcatcagtttatggtgaatccaaatcaatgtcttgaatcctttgaaaacaggcactgggacatcacaggcttcagtacctgaccagtattagttgcatatatcattgaacacacataccagagatgttttagaaatgtgagaaaaacatccttttggaccatttgaaataagaaagacaaacactaaacaatacaaccatgaaattgatcaccgggattgcaaatctaattgggaaaagagttgagcaaacagcttggactgtttggagttgttgccttactttttaatatgtatttataaagtattccagcaaaagaggatgtagcctctgggaaaaaacaaacatgttacagtgttttttgtagattctcgttctatatctcatcacagcgccagccctgtttttagccggaaaggattcaggataaacattattatgcattctgaattggatgcatattcctaactactgtatttgttaccaaaagtggttctacaaatgctactgaaaaaaatctggaaattcctaatgtcctgagtattaataataaagtttaaaaatgcttttatatcaaaggtgcatcgtgaccaaattgtttaagaaaaaaaaacaaaaaaaacaaaatctagggctgtattatatatatatatatatatatatatatatatatatatatcttattggctctctgctttgtatttaaatgaagaatcttacatcttgggtaggtaaactgctgataaaatttgtgtacagtatgtacttacctaatgcagttgcattattacgtactgaaagatatgtgtttggaggtttatttccaggatgcatttgcttgttttggtcatggcagcagtgagttggtaatcctaaaccatcacttccagcagtattcatggtatagagctgatctgtgttcatatgttgaattgtgatagtagcaaacatgaacatatgaactattgttgctcttaatagaaatacaatataaatatgggcttgtatattttcttccttacatttaaatataaagtagaatacgcagttttattattttcaagaaaaagaaagagaagctgctgacctttctcccccataaagtttttcaggatgatcaggtcacagtgtgtacgtaagagtcagctaattatggatattgtcatctcggtaactttgtaaaaaaacaaacaaaactggcattgttaattccaaaaagaaaaaaaaaagcagtaaaaaaaaaaagtcatatgcaacaccagacgcaacatggtttaatggaattaatagtttttttttttttttttttaaagaacattgatggggattcactgtaaagttggcagaggctgccaaagacgaaacaactgactttaaaaatgctggaacaatgtgataaaaaataaatttgtaacaaatcttctcctttttagcccttgtcattttagccctttagtttcaactctgcattatatttagtttatatagtgtaaacttttgtttgccattaattcatctttttaggtagaagacattaaaatcacaggtttatgaagaatctctgcycattggaatgaaatgcagtcatttgaaatgagaaaggccaggatccttttttgtaccttaccctgtcttcaagagtaaaggtgaacacttacagctctcctccttgatgtcaattttgtatgttgatcattccaaactgagaagaataaagccacattttagacatatttatagaatcaattaaagctatatgtctaaaattcgtagggcaacttctgagaagaaacaccgtctttttcttttttaatggaaagtgacaatgtgacattagtcatgttgtgtgcggtgacgcagagtaactgaggtaatctgactgttgcactatgtgacatatttcaggacgtacttgctgcatttgcagcagccctctctctctgtcccttcccacaattctgctgttgctgcaacttgagttaattgtgacaaatgcatctttgtgttatattttgtttgcttcataatttccagaactatatataaatatattttttaaatagcaaatattgtagttagtgagtgatgatcactccaaccttatccttaccatattggtttcagggataggattaagagtgtctttggaagagaaaaatacrcacaaccctgtggtttagaatgacgctgaggccttaggctgtgggcctagaacaactatgtgagtgaattcacccatctcatactttgaatcaagcatgcattcctgtttctcattgtgaagtatccccagttgttttccttcagtgttgagtttttgtccttttaaattttattatattttgctctccctaacatttgactgttttttataaaagaaaagaaaaaaaaagaaataaataataccctcgatgccactggatactcacaagcagggttatgctccttcatcttgggcttgtttgcctaaatgaaagggtttaatttattttgtacctcctatgcgtgggatagtccagggtgcagagccaggacttgcttgtaattgcacctgctatacttaaatgtatagccctaggctcaatcacactatggaaagaaacaaaaaaagtatatttagagctttaaaagcttttttatttttttgtggggatgagggtgggatgggaaagggatgtatggatgttattggcatttttaagtgtttagagttttttggggtttggggtggttttttttccttgttttccttttttccttttaattggatgcactgacctggcccaggaaatgaagagattctcttttgatgctattaccaatgttatcataaagtgacagtcacctgtaacaaaaaggtggcaccagacatgatcactgatgttttatttgcacatcaatatttttatttttgtattctggctcagctgcttctctgagtggagttaaggaatgagccacaaagatttttgtagtaggtatattggcattgcattttatattcctctatatttaattttgaaaacctaaaagaaggattgtgcatcttgagagaaagttgagcaaattgtgatctagcggaatgttaatttgtgctgcttcttgtgcacgatagcagcagtagtatctctcttggaaataaacatcccatattatgatgtctatgaatataggtttccttttcttccttccctccctccttcccccacctttctcttttttttttctctctcagcttctcttttcctccttccctcttcccttcctctttctttactttttttgaaatcacttattgtaaataagttgtaatccaaacctcatgtatcaatggggaattttcaaatataaatattaccaatgcattttctggttgttgtctgatttttgattgaagtataatgagaatgacatgtctgttgcttttggtttgaggacttcgctttagcttcataaatcttttggtattttagtatttcattgttttagcaggagagggcagcaaaagttcattttccctgttagtaatgctgtggttcatgatcggttttaaatttagctgtgtgtgtgtttttttaaacagcatctctttgtgagtagaggtaaaaatgaaacatttttgatatgaaaagttgcatatgaaaattatagactggttcaaccagacagtgaagacttctgatccacatcaaacttaaaatgccacaaaacaatcttccacctctggctaaaacatgctacttccttttcaaacaccacaaaatacaagctgagtcttaaacacttggaatttaaaatgtttttctttggaaatgatttgctttcttcaaagtggtaacagaaacaaaaatgaaggtgctccccaaaaagaaatgtaaccttcccctttcacagatgtgtgagaggttctgtactgtgggtgcatcataataaagaagcagtgaagagttttcaggtgcctggctgtttttgtttgtttgtttctgaactccgtggccttttgaaccatacaaatattagatttgattaacttagctttgaggcagtggggttggtatgttcaggctttcattttgagaagtcagtttatgattatgagtatgtaatattgggaaatggtccagtatcggttgctgtataacatactactccaaaagtagaggcttagaaaaacaacaatttattctcatcacaaatctatagtttgggaaggacttggcaagaacatcgtgtctctgatcctcgagtgtcaaccagggtgtcacaggtggggcaggaaacttcactttcaacatggctcacttacatggttgacaagttagtgctgacatttggcttggagttaaaccaggggtctcagttcttcctcacagtactttcttcttgggcttcctcacagcatggcagctgggttctaggaggcaggaagtggaaactgcctcttctttgaggcctgggcccagaaactatcatggcatcacctccatcatattctattggtcaggcggtcacagaacctgctcagattcaagtggagggggcatagtcctcactgtgaatcaatgagaagtattttcagtgatttgcagttatctttaagctaccatgggatagtttttttttttttttgtaaagtatttgatttaggtgtgatctacgcccttagctaattaaattacatcaaattggaaccatgtggaattaaccaattaatatttcatattaaaattaatctgggtttggaagggaaaagcccttgtatatgtcagcaattttgtatttcaaagcataaccacttgtagcacctgaagatcaacctcttggtaagttagaaataagaaacttgtaacagaaaattttagggttcaagagacttaagagatgattttaagaaaatatttaattctttgcataatgttgcttcctgtctataagtaaatatttacaagaatggatgcaaagtaaatgtacactaaagatacagatttttgtataagtagtatgtctattagataagtaatgtttctgttaaagtttacattatacttttaaagttttttaagggagaccaaagtatgtgattgttaaaggggaattagtttgacttttttttaatgattttttttggagaaagtattgcttttttgttattaggcacatactttttgtggaccactggaaacaagagtagataaacatttattgcctatcagccaaatgagagaacctctggatagattctcaattttattattacaaaaaaaaatcaatgagattattagccttattaaacacatggggaaattgagactcacaaattaaataatgggtctaaatgtacatgattgattcttctatgatgcgtgttcattatacaatacacattctcggaaaggcagaattatttgcttttatgattgttttttgtgacctaagaaacggttcttcccccattttcctatcccaggccaaaaaatattctctcacgtttttctgtaagagctttataagttcagcttttatattgaggtctgtgattcatcttggattattatgtgtaggttgtaaaataggaatctaggtccagtttttccatgtggatattcagttattgtggggccaattgttgaaaagtctccccaaagaactgctttcttatcagaaagataagatatattaaaagtgtatatctaagtctgggttctcttttctgttctaatggttgatatttttatccttatgccagaaccacactgtcatgattgctgtagctttataatagtcttgaatcaagttgtctttcagttttgtatttttcaaaattgctttcggtattctaagtcctttgcatttctgcataaaatttagaagcagcatgtctaccaaagggaaaaaaaaagcctgggtgggattatgattggggttacatgagtgctgtgctctcatgaatgtattgatgccattactgggagactgggggtgggtttgttattacagggagtgggttcattttatttaataaaagggtgagtttggttctgtctctctctctttctccctctctcttgctccctccctccctccctctccagtcctcccccttttacctccacatcttgccttccatcttgggatgacaagcaggaaggtccttgccagatgccagcaccttgatattggacttcccagcctccagaactgtgagattcttttctttgtaagttacctagtccctggtattctgttacaacagcacaaaatggactaagacataatccataaacatggtattgctcttcatttatttaatcttaattaaatgtgttgttagccataggtttttcctagatgccttttatcagattgaggaggtacctttttatttctagtttgctgagagtttttataatgaagaatgttatttgttaaatacttattaaatatattaaaatgatatgattgttttattgtgcttaattacattaaatttctgggataaacatctgtgtaggttgtaagaaaggaatctagatctctctgtgtgtgcgtgtgtgtgtgtgtgtgtgtgtatcattgaacttaaatctctaaatttataatctttcatgatgtttttggtaagtttctagtcaaatatttgaaataattatttttcaaatattctctctgccccattctttctattgccttcttctgtgacactaattatgtattaactttttggtattgtactataggtcacagaggtactgttgattaaaaatttgttttaattgagatgagattcacaatagtaaatagtaaaagtagccatgttatggtgtatgatttattgacatttgatatattcacaatattgtgcaaccatcatttctttctagttcaaaatattttcttccccctaaaaggaaacatagtacccgtgaagcagtcacttcctattcttgcctcagcccctggcaaccactaatatgctttctgcctttatggatttacctattctggatatttcatatcaatggaatcatacagtatgtgaccttttgtgtctgacttctttcacttagcatgtttttgaggttcatttatgttgtagcatatatgagtacttcattctttttaatggctgaataatattctgtcatggatataccatattctgtcatggatataccatctatttattcatttatcagtttatgtgcatttaggttatttttactctatggctcttataaatagtgcttctaggaacattaattttaagttattgtttgaatacctatttttaattcttttgggtatattggtaattgtagaattgctgtttcactttttgagaaactgtcaaactttttcacagcagctgcactattttacattcttgccagcagagggttctaattgctccacatccatgccaggactcattttctcattattattgttgttgttgtcatcttagtgagtgtgccatgttcttttttaaagagtgtcttttttttttcagtgctctttaaattggataacttgttgatttatctttaagttcactggttgtttcctgtcatctttatttgctgttaagcccatacagtatattttttcttttagatattgcattttttaccttagaatttctacttggttcatttttatagtttctctttctctgttgagattgcctatctcatcattcactatttcttaacatcactgagcataattagaatatttgtcataaatttcttgtttgcaaattccaacatcagggtcatctcaggatctgtttttaagtctttttcttgagaatttgtcacattttcctggtttttcataggtcaagcaatgttggatcctgtcctggctattttgaatattatgttatgggaactttgtattctgtagtattcctctgaagagttttgattattttgttttagcaaacaattaacttggaagaactcaaactgccacctcctctggggcagcagctgaagctcaaatctcagttcaattattttgtcctttcctggagtttgttccaggcttgcaagggcggggttagccatagatttgggctgagttatatgcaggatttcgtttgctcttttctgattctctcttttgtggggtataccctcactcccagtgtctgtggttgctccgaactctctcctctggttcttcaggccagaaagacagtttttctgttggtgttctacctcacgtagtgctaactctcagcctcaaactcataaacatggaaagcttacccagtatcatccttttcttcccgagttgacttccctccagaatatgcttttcagggctttctagttgccttccttcctttgtattttgcactttgttcttcgtattttggctagattttatcgtgtttatctgcaagaggaggtttattaggattttaatcagatattctgaaagcagatcttccctcaaaggttatgttatga

SEQ ID NO: 94153 - DNA, 167203 bp, Homo sapiens
  misc_feature (1)...(167203): n = A,T,C or G
aaatggaggaatttgggcttaaatataagagcaatgggaagctgttgaagaggttttaaacaagagtggtaagagacaaaatccgtttcaatcacctcttaaataaatggttagatcagaagagcacttctgaattatgggagtccaaaaacagtaccaaattatgaagaggtagtgttctacgatgtgaaatctgagggcttttacataaatatttttgctttccaaacactgtaggagacccttaacctcattaaatggaagcccttgacaacagtcctttattccagatgagcacaactcaggaattatccatctcaagcttatgatagaaatagtaccccatgtcagaaaaaaagtacaaaggcaggattttacctcatagtattccacatgaaagcacaaattagtctcaatcacacatcggcatcataggaaaatctcagaatttcagtattggaaagaatgttaaagatcatttggtccaacaccttcattttacagatgaaggcagtatacagattatttcttatacaagactgtggattctgccttgggctctctctccctcagatctttcatgaaggggggaagtcagcttggcatgtcatgagtagccctgtggagaagcccaggtgacaaggaactgaagcctcccaccgcctgccagtgaggaactgaggcctgcctgctggccatgtgggtgaacttgacagcaaattctccaggcccagttggttatgatagtggtcccagctgatagtttggtaagaacctcatgagagaccctgagccagaccaccttgttaagccactcttagattcctgacttcaggaactgtgtgaagtaaatgtttgttgtttgaaagtgctaaactttggagtcatttgttaagcagtaagaggtaactaatgaacagtacacaaaattaataaattcttaacaaacttacactatgcttcccttgatatctaaatagtagttattttctaaacaataaaatgtatcttcctttaaagatactaccaattgtgctcttcttctttgaaaagaggtgattaaatggcttatagaataggtgataggatatttagtcatttagaggtcactgactctaatttaacctgagttcttggcaaccacacatagataatactgaaatttgtttgcaaataattccctatggctacatattcccattttaatgtagctgttttttttaaatctccgtacatacaaaaatatgaacttaaattaaaattaccctttcttcttagttctaagcagccttagtaggatgctgagtaagggggaaacaacagcctatcaattgatgatgatgaccatatgtaaaataatcacttttctaatttaataaaacctccaaagttttgtccttggaagaaaaacctcccagtgaggaggaatagcaattgaagtaaacctggcccctcttctaagttttgtctgccttttatattttcaatcccattattcattcagcattccatcaagaaatactcactgagccctttccacataccagacacggataacaataacgaactagatagacaaggctccaccttcatacacatttttatctgggtataggaaaaagaaattaagcaattacaatatagtggtaatcattagggaagaaaagtagagggtgcagtggaagtacctagcaggatacctaccctagtacattggtgggaagagatataggggtgtggagtgggacatgtgagagagtctagaaaaagcttttttgtaactgacatctaagcgtaatgttaagatgtcagaaggtatttcaggcaaaaagaactccccgtacaaaggcctgaaggtaagtgagttacatttagaaacttagaagttcagcttggctgcagcatagcattggggtagtgtagccccaaaatggatacaattccctctgctgggcttccctgtaacagagttgacatggtggagaaattaaaaaataacaaagctttaggctctgacctcttgcacattatgctgcctgaaaacatttatgttccagatgcagaaggctaatcagtctggcaagaattctgaggttggaaaaacctgctttgaatcccagcttgagaccagtaatacccacaacaggttgtgtagaggttaggtgaaataataaatgtgaagcatcttacacacactaggtgctcaaataattctctcccttcagttaccttgcttctgagcccccagctggactctgagctgaggacaccatgtcaccatccaccacacatgaccccatgacttggcagaggacgatgcttttcttggccatctctatgtccatctcattcagttctagtctctaccctcttctttagaggaactgcagcattcataaaacaagaattatagccacacgcacctgagacttgttccattacactaattgtactttatatttgtatatgtacttgatctcaattattccttttgagaacatcataaggttgagtattgtaatcactatttggcagataaaagccctaggttcagagaggtacgtgatttatcttgactgaagctttgaatgtagctcctcattttctaaacgagttctgtcaaccctacaaaggctgcctcccagcaaatactgcaatgggcatatgttttaaggtatatttgcactttttttaaacttttaagttcaggggtacatgtgcaggtttggtacataggtaaacttgtgttatgggggtttgtacagattatttcatcacccaggtattaagcctagtacccacattagttatttttcctgatcctctccctcctcccaccctccaccctccaataggccccagtgtgtgttgttcccctctatgtgtccatgtgttctcatcatttagctcccacttataagtgagaacatgcaatatttcgttttctgttcctgtgttagtttacttgcagtttcttttaaaagttattaagactcagagaaacataaacttttacaactatatacctattcatcaatatacaactgtataactatatactctttcacacatattttaagttctctgtgtaaaactaaagttggggggtggtagtggtggcaggatgttctcagaatactagggccttcaaaggaccatcctcaatactttgatgataggtatcactttccatttgcatacttgcccagctatgctcataacagtaaaaataaagcttcctaccttcttaagaataaaaaactgtctcccctgtgaaaataacacaagtgaaagacttaattattcaggtggacttcagctgctgatttcaaatggaattattctcttatgatcacaggatgccttgtaagttacctgtttcaagcccagtctctgcctagggaactgtctcctatgaaaaggagtccgggtggaccatggtggctcatgcctgtaataccagcatcttgggaggccaaaaagggaggatcgctggaggccaggagtttgagaccagccttgacaacaggaccagataatagaccccgtctctacaaaaaataaaaaaaaaattagctgggcatgatgactcacacatgtggtcctagctactcgggaggttgaggtgggaagatcacttgagcccaggagttccaggctgcagtgagctatggatgtgccactgcactccagcctgggtgacagagcaagacctcaactcaaaaaaaaaataaataaaaaagaaaaggagtccacctcacttctgaacagttcaagttgagtccataaatgagcctatttctgtcttccaaagatatccatataagacttttcccaaccaccccccgcaaccttgcttcctttcagtgtttctccaaaggtggtgcccagattacctggatcaaaatcaccagggtactgattaacaggagattcctgggtcccaacgctgacctgaatcatcaccaagaaatggtgcattcgcttttcatatcacattacccagcagattcatacttcgtgaattacacactctagatctctgtcacacaaaaaaaatggtcttaggcaaaatctctcatcttctacttaaaacaactggttttaacctaaggggctgatataaatgctaagtcaagcagtgatttgtgtttaacacttgacagtccctcttccaggtactctatatagtggacttttatacaatatgatgtacagtccttcagccaaccaataatacacctaactacaatccattctacatttccggaaccatgctgttcatgaggatatcacttcagatattttgtggaaattttgaaattatggcatctacagaactccctgatatactagctattgtaagccaagccaaaaagcacatgaaggtagtttggtataattctttatctatcttgataattgaaattgtttcactgtaaaactttacataactgagctttgttttaaagcaaaaaacttgcagatgtgagacagtacgagaaaaaagaatcagctgttaccatcttaaaacttaggatagcctaggtgtggtggctcacagctgtaatcctagcactttgggagtacgaggcagattgcctgagctcaggagttcgagaccagcctgggcaacaccgtgaaacctcgtctctactaaaatacaaaaaaaaaaaaaattagctgggcgtggcggtgtgcacttgtagtcccagctacgggggaggctgaggcaggagaattgcttgaacccgagaggtggaggttgaggtgagccaagatcgcaccactgcactctactccagcctgggtgacagagtgagagactccgtctcaaaaaaaaaaaaaaaaaaaaaaaaaaaaaaaaaaaaaaaagaaaagaaaaaaaaccccaaaaaacttaggataaaatcttaaaacgttttgttcgacttaaatttaaattagcagtttaggatatagtacactgataatgtaattacatacattctgctataaaggcatagacatctttattgggagatatgggcagaaaaattatttcctcagggtggggcatttggctaaacacttgccaatatcctttactgtgtaatttaggtaacacaggcagaaaaggcgtttgaaaagcagaaatcaagtggcaaatatcagatctgagggacgcaatgagggtggagttgaaatccgtggtccttggatttgaaacttaccagcccgtgaacaaggttggtattgcttttggcataagacgacagcctttcttttcattagctcaggaggaatactggctttccaagtgagctcctccaatccagtgatatttgcacatctcaccygggcctttcggttacaaattcaccaccttaaggagccgtgtgaaaaagcaagaacaatcaataagaaggaaaaaaaaaaacccttcagctataaatcagccacgyggagctgctgcagcagcagcggtagtcccacttcctggttggcttcctgaaagcctctcgacaaggggctcagggaagtgggtctaagggagaggtgcagacgagagcgactccaggtccaacggagggggcggcgggccacgggatcccggagggcacaggcgttaaggacggagttattgtccataattacaataaaagtttggggatctgaaagctttaaggagctgagctgcagggcaaaggctaagaaccggactcgggaaaagtgcaagttagttacaaggtagcmgggactgtgaagggggctcgcgtggagagcaggggactgcggatctggaagggggcaggtagagaggaaggcagcctggcagagcgaggcacacgggtcagtcggagctctgcggtggccgccagaggggagggggccacggggaggagcggagggaagagcccggggaaaggtgtagccgaggggagttccggatctggagctggaaagggcaggcagcggagagggcggcagccgtagcggtaggggtgggggaaagagggggaggagagccggaggagggggaaggagggaggggagagcggtggcggcggctgcgccgggctgtgagtctctcgccgccggaggaagatgaggctgaagattggrttcatcttacgcagtttgctggtggtgggaagcttcctggggctagtggtcctctggtcttccctgaccccgcggccggacgacccaagcccgctgagcaggatgagggtgagtgacccgcccggccccctccggcggcagcgaccggcaacttgttttgtttgcccgcgtgtggagggagcaggggcggcggggtcgcggcacggcgtgggcaccgcagctccgcaggtggtgctggcgcagcgcgggccgagggggtgccgagccccgcgcactccgacctccctggccgccgccggcccgccccctcgccgccccttcctccgctcttccccgccccgggctccgtcgccgacacccgcgctgccgcggcagcggctcgggcggccgctctccgcgccgggactgcgggcggagcgggcggagagccgggtccggggggctgcggccgcccggcgtcccgctctggggggccgggaccgcagcgctcacggcccggggacgcggggttggtccaggctgcggcctgtggcgcgtgcaggcctgaaggaggcgagatgccgatgccgccaccgctggtccggtggaccaggccccttggtccagcctcccctcccgcagccgcccgtctgggggtgttcgcagccccgggctcccccggcccgcccgccggggagtgggagggcgatggcgccccgcctccggctcttacggagagcgcgcctccccctcactccggcggcggggagccggggtgcgatgcgcggccgaggcctcgcccggaccgccggtccccctcgcgtccctgggcgagggaggggcggttggccggagatggcggaggggcgtccccgccccgcctgcccgccgcccccagccctcagcgcctggggaagcccctgctgtggcagtgctcgggcgctatccgggggaagaggagcagttcctcttccttggctgcggcagggctgcttgggccggaaaactaacttgtgtcggckcccggccgccccgcgccggctgccggctagctcaggccgacgccgaggggagcggcggcgcggagctcgcggcggctccgctgggacgcatttgtctgccgcccagggcgcgagtgttagcgctgacattccttggatttggagggtttagtcaggcgcctcggaacattagttacccggagccgcgccgcgcggggaagggaccgcgggcactgcggcttccctgacccggcagcgggcggcgcgcaccggcctcgcccccgaccctgacctgcttccccccggatgaaccgttgcaccacctgcttcctcctccccgctgggacagccaactgggccggctgccagtgggggtaggagagggtatgaggggctcacgaccgccgaggcggcggggctgcaggaggagtcgagtcgctctctctgttgtaaagtgctttttgcaagtgtgatgagcatcgcttctatgtcatgtttatttaactttccttctggaaagttagcatcaagaagttgggcaaaaaggcttgtggcgtcctttcaagagtaagaatcctaggaggagatcccattatcagctcttcgcctatatcatgagattagatgtaatctggaagttttagtatttgaagtctctacagcagtggaatccctttgtaatatctgggatagattcccatctaagtcatctaaattgatggtaataaaaagtatcagttttccttttcagtacatttgcggttttaagcttctcagctcatggagtgatggtgatctttttataattttgctctcaatatgacttattgacaaaggataactgaatattgcaattgaggatatttgttttaagtcatcaaatggctttttacatgtagctagaaatgtttaaccccctattttctggtagagaaactgacgaaaaactgacaaaactagctaggttcagaatgtcccgcccttctgatgatcttttaaagaggtggcggaacatcagcatcacttgccaactcgtggaatattttattagtgcaaacaaaggatgggccataatgcccatttcagtactatatggtgatgataaagaaggtgatgatatcttgattttttgtttgtttcagtgtacttgataaagtttctcagtggatccagtgtaatttctgtcatttgtcaaaaacaaaaggtagattttaaagacttaacataattaacattaagaggaatgcttaggtatcagaagagcaagaaagacccttttattggcttcccaggtaaatagtaatacaagcaatttaaagtgtagcttataaataataagagcataaataagggattattgccttcctttaataaagactaacctaggagcttttaaggtacagtgctagaaggacaaatcctgtagggaggattctgactcctgagtttctcctcccccttgtggttcttttacttcgatgactattgcatatattccacccatggtgagatctctgcttctctttaatgctgatctacacatggacttttttggatccctttaaatagcctgaacgatccagtttaccaggtatgggttctkcctctactccagcaagcttgtacctgtggctccattcaccctgtgccactttttgtcttgaactatgaatatgtcatacactaaattctgttacagccttgacaacttgggatggtcctttctcatctgcactatttccttgttttaggtctgtccacctgtggagtcaagacaaaagaaacatgtttcttatttccttcccrtctctgggcctcttgccctttctctgaagtgaatgatgtgaaaaatgaccttacatttccgatcatattctgttgtgtgattttaaatattgatttatttgaacatttttgagtgccaattatataccaggcatggtactagttgttaaggaaatactccttgtccttaatctcatggatcttgtaaaaaccacacagcaatcaaacctcrataaatatataaataaaaattgtgctactgctttcatagtgaaaaccatagggggcaagaaaatggaggaatttggtcataaaagccttacttgaagaaatgactattagcagtagcaaatccacacaggtctgaagcaactcgattcttacctcctgtgggaaagaatttattggaggggcataaggcagagtgagagaccgaggcaaatttttgagcaggagtgagagtattaaaaagctttagagcaggaacggaaggaagtacactttgaagaaggccatgtgggctacttgagaaatccaagtacctcgtctgaccctggacttggggttttatacattggcatgattccagggtttgcgtttcttctcccgtgattcttcccttggggtgggctgtctgcatgcgcagtggcctgccagcagcggggaggggctgcctgcagtgtgtttactgaagttttactcatgctcacttgaggcatttttcccttacaatttgagccttcctagaggaagggcatatactagttaaaagctgccattttgcctattagtgcacatgctggagcccacttgcccaactcctgagatcttagtgggaacctgctgataaccagctttaggtgttttctatctaatgggagactgcctttccatggtgttggcgcgaccaattattatttcagagagacagtttaacaacggcctgaccatcacctgatggccgcctgacattcctggtggtggggggcctttcctgccctgctcatgtctgcctagctgcctactctgacttttgaggcgaaatctgaacatttcaagaaaagtagttaatctggaagtgggtggcagcattcttgagaaggagcatttgggcaaaggtcctgaggcaggaggtagcatgagtgaaatagtgagaaactaggagataaatattgttggaacgtggagaatgacaagtagaatgatgccacacaggaaagcatgggtctcgtagtccatgctaaggaggagatcttaagtgcggtgagaagccgttgaaagattttaagtagggaagagtggatttgtgttttgaaaagatcactctggctgcctacagaaagtatgtatttgtctatagaacaggtagcaggagtcctggtgggggtcatcattattcaggtgggacataatccttgcttagattggcagggcggtggtagagatagaaaaaaataaattgattcaagagctcctaaagatgcaaaggcatcaggatttggctattggatatggtagtgaaggtgtcaggaggcctaggatgatagattatttgtttcattatggaaagttctcaaagcaaaatgtataccttcttgtattgtattttatgattatgggaagcttttttttttttagtctttgccctctggatattttaaggtcagcatttattaagattatctgcttggacttgcaaagcacagaaagttcctttaattaaataaattatgtcccagactaacaccatttatcccaggytttagccctgagtgactgtctacagttgacccataagcctctgaaaataaaggtttttaaaggaaatgttgacagatccattaaaacagcagtcccccacctttttagcaccagggactggttttgtcaaagacaattattccacagactgggggagttgggttgggtgggggatggtttggggatgaaactgttccgcctcagatcattaggtattagattctcataaggagtgtgcaacccggatcccttgcatgcagttcacaatagggtttatgctccatgacccagggttggggacccctgcattaaaacattcagtactggtgagaagctgtgtgtaaactaatgactctctggatatgcaaatgcaactttagtcaagtcattaatgccacttaggttcagggcgtatataataggactaattcaggaactagtaggccaagaggttttatgtgataggcaagctaacaggtttgaaaggaatatagcttaaatgaggattagtggctgaactgattaccctggcagtcaagttccaccttaccaaagccattttatctcagtgatgatcagttgtaacctgaaaaattctgcccttgaacatgagattgtacttcaaatggaagctctgtttatactattagggatggagctatcacttagtgaaagtgtagtgtcttaagtggtcactgttctctcagtttcccaggctatacaccttaggattggtttttgtttcctttgctgttttcagtgtcccatcccccttctccccccacacataataatgattaaaaatatcacatcaccaagtctgagaagtctggggtttatagacttcctgaaattaatgcagaacttttgcatacatctacatttttttctaggttgataatcagaagctttcatgtttcctaaagtgtcctctaaaccaaacaaggcttccagccactgaccatgtgccctttgaaggcagggttcatgtttcctgtttgttgagtatttcctccatctttcctggtgctaattttatggaaggcacatattaaatatttttcaaagaaactaaggtacatccatttatgtctcccacataggtctgaacatttcggaaatgtttggcgaattcctaagaattgttgtatttatcacttctgtggaaaagttttccatccagtggtctatgtgaggtcaggcatcagccctgttaccacctgcttgcccctcccccrtccccatcctcccctccctaagacctcatgaagaatactgataacacctgaagtgggagttcctgctctcacaatctagttgggggtggggagagctattgcttaatccagtagcaatgtaaagaaataatacaagaactgtyacaaggatatgtttcatcagtagtcaaaccagtaggtggagaaggcttaaaatggcctttggggaatgcacagttactagtaaagagagaatgaaaacttttgaacagcagtctattttgtgacttaggctggttgcatgggatgggagataacgtgtgagatacgatttgggttcctgtataaactgttagacaatagtaaattggagaaagaggaagagagaaaataattcacgaatgaaaagcaaaattctgagcttgagccatctgtaaacagaatatgtggaaattctaacttgagttattaaaaaagttggtcagcaagatttgagtagctattgaatgaaggaaaatgactgtgattattcagctcctaactagataattgtctttgttcatattttgaatttcgattctcattcctgaagaatgaatgtacaatctgaaaagtaactaaattaaagatttcagtaataacagcaacaataatagtttacatatattgaatccttactttgggcctaatacatattctacatgtatttggttgtttatttgtaacaaccaccctctattgcaagtccgatggaatcccaactttatagatgagactgttgtggtatagagaggtgaactctttgtccaagtttattcacttaattaattgtagagccaggattcaatctcaggtgttctaacttcagagctgtgctctctgatcttgcactacagtttttaacaacacagacaagtacacatgggctacattaaaaggtggatatgtagacgctagctgggtaatttcagataaacactgaagacaatatagatggtccctgacttaccatgattcagcttacgatttttgacttttcaatgggtttatcggtgtgtaaccctgtcataagtctgagcacatctggacttaagatgtcttatgattcttcaagtttacagtgggtttgttgcagggtgtaaccccttgtaagtcgaggaacatctgtacatggtaatatgaaagagaatgggaggctggtgcggtggttcatgcttgtaatcccagcgctttgggaggcctaggcaggcgaatcacttgaggtccggagtttgagaccagcctggccaacatggtgaaaccctgtctctactaaaaatacaaaaattagccaggcatggtagcacacccctgtaatcccagctactcaggaggctgaggcaggataattgcttgaagccaggaggcggaggttgcagtaagtggagctcgcgccactacactcaagcctgggcaacaaaacgagactccatctcaaaaaaaaaaaattaaaaacaaaaagaaagagaatgggttggaagggaccactcagggaatgtcagggaaggtgatggccagagcagagtcttcaggagtaagtgtaagactatcatgcaaatctggcggaaaagcattccaggcagagggaacagaagtgcaaaattcctgaggttggaatgaggctggagtatttgaagccagtatggccggagtttgttgagtttggaggtagtacagtacgggatgagcttgaagatgtagtcaggactcagatgatgggggtgtgtggctcttgtggtctgttattagggtgattatttgttttagtttacatttgctgcccattagccattattatcctttcactctcagaagtgtcctgggttggatggtaaattayatggatgtcttgcttaaagtgtattttcctagataaataaaatgagtaataaccctttttggccacagtttgtgggccagatgcacaagtaaacaattgtgctgggtaagacaaaaactgtattagttaagtccactgagtcctgtgggagcacagagaaaggagcatctagtgtatgggactggatgctgtcagagagcttgtcttataaaaagagatgctggagagatgaggacagaggagactgtgcaacagcataaataactgtgaccaatcctggggactacatggctgaaaattgggttggagaggggtggaatggaagagaggactctagaaagataaatagaatctgagccatgaaagactttgaatggtcagagctgggcyataaggaataatctggaaacagtgcaagctagattttagtgargagagaattatgtccgaaggatataatgaagcttaaactaaggagaaggacctagaaactgaatacagaggaagagattatggaagtataatagaattgcccagtgggaggaggaatcattcttgatggtaaaggaaaggatgttgatgcctttagaaggaatacmgctgtccaaagcactggctctcaaacttctttaggcttcggagtcacctagagggtgtgagaaaacggattacttggccccatcccccgaatttctgattgagtagatttagggtagagcagataatttgcatttctaactagttccccggggatgctgatgctgctggtccagggatcatgctttgaggagtgccagtctagaggttatatagatttgggggctgcaaaatgaaaatgaaaaatttggtttggtttggcatatagtattttatagaacacaggtcagtcaagtgaaggtgtcttaaccaggtcgatggagctcagaatggaatcagaagtggatgcatttcattggccagagggtggtgtctgaagcacagggagtgggttggtaagttaaaggagcctgtgtggatggaggagaaaaatgtgtgtattaagaagaaacatggaaaatgccttcttttaggctctaggaggttggtggggagagatgaaagaaggcatagacagaagtaaaatgacttagacgatattgcctaaccgtgagcaaaaataatttctttaaggacagggccatcaacaaattcagatgttaaaatgtttgagaactgattagaatgaaagctgaaacgagtggctgtggaagcattacctgcctgctaacctaaccagtagtactttggtctagagagggactacagcagcatcatcattagcatctcagtaaatattgtggcccagaaaaactggttcagatgataaagaagttcaggtcgtgaagagtcatcttcactatgggaaaaatacaaatagagaaaaagttttattagagaactgtaactatcaaagaggaacttaacccatttttggttatatctgggctaccataactttatgtgcctttccacctctccctayccgcaagtctgtgtgtgtgtgtgtgtgtgtgtgtgtgtgtgtgtgtgtgtgtgtgcgcgcacgcgcgtgcgcacagacacctatgtatatatattttagttgtgatcatatataatactatataagatagatattgcaacacatattagtctttttttactcatgtctgaaatctggtgatttgaaaagctgtgactagaaaaccaatttaatatttaaagttggaaaataaattttattctgagaacatgaggcaatttttagtttttagtacattaatttgactgaaggatattaaaaaaacaatrgcaaaactatgctattctcagcgtagagaaaatgtatgctcagcatttcaatactcttagtttttaaaaatgaggtttatcattaaattatagttcagccctgtgatcctgaaagcaacactgagacaacatgaactgcagtcacctagggcctatgtctttttrgaaagggaagagctaactttcagttgcttaatttgctaagaatcctgaatatttccaaatgagaaatgttctcatttctgcaccattataaattcccttctgggcttcccagccttggaagcattttcaggcatcactcccaagaagcatttaaacatgccgacagggagacctgattcacttcactgaatacaagaactggtacactgaaacttgaggaaaaatttaactttacattatctaattaggtttatagaattggtgcagagcagcctggtttcccaaatctagaaggtacgattaactatagtattatatcaataccaactagtctgcgaataggcttctaagcaataggaatctgttattacaaagaatattttaaactggatgagttaaaattaagtcacatactatcggaaaccattttgtatgagaatagagtagatgacctagtcattttttaattttaatttttaccaattccctgggtttaggaatacatctgagcctcaagaggtatgctactgtcttcagtagtaaacttaacatgctcagtgattatctggcttaagtgtaattttggcatttgtagttacctttatgaaattattttttatgcatagctgtttactatgaaaactatgtattcactggtaaagctatgcttcctatgaaaactgtgtattcgctggtatcttataaaaagaaatggtattatttattatgtaagtatatcttaaataggcagtaactgagaaattgccaaaacttttttggagcgagttcactcttatcagaagttgggtatgtcagcatttttatttattaaactgtttgtattaataattctcctttaacttttagttttccttttaatagaaacatcagccaggtgtggtggctcatgcttayaattctagcattttgggagcctgagcctggaggattgcttgaggctagaagcctgggcaatatagcaagaccttgtcgcttataaaacaaacaaaccaaacctgataagatattctttaatgtgagcaaggtttgcaagtagctttttcaactgtgcaaatgcccaactccttctacaagtggaacccttgatttaaaaccaacccattgattctagttattaaagtaaaacaatagtttcaattcctaatgtagtatgaagagacccctttgaaccatttcacagaattttaagaattaatacttgtagagaagtgatatcatgacaacatcaatgtagtatctttatgcatctgtgagaatttggtttttaaaaaatatattccttagaaagcctaaatagaaaacaaaacaaaacaaaagaacagtaaggtacagttgtacattgcaaaaaagaagtccttaagtcatgatgcgtgaagttctctagaagttcttgtcagtacttactgytgtacttcaaattttttattctgtagatatgaagtaaatattttatatactttttattaacatttattatcgcaaaaatagttcccttacaaccctagcataaattaaaactatcagtatacttaagtgagtcatgcaagtgtcattttgccaggatatataaaagatatctgagtaatgawatttagaaatggaaaatgtgaaaatagcatcattataggaagattccaaatctgtttagatttataggttatggtcatttatataaacattttaaaaatgacaggaacagtctaattacgttaagtcaattaagttttttttttgcttgattgtttaatgctcttatgaaaaacacatatttgtaaaagaaattatttgcctagaaaaatttaccatgcaatatatttcatcatattggagttccttttttttttttttttttgagatggagttacactgttgtcatgcaggccggagtgcaatggcacaatctcgactcactgcaacctctgcttcccaggttcaagcaattctcctgcctcagcctcctgagtagctgggattacaggcgcccacaaccatgcccagctaatttttgtatttttagtagagatggggtttcaccatgttggccagactggtctcgaacttctgacctcaggtgatccgcctgccttggtttcccaaagtgctgggattacaggcgtgagccactgcacctgcccagttctttgttaatgaaagcctgtgtacctggaagtcaaaggtatactttgcatagccatttcaaaacttgtcttaggtattttctaaaatgtttgtctcattggatataggttttgattgtgcttacttgagaagacttaaatctttacccttctcctggtagttttcttctggcagttcagtattttgccatgcaatttttattagacaatttgatcattgtgtttcttattgcctaatccaacagatttaatcttttaatctcaaatacagcaaggtgtgctgtgcctttacagtctgtttgcagagttttacatcttcgtttgaaaggaagtgtttaaacacccctgttcaaaaatctgctagttcttgccaggatgatttaaaatgaattttaaaaatccattagatttttggcaaataagctctcaattatggtacagaataaatgactacaaagtgctttttagagtaatggaatagaaatgactgaaattttattactttacacatgcagatttttctactgtggtagatgttcttaaactaaaagattactgtcaagattggaaatttttatcacttaaaatatataattatatttgaacatttaagcaraagattgctggaatggggatatacaggcctgcagtttcgttaactgttgctccctgtgtgatggcctcagaggaaattctaagtccagtgttcgtcaaagaggctggagaatgtttcccttttagtgatcagtgaaaataaatttgcttacagtccagggagatcatggtagtagagaaaaaaatactttagtaaataattttctaaaattctctattctaaaaatatactaagaaaggatgatttttaaataccttggtattttaaagaaatacattttctgtatgaaattaagataactctattcctcttcttatagctaacatttagactctaaatcatggcacatgtaacacttctattttaaaataaatgtagggtacgtgaaagcacagttgttaactttgaaaattttgaagagtggaatcacctacagacataataaagctgaaaataccatggcttttcccaggtcctgctgtttgcttagcctgagaaaggaactgccggtatcatccaagtattggtcaaaatacatatatactgtatggtcattctcatattatttttcccagtgtcctatttgaaaatctgaggaaggttttaatgaatgcggcttcgtcttactttccattaattatgactgcaagaagagtacagccactcttgtttgatcagcctatacactatgactaaatggaaagtgaatcacagccagagagtctaatagtttcacagtggtaaaatcatgttttgtaagaagcagttatcatccttgaccaccgctctgttaactggtaacagtaagataaaagtaaatgttaaaatctttcttatatgttggcaaaaatcacttcctaaagataaatgaatggcttgaaacatttattcttatttgcaactacttctttagcttaagtgacaggtacttatgtttaaaaataacatgtcttgtgtaatgatttatgattctgcatttataaatgcagaaagaataactaaaaggaagttgtaagtgtcagttaaggaatagatgcttttttaaatatagaaaattagaaaacttaaggtaagagcaaaagtaatatacatttgttcagtatttttgttttctggtgaattgagatacttttcctactattcctttaattctttttaaaaataactacaatctatttttttctcccttggaacagtggattcctttctctgattatgaggcctggaatttgagtgattcattggtcagtttcttttgggttccagtgggtgctaaaagtaagaatgattattttaaggataaaaaatgtcagttgtatattttattgactgcaggtagctagaaaaagtaaacttgycatgtgggcacacagcgtgttgcctctgaatgatgaggcaagcaggttactcataatacacacacacacacacacacacacacacacacacagcgtgttgccccgaatgatgaggctagcaggttactcttaatacacacacacacacacacacacacacagacacaacagcgtgttgcctctgaatgatgaggctagtaggttactcataatacacacacacacacacacacacacacagctttttctctatgtacctgattcttttaaattaaagataaccaaacctttgaatgatgaggctagcaggttactcataatacacacacacacacacacacactctgctttttctctatgtacctgatacttttaaattaaagataaccaaacctttgaatggtgaggctagcaggttactcataatccacacacataaacacacacacacacacacacacacacacacacacacacacacacacactgctttttctctgtgtacctgatactttttaattaaaggtaaaaggtaaccgaacctttaactcttgagccagtgataatgagaaaataaaatttcatttctaaaattagagataatggaacttaaaaaaaatgtgttctctgtgtcatctctgtgcaccccctcccactattcctctcacacgctgcactttttttttttttttaaagctgcattaataggctgttatatcctttgaaataccacaggtcttgagagggatgaatgatgaaatgtaaagatcagtgattgagcaggaatgggagaaagattagggattgggttttctggcacaaggctcctttctgtcaaaggactgcaaattttcctgggttgacgtgggcttaattttttttttttccccaaggcagaagaatttttcttagtacagaacaaaatggagtctcctatgtctacttctttctacacagacacagtaacaatctgatctctctttcttttccccacatttcccccttttctattcgacaaaaccgccatcgtcatcatggcccgttctcaatgagctgttgggtacacctcccagacggggcggccgggcagaagcgcccccccacctcccagacggggcggcggccgggcggggtctgccccccacctcccggacggggcggctggcctggcrgggaytgccccccacctccctgacggcgcggctggccgggcggggactgtcccccacctcccagacggggcggctgccgggcggagacgctcatcacttcccagacggggcggctgccgggtggaggggctcctcacttctcagacggggcggccaggcagagacgctcctcacctcccagacggggtcgcggccgggcagaggcgctcttcacatctcagacgggtcggtggggcagaggcgctccccacattccagacgatgggcggccgggcagagacgctcctcacttcctagacaggatgagggtcgggaagaggctctcctcacttcccagactgggcggcggggcagaggggctcctcacatcccagacgatgggcggccaggcagagacgctcctcacttcctagacggggtggcggccgggcagaggctgcaatctcggcactttgggaggccaaggcaggcggctgggaggtggaggttgtagcgagccgagatcacgccactgcactccagcctgggcaacattgagcactgagtgagcgagactccgtctgcaatccctgcacctagggaggctgaggctggcagatcactcgcggtcaggagctggagaccagcccgaccaacacggcgaaaccccgtctccaccaagaaatatgaaaaccagtcaggcatggtggcgcccgcctgcaatcccaggcactcggcaggctgaggcaggagaatcaggcagggagattgcagtgggtcgagatggcggcagtacagtccagcctcggctcggcatcagagggagaccagggagagggagctcggcatcagagggagaccagggagagggagagggagggggagggggagggggagaagtgggcttaatttaaaattgccttatatatgcagtgatgaaaatcaaatcaaatttaaattactatatggaacaacttcctgataatgtaaaaaaaaaactgatttaggagagggttttcggtactttgaaatattaatattatgaaagttgaacactgatgtttcaatctgcttcactccatccccattacttcttgtcagctgtctatgagcattgggccacttgccacagttttacatgataaccatatttaagtggtaaaaaagatcagaacatatacagtgccttcttaagtcaggttcctgatttatttctggtactatccatttagatacatattaatttacctaatttcttaaatccatggaccagtactgatattcctgtttgtctttatttaggattttacatgtgtacgttaaaaaatacattggtaacagctgactgacaaccaaaaaagtaaaaaagcaaaacaaaaatcaccgtgctttgacaggtttgtcatgaagcaaaatgcatgagaaatttgatctgtttcagtttgcttgttatcagtcagaaatcacctttgctttgcccagagaagactcaggttcactgaattctcytcaccactccgtgaaagtgtgtagcagcatggacagcccatgttatgtacagagtaaatggtgcactgggtggcatgtggaatcttgaaaggacagtgtctcttagatgcttaacttactactgggagtgaagaagatcaatgaatctcaaaaaaaaaaaaaaagtggaaaaattccttttggggaaaagaagctagtataatttagggttttaattactatcatacttgattgagagaaatcccttaytcttaaaataatacaggtactgcatttcttattttataatactgcttaaatgcttcctgtcctaggcagtataatgaattaaaatgtagtagatatttagcacaagcaaaaaggacttacagtttaggaatactaaattcagaactctgtattgtaacaagttaccaggaagtagtgggggttaaatctgtgctgctgggaaagtgtgttttgttttgtttttttaatttccttgtatacatcttagagtctgcagtttgtatgaaccgtgtgctagtcaagaaagagataaataagcattatttaggttcaagagatttagcaatcttatggttttgggataagctgctatcctagtgatgttttcttgtcactgtctcactgagattttgaaaaactcaaacacatccttaatcaatttgaaagattcctagggaaattacattcaacttgattatggtattccttatgagagcttgggcatagggcaaggagagtgaactttaaggtgtaggaagaagataagtatgtgccacataaaaggaggaggggcctgctatatagtacaaggtcatggcttaagccaatcatttgtcatggggttggggagtctgaaggatgagtgggtctattttaaaaaaaaattgcgttgataaccatgaacattaatccttatgaatactaaatgttctagagaaattatattgatgtgtaattttccttattgtgaaacatatagctccccaaggacaaggtggcagctggcggattaaaaataaaagctgacatcattatatagtaaaagtacacatggactctgacatgggttaaaatgctggtgcaatcactgttaatagcgttagtgagtttcgcygagtgatttactttctgagagcttccttttcctcatctgtaaagtagacataaaatcaacttcatagcaatgttcttgtgcttcctttagatacgtttatcagagcttctatggctgggtttaacttgcacttttatacatactgtttttccttccttctgttccttcttcttggatgagcaccataatttgtacatagtttcaagagtgctttaaaaatgaaaatacttaagttctgcaaacttattatgaattcattattttgaattgtaagtgaaggagggctgaatattgtcttttctcctggacttttagacttttgccttaaaagttatatccttaaatgaacagtgttctcaaatggggaaagaggaaaatattattgtttacttacttttttttttttgagatggagtcttgctctgtcaccaggctggagtgctgtggtgcaatcttggctcactgcaacctccaactccctgggtctcctgccttactctcacgagtagctggcattacaggtgcataccaccatgcccagctaattttttaatatttttagtagagacggatgttggccaggatggtctcgatctcctgacctcgtgatccacccgcctcggccgcccaaagtgctggaattacaggtgtgagccaccgcacccggcctacttacttttaaaatacatttacattaagaaaaaaagaatgtatgttcattgtagaaaatattacaaagttaaagcaagtaagaaacaaaattatctacaacccatcctatccaaagataattatcattagctattggtgtatttcttgcctaaatatatgtactatacatagacatagtccacagtataaataaactctgtggattgcttttttaatttcactgtagaaatattttaattgttgttaggatatgtatagatttgtaattttttttaaccatctggtcattttagtattgagatggtttgaggaaagaggacattagaaaaaaaaaaaaaacctgtgtactgggaattacagatctgaaattgtcatatacaccacatttgcaaaattttttcacctgcccttgaaaaaaaccaaggcatgattttgaattttataagatggtctattaagattgctgaaacttggagtgctttctggcaaaaccagcaattaaatgaagagaaacagaagccatcactagaagagcaactattttgtggcagttacttgtttcactatctcttccctgttctttaccccaacatagttcataacttaaagttgtggactttaaagcactctaaggcttttaaacttctgcctagtgagttagtattaagaaatttaagtcagtgccatggggttaaatatgaggtttaataaaaatattggtttcttaattttgtttattagtcttactcctatagtctgtgtgtcgtgaagcataatttctcttttctttctcctgatgcaactcagccactccaggattttctcattttccttcatattatgaatatgtaaaaattaaaacaaataccttttcttttagtcattgcatagttggactacacttatttcactctgaggtgatagggctcttcttttctatgtctttgcatcttaaatacatacagacattatgcatttatttatacttatatactaatacaacaggtcagcacagtcactcctcacccatgtggggagccaaaattctagtctgaaaattgagcatcaaatactaataagtaacttatactgaactcttaggtatgtttacattcttaatttaatcttctgacattttacagttgaggaaatttgtggcttagagaagttaaattaccttgcccaaggtcacttggtcttctaggtaacaactagagttcaaacctaggctgactgcagagcctaccttttcaggtgggattcagtaccaccaagtagcactttctgaactgtgttctatgaaccaaggtgtattatcaggcattactttaaacaggggttttgggccagtaaggttgataagtgttgcatattgtatcaccccctcagagatttcacggcatacattggtacgttaaaagctttgaaaagtactatagaaaagaaacttcagcattttagcatatctttcacaaactgacctggtcactgatccagtttttaaagaacatccagttttctttaaagaactttagtgtcctgagagaagagaaagcgctgtggacagatggacctgtcttcaggggaggaatctggctgcctctgctcgctgaattctgccttgaggscttcctttcatgttcatgtgcagcatggtatcatccagctgtgtaaatcttaccatccttcaagatcagttcaggatctacctgttctctgaagattttcctgaccacttgagtccataccgatatatctgacctcagcaaagttcctgattatgattgatggtaatgctctttagcacgtggctgtttccccagttggttcctaaactcctcaaaagcagacacaccctactttatattattcccctgtccgctgctgagtagcccctggccttactgccctcgagggagaggttaaagtgttccagtggtttttgtttggtttacaaatactcttcgtctccctggtcttgaaccccggttgagacctgcagttcattctcaatcctcaaacttgaggtgctcatgtgatcatcttacactcatatcagcacttatgctccccatattgttttccatctgaacacctctcactgatcttgcggttatttatcaaaaaagatttctgtttacagtgtatttcacaattaaaaattctactgatagttaaaataggtttcctagaacaacccctgcttggcagtcacctccatcttgctacattgccacagagcctgatgaatctgctaagtatttatgtttaggaatttcttttatgcaggaaaccccaacgttaagtggttccttgactccagttatgagtcaaatggttttaagtataacccatattagatttctattcatacagaaatagatgtccagtgtatgaattatgtttcagttatcggaaactcatttcatatcatggaaatatcaaaatagttcctccaaatcaaatatacttccaagaacattttgcaagcactagagccatattgtgtctattagttggataaatttttctgcataggcaagattgaatgaagtgctttaaaattaaattagtctaataaaagtatgcaccgaaaacaccaccttttcttttggcaactccctgcagtagtcatggatattcttcccttgctccgagggaattctgtgtacaaaattaacattatctatcttcaacatttttactccatattcagtgttcatgaatggctctggaagtctttgaatggtacctgctgggaaacattatttctaccactatcccaatcttatggaaatacatgaaggctgaacaatagattcaactctcagttgattctgttgactctgtgtgaactttaagggatagtaaatatttgaagtttatgttaattaaaatatagatttggctactataacagcaatccaaaatgttagtttttttttttttctcttacataaatacccaaactgataatggcaaaatagacttcatagtcttttatggtactgttagggatccatgccccttctctcttgttactctgtcattcctggagagttgctttagacttcatagtcttttatggtactgttagggatccatgcccttctctcttgttactctgtcattcctggagagttgctttcatctacgtggtctgagattttactaccatgtccacattgcagcagtaggaaggaaggaaacagaagggatttgcttcttcacctgtacgtgtcactttcagtatctttattctaggtagccatgtgcatagctaaaaatggttttagtgagtgggtaactaatgagatagaaagggagaaaggatattgggaggaatcgtagtctttgctacaaggtaataccgtataattttttaaatgataaagttgtataagtaagggtcaaaagtcacttgtagctaactttcattagttccaccttttccttgcctagcacagttagcatggtcttggtatctagtgtaaatctgatcttatccaaacatgaatttgttactttttatattacttggttaactgttgatttcaagtctcttttcagacttgtctcccaagttcacatgaatagggccaggctttaagttttttttaatgcgttcattattaccaagcagtgctttttaacactagtgttcagtaagtttattgaacattgggttatgatgatttattgaaattctacatttattgctttgcttggttgttaatagagtcaatgtctcttgtcttttttctgccaactggaataatccctactccacgtatgtgagctatatcctgtatcagaaatgtagaggaggcgtggaattggcaaagatttgttaccaaaaatcactatcagaccccatygctgttggcagtcagggaaccatggaaaagattatgggtcatggaaggttataagcaaaagtctgtggatttgcatagcagcattgagaggtaggtcttacaatgggcaggttgtattggaggactgaaaaaaaaaaaatggaaatattaaggaaacacacagatagtgattccaagaagaactagcaccaatagggctaaggcaataaaaggaagaggttgggattatcaaaatttggaagctcacaaaagcgcctggcaagttggggttcagatctctggggatgggatggggggggtacttggctggctggctgcctgttgtgtctctagaaaataatggggctggtttggggagtaggagtaggcttgaataaatgctgagaccactccaattactatggtgagttgcctttaagcagcgagcaaaaggatgtaagtctcttccgccagcccttctgcttctgtctagtgtcccctgtttggtaaatcctaatgggaaggctgttggcaagaaatttttgctaagttctagagccagattcacaaagcaaaatatagaaaggtgggtttggaactgaaagataataatcactggcacagtagtggatataaagtcttcctttggcaagttcagctggaagatattgtgccaaacagtactgtgacagaaattagagatggatctgggccagatggtatgtacaagattgagtagaagagtggtctgctcagtcttgaggagtgtcttgcacatataccaaagtcacttttacgtgagaaagcatgctttctattgcagtctagagtttcctttctttccttagaaatccgttgtgaatctattattcatgagtttccatgaccctttgttgaatttgtttgtttttagtttctgtgactcatcgaaaaactacttagtggatttttttaggtgtcttttgttatactggactttgaggagagaaaggtaactaagatataatctctgttctcaggtaagccacaccctggtttgtggtagaaggtgaatgtgaagacactaacattgtatgttaaatattaaaataaaatgaatcatacctgggaagtggaaaagggcaagtctggagaattaacttcgtgcttgtctttcaaagtaggactttgtcaggctgagggagaagtgtgtggagaagtgtgtggtgggtgaggacagcaagtagaaaacacatatttaaagggcatggagaaataattgttaagatgacatgtgctgtatatttaccagttactatataaagaagcgttattcctttgccctgaaatctttctttttttggcttcaaggggtcctccttgtttcagaattttgtatttgatatataccctccccctgtccattatgatttttctgtacttcagccatattgctgagatattcaactttataagcaacaagttcctttaaaaaaaaatacctttgtcttcaaactgaaagccgtctcatccctgtttttatataagttgccctttgcagaacaatttgtagtttctgtatgtggatcctccctacttctgaaaggttgtctggagaggtatcagaatcaccaaacaatgaaagatgcccaagctgccatgccaccagaagggggcatgtctcattcatatgtacactcgagttcttgaattatcatcgttgccttgaaaggctgtagaagtaaattattgggaaaccatcagaatgcacctgcctgagcctttctccctcagtcttcctgtttgtgttcagtggttaatattatcctctccacgtataaaatttgaattcagcaggaccttgtaagacacatgcgtttcattttaagctacatcccattctcagttctctgtccctatccatgggtgggaaggttcaaccctgttccatggacatagctgatgggacaggagtatccaagctaggtcaactgtattctctctcctgggatttttgaatcatgtggtgttgtccactaaagacggcacagagttggttggtaggcatagtaccagggtcagctccttatgcatcagtcacataccaggcaaagttatgggggaggaaaacctaaaaggtttgccaaggaagccagtctatagagaaaggagtgaagtagattttcactttctttccagaaaaagagataaaagaaagatgatatggacagggacaaacagacaaaaaggctcggcctctgcctctgcctaaggaccttctaatattaccatgagacgtgcctgttcttcctgctgattaggttgtgatataggcctgaatccttataacaaacactattttatttaagctagcttaaattggttttggtaacttgtacataaatcattctagagtaacatacactccttacagaaataatctcctgctttaccctaaaggaatttactattatggaaaattcacatggaagccaggaagggagatttttgagcaggaccctcaaatcacatacatgaagtttctgcctagcccttgtgtctcatctgtcttttctctcccctcaccccaactttattttttttaaaggcgttacattcacagaagacaaagcatgtttttgtataaccgtaaaattatttttctataattttttaaagtgatacttagctttttgttgatcttttttgacaataaaataatcatcaactgtgatatatagtatgaaatttgaagaaatttctgtgtaaataagtgataaagcagaaggcagcaaacaagaaaaaggcatttaccaacctcccaaataatgagtagtgtgttagctttgattacaatcccaaaactagtttttttgggtggttaaggttttcatttttaatatcctttctaaagaatatgaaattaatgaatttgaaataaatctgttattagggaggcatccgagtggcttataaaatagatgattttaccaaaaactattgttttttttaaaaggaggctaaatatattcggttgttgacaatactaattattgctttacttatgatgtagttactgtaaattttattcatatgctatgtagttatagtgaaagcaattagactttagttttcaattttcctatttgtaaatggatttaaagtctttttgatagtctaggaaccaattaaatatttctttaatggctcaactaattgctttataactattacttattttaaagtgtttgcttagggtacagagagttaaaagcattaagagataatagtaggcttaggagactaaggatgtaaactaattggggttcttattgtcagatttaatataacatgttaacatacagcatttatacagaggcattctttgtacatgccttaggttgtttaaaagggcaatttaaatttaaagaaggcaatttacttatcatctcggaaattctgtcttgttgccctagggctagtatgcaccatattgcatttaaaaaaatgtttggaaagctgttggaaactttttgtcaacacgtccacatttgcagtaatattctgtggctttgaatgtaaatttaggaatttatcatgttcacaaataaaggagagatgaagtttactaataataaaatgaaactgataatcagttttgaatctaagcagttgtttcagaggcggtttcatgtgagtctttgattaggattttgccttataggagataaatttatttatttattagttttttttatgttatattttgagttctagggtacatgtgcacaacgtgcaggtttgttacatatgtatgcatgtgccatgttggtgtgctgcacccattaactcgtcatttacattaggtatatctcctaatgctttccctccccgcttcccccaccccacaacaggccccggtgtgtgatgttccccttcctaggagataaatttaatctggttttcagccatagtagcattcagactgaatcctgaaaatgtcctctccactttttgctgctgttgaagagatcagtgaagggttttgtaaacctgaaaactctggcttagattttcttagctaaatttctacttagaatcagtgagtaagtgacatatgttaattttcagtgctagtttaataataactttttcataagatttggtttcacacacacataaagtctttataaagccatttgtttcctttaatttcaagacccaaaatattaatttggaattaatattgagtgttttgctcctgatgaagtgtccttaaacaagtctgtcatattgtttgaacttttatttctacttcctcatcttcaagtatttgtgactatttctcatgttgctaaatttagttatttctgaaaaagtaccaaatgacctataaacgcaggaagaacmgtcttccaaagcctgaagggggctctgagtgactgactggctctgggcctaggctactttgaagtgcaattcacgtttgaaacagttctcggagtctaatgcccttccattcagaagacctgtaaatgcttgagttgtttctccatcttctctaaagaaaacctgactgtgtaatttctctaggatcttagggtcatgctgcaaaggaacaaaggtgacattaaaaaacactgtacttcctagttgccaataatacctgagtataaccccaaaacatatttcttctctaggaacactagatcctgaaggtaatctctcaaagtaggagcagagttgtccttacctggctaatcttcttggacaatctgtgattactgtcaagaacttctgttccattccatgcttacagtgaaatcagataagatgatgacttccatgagacaggtaaaggaatttacacttggtttactcagatgcatagtctcttagttaagacagtagatctggcatttgggatttaatagtgaggacaaagagagtgcacacacatatcactatgtggtttctattaacaatttaaaacctaaaactaaaacatgcctcttattaatgttgtacagtcaaaagaatagctgccttcaagttaacatggacatgactaataacttcagctgcttactttacttgctttcagatgtggaagagatacttactcgcaaattcctaattaataggggaaaaaaatctaacagttggacaatacaaaattacataacaattttctagttcatattttaatacagaagggagttttaagttggaatttttttttttttttgagacagagtctygctctgtcgcccaggctggagtgcaatggcacaatcttggctcactgcaacctccacctcctaggttcaagtcattctcttgcctcagcctcccaagtagctgggattacaggcgcctgccaccatgcctggctaatttttgtatttttaatagagacggggtttcgctatgttggccaggctggtctcaaactcctgacctcaggtgatctacccgcctcagcatcccaaagtgctgggattacaggtgtgagccaccaagcccggcccagaatgtattttaagctgtttaaaatggaagcattttatatattctataagaccttctaaaaagaacttggaatttggagcagggataaggcactgttatttggtaacgtgaagttttttttcttcaacttttaagttccgggttgcatgtgcaggatgtacaggtttgttatataggtaaacgtgtgccatggtggtttgctgcacatatcaacccatcacctaggtattaagcccagcattcattagctattcttcctgatgctttccctgtccccacagacaggccccagtgtgcgttgttacccaccatgcgtccatgtgttctcatcattcagctcccacttataaatgacaacatgtgatgtttggttttctgggtaacatgaagatgttgttgtcatgaaaacaggtttgatgactatagtgtaatagtgtaataagggcctaacctcagagacactttcacatttggatttttctttgcttcctagatgttatctttattcctgttgcttaaagaaccagtttaatgcatatagaatttgggttctttgcccagacacccagaggtacatttgataggtacctgattcagagaaggtgaaaattttagattctctatctctctctctccctttttttttttttttttttttgacaggtaaacagaagtaactatcatttggggttgtcaagatatgggtagtagatacctaattccatgaatgccttctctgtgcaagtgctggaaagtaacctcagacttccagactcatcactgagattctttttcttaagcaaaatagtgacgctctgcaggatttctataactgaagttctctaaaagataaatttatattgcattaagagggtagagggtagtatttagagctatgctctcttaaaaagagtaaagaaatttcatgtatatgaaggaacagaaagcatggggataagttttatacaccctagagtggacttttatgataaaaagtaatttacttgttaatcaatttaattcagcaatgggaaaagatctttctcttctttctgaaatcttacacagtgaagggatgaaaatggttatactaytggtaatcagagatgttcctattttgttttgatgtgtagattccgtagtacctagtgttgttggatattaagaaaaattctaatccctgttcttgtgggaattgcacaaggagcaatgtaaacacaggtagtggaggtagagatgtgctgtcgtctacttctgctctaacttgagcagccacatctcactcagggtcatcccataggatgtccaggctgtggttggagagaagtggggggatgaagacgtggggtgcaataatgggaggaggatgggctttgggaccagaaggttgtgaatttgagttctggtccatcttcttggcagctgggtcgattagggtggtgaattagctggctgaattacttcacacatcakagcctcactttcctggtttgtaaaatgcagattgtgcccctctcccagggctgccatgagggttagggaggccaggaattaaaacatgtaaaccatgcattacactgcatttcaacccctgcaagggtgatgcagctagctttacctgattttacttggattgtttcttttttttttttgagacggagtctcgctctgtcacccaggctggagtgcagtggtgtgatctcggttcactgcaagctccaccttccgggttcacgccattctcccgcctcagcctcccaagtagctgggactacaggtgcccgccaccatgcctggctaatttttttttttttttttgtatttttagtagagacggagtttcaccgtgttagccaggatagtctcgatctcctgacctcatgatccgcctgcctcggtctcccaaggtgctgggattacaggcgtgagccaccgcgcccggcctggattgtttctttagtgaagaaaagactggggagaagggcacttcttaaagcaatgtcaacagcctctcatatagttaatacatctctatgtggcccttcccagagtgtccttctgtgaggagatccattacaaatacaaaaaattcatgtggccagataagttctatgaccagataagtctggcaaaagctgtttattatacctgcctcttaaagattcacaaggctgaaaagtcctgaaggaatgtaactttctctaacccagaatttcacaaacttatatgaaaacaaaatctttatttagtatgataacctattggcatcaattcatatattatttcagtaaatgttggagactttctgtgtgccacagacaccttcacaggctgcttcagcgaggactgggggagggagagagagatgagtaaaaagattgaaatgatgattccagatcatgagggatacgttgaatataataaatcagtgtgggtattctgggtgagaagtgagagctatttcagatcagatggtcataaaaggcctcttgaagaggtgatatttgagctggaatctgaataattcaagttaactggccttgcaaaaatcttggagggtagaaccttctaggcagagataaaagcaaaggaattagtgttcttgagagcacactttgaggaaagctgttgcaataagagcaaagagcatgtataagaagtatttcaatcaaatttttatatacaaaatatgtagtaaatctttttcgagcattatgtgctagatactatgtgccacagacacagagatgacagttacatttaaagagtagagtagttcggagaagaaagactcaacatctaggggattgagtgataagttgcatggtggaggtagcatgttgtagtggctgaggttagagccagactgcccaagttcaggtcctagatccgccacttacttgataaccttgggcaagctactgacatctgcatgcgaacactggggacattcctagtgcctctcagtggattgttagtatatgcaaagttgttaggacagtgcctggaacataaggaccacatgctaaaattgaagatgatgatgttagagatattcccgtcataaccatcatcgttacagttgtcatcactgtaatcttttagtgccatggtccagctcagatgcctgagtcttcatgccctcctaatgggccccaggtttgcccatcagagtcttacacatgatcacccacaccatgtaggcactattcttacccagcaaagagattaaaacttgcttcatctgttttctacccaatttaactttgttaaccaccctcttaaaaagaagtttcttgaggatttatctctggttgtcttccagtttgggyggcgggtggtgggtggtgatagttggtaatagggttgaggtaggatggaataaatcagaatctgcaatgaaccacttgctggataattagggtagatgagaaccacaggactgtaataaaaatggattatcataacgatgaccctacggtgctaaatgatgcaccatgttccttttgaatcaacaaaagttaaagtcttcctggaatagttttagtacattattgatctctaattcttagaaaattggcaatccatgtatagaataagaaagtctctattgctgcaaatattcataacctgaagaacccattccctaaccattttagataaataagatttttataaaattaaagcaattattaaaattctatttgtgcatggaagaagccatttagctaaccaattatatatctaacttctgtaacagcacttcggaattaatctaattgcatcctattgaaagtcagtcaccttttgcaacatgacaattttatgccaagagaatgaaaatgtcaggtatttccattacagagagtcacattttcccttgattgtttcaggcagaaagaaagcgactcagattaatctgtttagaactattttcagttatctgtatatgtcatacatgctgtcatgttctaagaccactttgttcttggatactgctttccaaaatctatgggattctactcttaaaaaaaaaaaagaatatctcgctttacatatcattttattctggggaagcctaattagcacattaatatcagagagctgacaacctcctacatgttattttaggattccatgtgcaagaccatattattctagttatttgaatggcaygtattctccacagcttgctaacagtagttttgtcttttaaaatttatgtgtttccagtgtttagggtctgctaaggagtgggaggtgaatgtgtcatcataaagaatgttgcagcaaatatattttgcaggatacagccatttccattttttgtagtacaaagatcctatcatcctgaaatcttacattgtagattgtgttatgtgctgctttttatttcagtgagatgaaagtaatattctgaatgagaaaagaattagagtagcatttctcaaatgccagttttgaacctaagtttaaaatagagagatttatcactgaaaagattaagagaaaagaaagaacatttatggaatagggattacactaggtattttcatagaggtatttaattcttgcagtcaaccttcaagatctgtgagatttatccatcacaaataaatgtgttcagattaagtatgtggcctagcaattttgtaaattactgttttttactttgcatttamcatttatgtaattccaagccaatattttgaacctacttttaayagttacataagaccttttagaatgaattttgtatttatcttttttctcctgattttctggccttcatttttctgccaaatattttaaaaaatagtgttttactgtatgtttttagataagccacctcatgccattctygatataagttgtggttattaaattaatttaataaattaactaattataaacttggccaaagtcacacaggtaagaaatggtaggtccaaatatataaacctaaatatgataaatttccragtacttgctgttctctttgcaccttgctgccttatggaatcaaggtaaaaataaagaaaaaaatgtaagtgctttgaaagggttcacagctatttgtataactagaatataatctattttgagcaaagagaattgggttatatatcttatttctagattgggccaaaccagtaagtcattttcggtttacaggattcaaatcaacattgtattaacattaatgaaaatgccaactcccattcagagcagatgagcaacaggtgatatcagagaggacctcttagaaaaagcaccttttttttctagtaactgctgattgtgtcctacaaccttctgtgttaattagcttgaagtgcctcaataatgcatcggccaggttgcccagaaccctgcaaacatcttttcatcatccctcatgttgtgggctttccttaataggaaggcagataacttcagatctttatgtctcttagattttatagttttgaaaaagtgacaagtctttttgtcaatagatgcctgggtcttcttatacttctgaagagaggaaaatcaatccaaaagaaaacacaatagattctaattttatggactgttcattaggaagtctggttttgcttaagacaactgtgctggtctagaagttcatagtatttattgatttttcttctttctgatgatcattattgctattttgtagcaatattgatattgtataatataaattctttttattttgctaaagggaagtgcttctgtattcttgaaaactgagaatcaaacagtatttaaagtactttttctggtttatccccagtgtctgtcatagggcatagctctaaagaagttcactcagatatcaagggtgaatgaaaattctctgaaagagaagtacaaattattgtgggtccaactctttaccatacattatagaaggcagagaaaccatgaccacctaaacttgtaggacactgtggggagaagagcctatgaagttgattcctaatgtaggtctgcagtggccatggagctgagaaatcaccgaaatggggaggaggaggagggatctgtctgcctaacttcagtaatattattgccttttcttagataaccctcttcactcttttctgtctcctcaatccttatctagctgtcaaagtctcgttcaaatcctgcctcctccaggaaatcttatctgctcactacaactcaaactgatttgttgacctggccrtttacagcatttgtttgaccataccacctggcccttaaggctgcctggcgttttctaataaaagctatcatttttctgaatacagactatttgcttgcttttatttcttagcagctccatgagatacatactatcattgtcccaaatttatattgtctgtctctcccttcacatctattaatatttgctttatgtatttakgtgtgctaatgttaagtgcatatatatttataattattctcttgatgaactgtatcctatactactatataatgaccttctttatctcattttacagtacttaaagtatattttatctgatacaaatatagctaccctgaaagtatagctctcttttgatttcaattttcatggatttttttttttttcatttctttactttccgtctatgtgtccttacaggtgaagcgaatctgttatggacagcaatagttaggtcttgttttttttttgagacggagtctcgctctgtcacccaagctggagtgcagtggcgcaatctaggctctgcaagctccgcctcctgggttgacaccattctcccacctcagcctcctaagtagctgggactacaggcgcccgccaccacgcccagctaattttttgtgtttttagtagagacggagtttcaccgttagccagaatggtctcgatctcctgacyttgtgatcctcccgcctcggcctcccaaagtgccgggattacaggcgtgagccaccgtgcccagccaggtcttgtttttttatccattcaaccactgtgtattttttgagtggagaatttaatccatttacattcaaagtaattattgacaggtaaggacttattattgccattatgttcactacttcctggttgctttataaatccttcattctgctcttctctcttgctatcttttttatgattaggtgattttctctgctgctatgccttgattccttatgatttaaattttgagtatcctccttaggttttctttgtggttaccgttaggtttatatacaacatcatctagttataacaggctattttaagttgataacaactcagattgcattaaaaaactacacttttgctctacttcctcccacattttacgcttttgatgccacaatttatatttttatattgtgtatcaacaaattacattgtagctattatttaaataatttatattttaaccttcatactaaagtataagtgatgtatacaccactatcacagtattattctgaatttgactgtgtacttttaccagtaagttttatgctttcatatgttttcatattactaattagcatccttttctttcagcttgaagaactccctttactatttcttataagacaagactagtggtgattaactccctcagcttttgtttgtctgggcaagtcttttatctctccttaattctgaagcacagcttagccaggtacagtattcttggttggtgatttttttctctttcagcactctgaatgtatcatctcactctctcctggcctgtaaggtttctgctgagaagtctactgccagtctttctggaactcccttatatgttatttgcttcttttctcctgctttcatgatcctctttttgtctttgatttttgacagtttgattatagtatgtcttggtgtagtcttgtttggattgaatctgagtgtagattgttggccttcctgtacctggatatttatatctttccctagatttggaaagttttctgcttttacttctttaaataagcttactgagcctttgactctcttcttcaattcagttcaaatatttgctgttttgatgctgtcccataaatcccagaaacttcctttgttccttttcttttttctcctctgtatattttcaaataacctgcctttaatgttacagatttttacttctgcttgagcagttctgctgctgatgctctctattgcatttttcatttaactcattgtatatttcagcttcagaatatttgtttgaattttaaaagatactttcattttttctgttgtttctcattttgatcatttattgttttcttgactttattgaattatttctctgcatttaagtttccttaaaacaattattttgaattctgtgtcagacagttcatatatctccattttggcagggggcagctcctaggagatcttttgtgttcttttggtggtattatgtctctttgtttttcatgttttttgttgctttatgttaataatctgtgcatttgaagaagtaaggacttattccagactttgcatactgggattttctggggaagcctttcaccagtcagctcatccagagatccagagattctgagcaggtcatctggtgtggtcctctggcagacttactactggagcccttggactttgtgcctggatcagcaggtgggtgggcctggtacctgggtctctgggtctgtcgggttggacctggagccttggatcccctgttcattggatctgtaagggtaggtctggagcccgtatcctcagaggttgatctgaagcctggggggctgacctggtcctggggtaggtcttgagtgtgaccttgagaggctgaccacgtactgggatgggcctggtacccaagtctgcagggttggtcctggggtaggtcttgagtgtgagtctacagaggctgaccacgtactgggatgggcctggtacctaagtctgcagggttggtcctggagccttggttcatgggtccagcttgtcagcagggtctgctgggctgggcctggaccctgggtctgctggagcatggggctgcagggactttattctgttcttctctcttgctgtcttttttttatgattaggtggttttctctagtggtatgctttgatttcttactgcagggaccagattggcactgggaaatcttgaagcctatgtccagagttgccagcctggtgcctcagacccagtccaatgacaggttagccagctgaatgacagacccatcccctgtcactgggctgggtctgaagtctggggctgtggtctgaagtctggggctgtgtagggcaatctggccctgggatggtctgaaacccggggtggaacctggggtcatagaggctggcctggtgctgggtggcatggagcctatacctgyagaggctggcctcatgactagggctgcagggccagcttggtagcttgggtgggcatgaagtctgggrctaatggggctgttggggttggcctggtggtggggcaggtccagagacagcctgccaggctagcctagagcctggggctgcaggatcctgcctggtgctgggaaagactcggaggctcagtccacagatagttaccatcctggaacctggaacctggaacctcaggggctggcctggcactgggtgggcctggagcctgtatctgcagtcaggaagcagggtctgcaggtgcaagcctgatgacaggctgcaggggatagcctggtgctggcttttattgaggcaagcttcattttgccggcagatccaaagcaaagtctagtgcttatttctctctccttcccccatactgaggataccttgctttaagctgtgctgcctggggttgggagtggggtgatgcaagtgatgtcaaactgtccttcctaccttcttcaatgctacatccaggtgctgtaatctctcacttggtttccttagttcttgtgaaaggtgtttttctatgtggatggtagttcagattgatatttctcttgggtgggggtgatgtgtactggaaagtcctattcctccatttctttatatctgtctcaaattgtcccagatttacagatgaagaaactaaagttcagcaaacttgaatatcttgccaatgacacaaaactatttagtagagccaaggttcaaacttcagtctttgtgaattcagaggttgcttgcttccactgtgcagatgtggaatatcaaactagtctttagattctgcgagatttttctttctctcttatgttctaagaaatgggaggtagaaaagaacagtgatgggtgagggagaactgtccttgagtctgcaccctccacaggaattttgttgctggggaaggttggggaggggctgtggagagagggtccttagtgcccagctgaaagtatttttcccactggagtggttccagatttaccaaactgccatgaaacttgcaaccaaggtgtgacactacccctggctacaattgtctaccgttgccaggcctttggaaactgctgcttttgccaccagggcctttgtgcaaaagggcactttgctttctgtccctgtggccatcaccagcttcccattgatagctcctgtctataactgttggggtttaccatccaacaagcggactctatatcagctctcttcacctgtgttgtcttgtatgttgctgtgtgtctaaggtgtgataatttgccctttcttcacttgtttttcatagctgtctaatttatattgttttgagtaccaggactgtgcagtgggctccagaactttctccaaagggaatctgttgccatttaactggggctgttctagtgtgtgctacccaagaatgcccctttatatgctttttaaaaatcttaattcaaaaatacattttttgtgaaaaatacaaaaaagaataaaataattaccacccaaagacaacttgctaaatttagtatatattattccaacattttctacatttatgtatatatattacataaagaaaacatactttttaagtaaaatggcttgttttgtacctatagcttagtgtcctgactttctctcgaaaccatctttcataccattaaatattttccatatcgtttagtagtaaaattgttcagctaatcctctattaaggttgtttctcacctctctgatgttgtaaacagttctgtggtaagagttgatgtagctaattctttgtgcaccttcttaaatattgtacttttctcccctttctggtttattttttaagtaatatgtataaatgagggaagtaactaagttgctctccctactgatccacagggtcatgatttctttagggtacatttctagtattttaattgttggatcaaaaagtatgcaaaattttaagtcatttgcattttagaaaggttatgtaagtttactcttttaccaataactgaacacctttgtggacaatggatattttcatttcagattttgtcaacttcataggtgaaaaacgaatctcatttttttaacttatatttttaaattgctagtgaagttgaacgtcttttttatttacaaattggtcatttggatgtttcttattttgtaaattgcctgtttgttttttcctgttttttaccattgatgtgtttatgtgttcctattgatttgtaagagttctctaggggaggggacttggatttaagaatattaacaatttgggtgtcataaatattagttactccccccagttgttttgtttttattttatttgtgatattttaaaatattattcaaggttacaaaagatgtaatagttaaaaatgaaaagtataatcatgctgttttcttattttctacctaacagcattagaaaatatacaattctttatatttttgttttagcaatagaaaatttctatgcacttcttgatagaaaagatgtgaatttgacttaccctttcccatttgcctcttatcctattaatatttgatattttaaaaattctggttatttatccttatgacttgaagtaactcacctaattctattttgtactccattatcattcagcggcatctcttgactgtctactttataaaatgagaatattagcacctttatcccttcttaccccctcctccgcacccgcagactgagcccagagcatttccaggagtttcttcttcctccataatctacacaggacaggctttcatctccactgcagctctttcgctggttcatctcccagctggctctcatctgcttcctgtcgttccagcccgtctcttccctgttacaagttatcctccttgtacctccgtctttttatttaaatggttctctaaagatgaaaggcaaatgtgcctagcttgccatcttgagctgaacattgcagtgctttgtatatatagaaattttaaaatttttatgtggtgaaacctgcaagtgattccttttggtttccacctttgccgccatgtttagaaagtctttctccaatttaagattatgttttctttagtacttttgtgaattacttcttactttgaaatctttgttcatttctagaatttattttggtgggtagaatagtttagagattmatcttttgttcaaatggttagccaactactcagtatcatttattaaataatacaaagttttgaagtactgaattcttacatatatttgtgcccgttgctgagctttgcttctttaacctgtctctgatgcacactggtgccaaacttttaattattgccatttcagaattttaatatctggagggcaggtcttcaccaccatcccccgacatcattgttctttatcaaaatgtttttagctgatgttgtattctctcttccctgctgcaaaaggagtttactgtagtatacacgtttgaatgaggctgccttggtcagcccacgtcttagctcttcgtcagtatttcyttctagctaggcagaaagagtaaaacttctgtgtaatactagttccctgttccacccaggttttgtattcacttgcttttaggtctaggactggagaatgcagtacatgccaataattctagtcttctctgatctgtgaacatataccttcactgacatttgtgtagttacttggagccaaaaggaaaattgtcacttagccagatttcactctcaacatttcacgtctccttccactacctgacacctgctagtacctcccagtcacccaatctgatctcctaatctctggcatctgacccagcctccatcactgcctccctcaggaatgtgtagatggccttcaggccatttcgtcaggctccctctttcccaccctacctgccagtctatccttcgcctgcctgccttcctttccgggtgccagcacaaagtttgtgacctcaggtgcctttgtgctcaggcagaattaggcacctagcaatttacgaaacactcatggctgggtgcagtggctgacgcctgtaattgcaacactttgggaggccgaggcaggtggatcacgaggtcaggagttccagaccagcctgagcaacatggtgaaaccccgtctctactaaaaatacaaaaattagctgggggtagaggtgcgtgcctatactcccagctactcaggaagccgaggcaggagaaatcgcttgaacccgggaggccgaggttgcagtgacctgagatcgtgccactgcactccagcctgggcaacagagcgagactccgtctcaaaaaaagaaaaaaaaaaaaagaaatacttatttaattatgcttacctagaaacattgcagcatcaacataactggctccagccagaagaatgagtacttgtttcctggcgggaaggatgccaagaaacctatgcttcggagtctctgtgggcacagagcctgtgtttgaggcagatggaatttcatccgtcggaaatttaccgtcattgactctttcctaaacatacttagagctaactgaaaaatggtcacctttgcacttttgcacaaatctctatcaaaagccagggagaacagaaaatctcttttactacttttttattttcctttttttttggaaacagggtcttgctctgtcgcccaggctgaagtgagatggcgccattttggctcactgcagctgccgcctcccgagtcctagcgatccacctgcctcggcctcccaagcagctgggactacaggctaaatttttttttttgtagacacggggtttcaccacgttgcccaagctrgtctggaactctgggctcaagcgatccgcccacctcggcctcgcagcgtactaggattgcaggggtgagccaccatgcctggcctactttttccttttacgtttgctgatttttgtcccatccttctttttgattctgcaacaaaaaaattaaaatgttaaatattaaatatcttttgtagaagatactttattaaaattctatttcagtgctatcaagtggaaaaataaatgcaagtcacatttataattgtaaattttctagtagccatattaaaaatagctttaaaaacccaggtgaaattaattttaacatttaagctagtgtattcaaaagaatgtatcagcgtgtaatcaatcttaaaaaatattgagatgccttacattcttttttttttccatttgatatctgatgtgtattttatacttccagtacatctcaatttgggccagccacatctcaagtactcaatagctacatatgaaatcactttacctccaaattctgagtgattttactagtgactttatattggaaataaccacatctagaagttcttatctagggatgcatgttcagaatcacctggaagctttttctaaatatgcattcctgcctgtaccctcactagatctgttaaggtaaaaatctctgctctgtgtgagcctgggcatgtgtgtcttgagaaaggtacataggtgatattgacaagtacatttaattaaaaaccactaagatgatccagcttcttcagtctacctatgactaaacacgtcctgtgtgatcaaacagctttcccacagagagtaatgatacagacctcagtcttccattcacaaatctggtgtcctttttgcctcatcatttctaacatataggataagaatgtagactaatattatacacagatttgttcaataacaagagtcagcaacaaaagggagtttcaagttactctttagattatcaggaaatttaatgtaaaatatcctacctgcacatgtgtgcacgagcacgtgtgcacacacacacacattgtctaaatagtcttgttaattgaagtttcattgtgatgggcatgaccgtgtagattttatatgcatttccatgttcttgataccttttagactcacctcatagattatacttttctgaaactgcttttaaaaatctatatcaaaatagawaccaagggctattataattattttagtatatctctggacatcataaccaaatacaaaagttcttcagcctgtcagttttcaaagtgtcagctctggatttttcaggttaaaatttcatatctttaataacaaggctgccagatatcagcaggcagtgtggttgactactctgtaatttaatgggagttcttcataggtgagtcacagtggctttcttctctttctttcacatggtgctgacaaggacagcacacgtgctatactgaaagatagtaagtctcagaaaggtcatccaaaggtaatttgtggattatttttgatgagttggagatatggagaaaaatgtttgctctttaacacttaattttgtatgaagtgaccaaacttagattatctagttttatttcatgcaagtgaatttaacaattaaatattttcatagttctttaatccgtatgcttattaaaaatcaacttaagtctacaaaagtcacaagtaattaacaagcctgttaaataaaataatgatatccataatagcctacaaataactactagaatttttaaaaagcattttaaaggtccaaaacgtttaaacaggttatttagcagtaatcaggatggttatatgacactcacttgaaagaggcttyagtttagattatctagactaactgtctttttacaaatggaaaattcagagagatccaaagagatgaagggattaactccactcacatagagattcccttccagtgctagtttgccactgtcttctgactcacttcagttggctttttttttttttatcagctatgatgactttcttttgctagaatgtaatatcatgttaaggtatagtgatttgcttataataaaatgatttaaaatattttgacacatgtctattggacatatcaatacaacagaacaaagacaatagccccatgacttcagtgcttcagagttccatgtgtgtttccttccgtgtgtctaacataggacattaaagagcatgatcatttcttcaaaaataggttccttcaagctgagtacaagatccaaattttaaaaataccttttgtggaaaatactaaaacttggaaccacaaccttgtttctctcttttaacgtaattgctcacttcatgaaaaaaaaatcccctttggacaaatggatgtaattgtatatgtaatgcactgggaagtatgagttactattgattaacttgtattaaatatctgagaaaaaggtatgtattttatttgtaattttaagttgacgagatgataaatagaaaaccccttatttggagttccctgatgtattcttagtggtcaagacccttaaaacaaaaaatgtgatttctcgttttacattctcctcctttctagtttttttttccttcttatgcagaacagagattttattgtagaattaaaactgataaacctgatccctcagctctgtgctattttgtttaccccatgaggagttgctccccataaacctgagagtttgttagaaggtaccttgttcagaagattatcaggtttaagcaattgccattcaagagagtaaagaagaactagtctggaagctggcaagaaaaaaaaagttgttatttctaagtcaatgtttgtagaacaattgcctggttaggcaatgagacagtagtgtttaatacaattgagctgtgrtgtataatatgagtagtcatacactcttttgtaagagtcttggattgatatttttgttatactttgcaatcaaataaaggaggctgtttgcacatatcctgaaaacgatttgataactatatagtgattatttctcggtaatttttgaaggtctactaaccaaaaaattctaataaaattcactcttatgaaattaaagattaagtcacaaaaatacaactgtttagataaatattcaagcactgacaggcatatagcacctcagttctgtttgtttgctggccattatgtttttaccagcttttgttttaaaagtctcatctttctccttgattaaattaaatgaacatcctttcctgttactccaaaggattccttataatttttttatagcacctttgattttagactgagggcttttagatagacttaaatagattcttctactgtatgtttctgaaatattggcccctgtactttaccaacatacatttcactttataaagttaatgtaagggcttttcagtgactccaggcaaacctcaaacaatctctgatttgcaaaaagatcaagatgcctctggaaataacacacaacccagtgttgttattattatttttttgcaagacctaactagagaagtgatcattatactgtatattctttaatcttgatgtttttaaagaagtttaagtgttgtatcctttaagcaattaagttcagttcaaaagacagaataaatacaaagctctttaaaaaaaaaaaaaacccttaagagaccacattgtggtaagtatttcagcctctggattttgataaactagaaagctttattttgaggagtcattaacttgcaatttggcccagatcactctgtaaggtcatggtagcttcagaccccttatctctaactagcctgcccgctgggacagaaagtgtgttccaagagaaagagcaagatctctatgattagattgagtctacaggggactgagagccctaagaaaacttcagattttaagaaatcttcaaagagaaaagagacttaacagatccagatgagccatgggaacagtgaagtgcttggtgcatgtatatataagttctcaatagagctgtttcaaccactagtccaaattcaacttctcaagcctggtagagtcaaatttctggcacttggcagcagagagtttatagaatgccttgatggaatcaagtagtaacctgtcttccttgtcttccttttgcttccaaacttatgacttggatttttttttttttttaatgctctttccagccctagtagtgacagcattttccaaaatgttactcaaaacctctcaaatagcagaggcagtaccaacacatcctggcatctagcctacggtcgtgcttcaggaatacactgactgccttggtgatggccaaatgccagttcttatagttaagttgtggcttggacatgtggacccattcctttctgtaatcctatcatgatcccctgctttctttcttccctaccagaatctaagctcctggaaagcaaatgctatgacttttatctcttgtattcccacagccatgttggctagaaatatggtggatacacaaagaaagttagttgaaagaacaaatccaactatccaagaggttctgaatacccactggccccaccaccaacctctgctcttcttcttcttttttttttttttttgatatggagtcttgttctgtcgcccaggctggagagcagtggtgtgatctcggctcactgcaatatccgtctcctggattcaagcgattctcctgcctctaccttccaagtagcagtgattacaggcgtgtgccaccatgcctggctactttttgtatttttagtagagacgggggttcaccatgttgcccaggnnnnnnnnnnnnnnnnnnnnnnnnnnnnnnnnnnnnnnnnnnnnnnnnnnnnnnnnnnnnnnnnnnnnnnnnnnnnnnnnnnnnnnnnnnnnnnnnnnnnnnnnnnnnnnnnnnnnnnnnnnnnnnnnnnnnnnnnnnnnnnnnnnnnnnnnnnnnnnnnnnnnnnnnnnnnnnnnnnnnnnnnnnnnnnnnnnnnnnnnnnnnnnnnnnnnnnnnnnnnnnnnnnnnnnnnnnnnnnnnnnnnnnnnnnnnnnnnnnnnnnnnnnnnnnnnnnnnnnnnnnnnnnnnnnnnnnnnnnnnnnnnnnnnnnnnnnnnnnnnnnnnnnnnnnnnnnnnnnnnnnnnnnnnnnnnnnnnnnnnnnnnnnnnnnnnnnnnnnnnnnnnnnnnnnnnnnnnnnnnnnnnnnnnnnnnnnnnnnnnnnnnnnnnnnnnnnnnnnnnnnnnnnnnnnnnnnnnnnnnnnnnnncctgggcaacatggtgaaaccccttctctctctaaaaataaaaaaataaaaataaagaaatcagccgggcatggcagcatgggcctgtagtcccagctacttgggaggctgaggtgggaggatggcttgagcctgaaaagcagatgttgcagtgagctgcgatcacacactccagcctgggtgacagagcaagactctgtctaaaaaaaagcccacaagctggctttaaagtgaactaataatgatgtctatgttatgattctatatgatatttgaatatgttcacccttttctcttttaatattgtttcaactactgatttactttagcaaacactttcttcattaaaagtgcaaaggtaaacttaaaccatccaaataatcagccaaatcagtcgaatctacatgaaatatacaacaatctaaatgcttaaaatagataagtacagtagtggagggcgtaatgtgttactgggcttttgacatcaaggacgtctgtgttcgaatcctgactttgtcagttgttagtaccagttgtattgacttagataaatcatttcacctttccaagtctcagtgttttcttttataaaaactatggttgtcaggaggattttgtgagataattatatatgaaagaacctactaggatgtattctttagtaaacattcagtatttggctctctatttggcaactgagtggtggttgtgttccccaggtgtgagggttcctgggctgggctggggctactgtcttgtagtttcagtaatttggtttcttgtgtactattcatatatatatatatatatatatatttttttttttttttttttttttggagacggagtctcactcttgtcccccaggctggagtgcaatggcgcaatctcggctcactgcaacctctgcctcccagcttcaagtgattctcctgtctcagcctcccgagtagctgggactacaggtacctgccaccacgcctggctaatttttgtatttttagtagagacgaggtttcaccatgttggccaggctgatcttgaactcctgacctcgggtgatccgcctgcctcggcctcccaaagtgctgggattacaggtgtgagccaccatgcctggcccttattatatatttttatatactttagaaaatttgatctgcggaaaatctggttcttgttttttggccacattatcagatcagtcactcatctactgtaagtacattaaaaagaatacatggtcactttgcccagttaaccagagaatggtgccattaagttaaaaaatgcatatacatgtataggcatgatcctcatatagattagttttgttagctgcacagtcacagatcaaatcctgagttattacccttcttacagaagggtgtgtcgcttgttcatggtggggacaaggttgtcagtgaggatagcttgatagtaataaactattactaccattggaagaacatttcaaaatacaatattatgcatcctacttaggttattttcacttcatatggtaatagtccattaatttaccctaataatatttagtagattttgacatctactagaacataaggttgaagtgaaaagcatgttttagtttgtgcattttaaaacaattttctacgaaagaaaaccaaaattaccttccatagctttcttatttaaattggacttaatatttctattgtttttaagattcaactcttggaatcttctacatttctttgcctaagtaataggggatggtttatgttttttgccattcataatttttcttaaaccttcatacccacatttagccatatgcgctttaagacacacagtgaagatgaaatttaatacacatcaaacttctgtgcagacttggtgagaaacagatattttgcagcctgctttcactctgtgagtcattaaggagtgggttgataaacttgcattgcaaccttgcttatagaagattgtgcctattgtaagatactccctataaagccaaaagataaaaaaatgctaagggtactgacaattgtttataaaatacagtcataaagacatcccgctccagagagttctctgattaaacttcacaataactgtaatttctctgcctgaatcactttgttaaattttgtcttggcttctggagacagggtagggagacagattaaatttcaataccttatgctattcattgggcttgggagagtttcttcagcataaatgataataaagatagattagtgattctggtttatcctctaatcttagcatagacattttctgtagattagaagtcatttcatttatgaaccaaataaggcttctgatataaaaagaaaaatgaatcttactcagttccctaaggcttagaaaagattgctggaatttaggagttgggtaaatggttttactttagctactaatccaattgaaaaaacgtgagacgattttctgaaaagctaaaaagctcttatagtaaatttgagaggatttttaaattatggagaacaagatagtattgcccttacctaaaattctccctcaatattttgtttcctttgctttggaaacagcatccaagcagggccactgagaagggtgtgtgggggtgggtgttttattgacagttgtttgaaggaaattatgcacaggtacctaaaaagagcaactcaggcaagtttcccagccacttagatttcctgtttctttaagttaagcattgctattcacattgtgttgactgtagaaggattgatagtgtccagtacaaataataatagtaaaatagaatttctgcttagagtttgtggtaaatatcaaaatatcttagtgataagcacatgtattcttttaaattttgtcagttgcccagtgcttccattcattcatcacttgtttattttattcaaccagcatttattgaccccctgctggttctgggtttcctctcatactgtgctagatgcctggtatgcaaagataaatgagtcatggtctctcccctcaagcagtcaccaactactaaattcttggtcattttagttgttttcttttttcttaaaaaaattttttttttcaacaggtttttgggtacaagtggtgtttgtttacatgaataagttctttagtggtgatttccaagattttggtgcacctatcatctgagcaatgtcactgtagccaatgtgtagtcttttatccctctcctccctcccagtctttcccgagtccccaaagtccattatatcattcttatgcytttgtgtcctcttagcttagctctcacttatgagtgagagcatatgatgtttggctttccattcctgagttacttcacttacttaccctccagttgcatccaggttgctgcaaatgccattatttcattcctttttatgtctgagtagtgttccatggtgtgtgtgtgtgtgtgtatacatacacatacataccacggtttctttatccactcgttgattgatgggcatttgggctggttccatgtttttgcaattgcgaattgtgctgctataaatatgtgtgcaggtatctttttctataatgacttcttttcctctgggtacatacccaggtgtgggattgctggatcaaatggtagttctacttttagttctttaaggaatctccacactgttttccacagtggttgtactagtttacattcccaccaacagagtaaaagtgttcccttttcaccacatccatgccaatatctattattgtttgatttttttgattacggtaattcttgcaggaataaggyggtatcacattgtggttttgatttgcatttccctcataattagtgatatcgagcattttttcattttttttggccatttgtgtatcttcttttgagaattgtctgttcgtttccttagcctactttttaatgggattgtttgtttttttcttgctgatttgtgtgagttccttgtagattctggatattagtcctttgttggatgtatagattgtgaagattttctcccactctgtgggttgtctgtttactctgctaattatttcttttgctgtgcagaagctttttagttcaattaagtcctgtgtatttatctttgtttttgttgcatttgcttttgggtccttagtcatgaagtctttgcctaacaaagctattgtctagaaagttttcccagggttatcttctagaatttttgtggttttggatcttagatttaagtctttgatctatcttgagttgatttttgtataaggtgagagatgaggaaccagcttcattcttttacatgtgatttgccatttagcaccatttgttgaatacagtgtcctttccccactttatgtttttgtttgctttgttgaagatcagttgactgtaagtatttggctttatttctgggttttctattctgttctgttgttctatatgcctatttttataccagtatcattgctgttttggtgactgtgatctcatggtatagtttgaagttgggaaatgtaatacctccagatttgttcttttgcttagtcttgcattggctatgcgagctcttttttggttttatttcttttttttaaaaaattattattatactttaagttttagggtacatgtgcacaatgtgcaggttagttacatacgtatacatgtgacatgctggtgcgctgcacccattaactcrtcatctagcattaggtatatcttccagtgctatccctcccccctccccccaccccacaacagtccccagagtgtgatgttccccttcctgtgtccacgtgttctcattgttcagttcccacctatgagtgagaatatgcggtgtttggtttcttgttcttgcgatggtttactgagaatgataatttccaacttcatccatgtccctacaaaggacgtgaactcatcattttttatggctgcatagtactccatggtgtatatgtgctacattttcttaatccagtctatmattgttggacatttgggttggttccaagtctttgctattgtggatagtgccgcaataaacatacgtgtgcatgtgtctttatagcagcatgatttatagtcctttgggtatatacccagtaatgggatggctgggtcaaatggtatttctagttctagatccctgaggaatcgccacactgacttccacaatggttgaactagtttacagtcccaccaacagtgtaaaagtgttcctatttctccacatcctctccagcacctgttgtttcctgactttttaatgatcgccattctaactggtgtgagatgatatctcattgtggttttgatttgcatttctctgatggccagtgatggtgagcattttttcatttgtttcttggctgcataaatgtcttctattatttcaggagatctactagatgctggagttacagcagaagaaagacaggaagagtttcttcccttatggagttattctctagcctaggaataaaagtcaacatgaataaaatggagaagcaatcaatgctgagctgaatttttcaaatagagtagagctattaatcatattaggtcagagatgtaattctttggtgagagactaataaatgaaataaaattataggtctttttgagactaattgaaattatggaacaaccgatagaataaaactacattctaaaattgtagtttccagattcagacttagaacattccttaattaacttagcatttgatttatagagaactttaatatttcaatagtattatctatcaaatagttaatgaactattttaactttctttgagaaagttaraaggcagatatctccagttttaacattcggctctgactcaaattttggttaagttttgctgtcacatctagactttattacataaacaaagatttaaattaattacagttacttcaatgggatatataattcagatttattcaactttccccattctttaattactactggtcagagattgttcttgtgagagatacactattttagcatgactcagaaaccttagtaacaaagtgaacattttaaaagcatacaaaatacaagcccgaattcgattcagaaggcataaaattaagctattggatgctgtagtttctcagtgctggtgtgactctctgcccctgcctcatgatagaactaggaaccataacagttcactgagtcatgctaggccatggtatcagcgcgtgcttggcagaccctcagtaaacctttgtgtgagtgggggcatttgttgcacagtgatgatctcaacattactttaataatctataccacatatttatgcttggtattggtttgttttaaaatgcaatttttaatttaattttattattattattttttgagatggagtctcgctctgacccccaggctggagtgcaatgacgtgatgtcggctcactgcaacctctacctcttgggttctaggattctcctgcctcagtctcctgagtagctaggattacaggtgtccaccaccatgtccgactaattgttgtatttttagtagaggcagggttttgccatgttggccaggctggtcttgaactccaaaatcagctattctttaaaaattatgcatttgaaacaatgaagatttagccattctaaacacttctttagaaactttatgcctgcccttccttaatcgattacatttagatggaacttttgtataaagtgttctcctacacatgatctcatttgatcttcttgacagttctgtgactgatattggacacttattattatccccattttatcaatgagttaattgctatttacctgcgattatatagctaattaatggaaggcattggctgtacaatgggatttgtgactcccactttacagctgagctcaattctttctaccattgacctgcaacgatgttttaaataaaatgactactaaggttagatgttttaaataaaatgactattaaggttagatgttttaaataaaatgactactaaggttagactgctaaggttagaggttagactgctagtttctgccaatggatcatttttgccaataataggataattttttttcacaataagaatcctaaaaaaaaatttcatcctagcctcagcacttctctacattaattctaggaaacacttgtacttagatggagcttcctaaggaccagcaatctttttaacaaaagatgagcccttcaaaagctgcctgataagtgagtgcaagaattataaccattgatacacactgtagtcatcaaaaagtcagatcacacagtctattctgcataggactccattcattgccttttaaatgcaataaacttcccctccctttttcacaccatatcctgcctttttctaacctatattaatgattcaatacatatggtgaataaattaagtgatagagtttttttaattagcaagatttttatatagcaagatataacctgagttatacctgtatttcactttgatctaagagaagcaaatcatactagctcttatataaaaactctgtaatggtagcataactattcagtaatgttactaaatgaaaaagaactgcacaatgcattttgttatgcatattttctttaggaattccttcactcttggaataaacttaactcttttccataaatgagacccccaccccccgcagtccaaaatttgtcaagctgaatgatcactaaaatcacctaaagaacatttttaatgttatttttctcaagctttttataactaaaattttcttcccatatacaaaaagctgaaagactagtacaatgaacattcatacaagtacctcctaaattcaatagctgttaatattttaacaaatttggtttctctctctgcctttctctccctctgtgtgtatatacatagacctatctgtataagtcttggcttgatttgagtttaggtaaaacattattgataaaaatacttcttcattgatgtgtgtacttcatattgcattacatcaggtggcaaatgacgtcaggttgtttcatcgctggtaattgtatttaatcatttgttcatggtggtaagtagcagatctctttttttttgtaaataacaaacgtgtctggatggtagtttggtactatgtgaatatcctgttgctaacatttcacctaaaggaaaccatccttttgtccctaccagaatctattgttccatcagactctgttgttacatctacattgattagctggccttcttctgtaaaggtgagcatttctttatcaactgtgggtcgactacagtttcttctaaaaagttagggtaatttrtaatccttcccctttaccacgtttcgagtagatctcaccatatcgaatttttcccattattttttcagggctacttttctttctgacacaactaaatttgctcaccttccaatttcctgcctcagaccccaaatcaaccatttcttcaaggaacctcagttctttttagtgaaggatggtatgtataaatcaagctctaagtgttaggcatacctattgtacttgtatctttgcttctwgaccttttcagtggacagtgcaaggaaatatgtgtatttctcttaatcatgagttcatgttagtatttgtaatttaaatttaacattaattttaaaaattatatttgtatatcacacttaaaacttgcaatatatttatttgattcatatatacatatatagttttgaattacaataaaattctgaacgaagtttaagatttctttgcaattctttctgtccctggggagtttttaaaaatgcaaatattggcygggcgcggtggctcacgcctgtaatcccagcactttgggaggccaaggcgggcgaatcacgaggtcaggagatccagaccatcctggctaacacggtgaaaccccgtctctactaaaaattaaaaaaaaaattagccaggygtggtggygcgcgcctgtagtcccagctactcgggaggctgaggcaggagaatggtgtgaacccgggaggcggagcttgcagtgagccgaaattgtgccactgmactctagcctggacgacagagcgagactctgtctcaaaaaataataataataataataataataataataattataattatatctgtgcccacttccccaagatcttctgaattagaatcctggagatagaattttgtcagattgtaggtttgtatttttaaaataaccaatccatgatctcctgccctagtcagcctcaggactgctggaatatgtgaaatctgttttactttgggtcatatctctcaatcctccctcccctcttttttccttcttagacatttttataattttgttataatgtaattacagaattactgggcacagggagaaatgtttaaggaaatgggaaaagggttgactgggaagtaaaaagaaaaatcaagaatttgcaggaagatggtatagggagcttagaagctactggcatgaacagtaacttttcataggctatcattatcctcaatatcttccttacagttcttcagaagattttaaacagtaatcctgttttttaaaacaggatttaaaacattatttaataatggcctagcatttattgcatatttagcattgccaggcactcaaagtattttatgtagtgcctcatttaatccttgcaggaaccttattgtgctcatatattaatattccaattttgtaaatgaggaaactgacttaaatatatgtactctgcttaatgagctactttctaaggaaaacacaagttttatctttgccacaggttgggttacccaggaagcgcactctgagattgagatttggatgccttatgttgttagagatacctgacagatctaacagaattgatctctggggatcaatacctttggaagggaggagatgcaaccacaaccactcagtgaagctgagctatgaagtggttctctaccaagtcctgaaccaaccccacagagagctctggagctagggtagttgttcaaagtccttccaatttggagcaagaggactggcctttttacctctgcattgacccatcgctgtgtgcagactgcccctggaaggaggcttgatcttggatggggaccctcttctgctggcactctctgcagccaggggaataagttttttaatcctgaaagggcttctggggtagaactgatcgctgatcacagtgtccaccacatctccagtaaatttgctataatttcttcaaaacaaattttcttgataaagactttttccctwttggctattcttttcttatttttcccattgaagaatatatatatttagaggcatttgctcttatgtcattcaccataaactcaaagtcttttttaacccagttgtaccagcttttaactccgtgccttatattacatcggataaaccaaaatatttttatgcagtaacttgctgttttttttaaacatcaggcgtttagcatctccagtcctcaacattttactctgcttgtctttacagccattcttgagaaggttctcaaagaggtcaatgcaagagaaagtcttcatattaatccatgcttaggatctcctcaatttcaaccccttctttgttaaagcgtcctctttgacactcagcatacatccttcatcccgtgattttctggtggagaaaattactcactctcagcttgctggctgactgtcccaactgtctgtcttctgtgtgaacttggaggcagaagggctgtgtgtgctatcactccctggtgtagagaaacacgtccacctcctcctgcctctggtgtacctggtcccttgtatatgggattatgtgctctcagcataagaaatgcctgatttttccatttaaatgaggtgaggctatgttacaaatgcactatttgttctcttcttcctttgggagtatttctggtcttcatttttattggaagacctcgaaatactttaaatatgtttgttctatagtttttaaaaaataaatcatttctgagtatgttgaaactcwgtacccagcaacataattttctttggttaataatttttctaaactggaaatgaaatgccttaaaattatgcatttgtcaaatatgctttaatatgtggttaaaagccaatctaataaggaaaaataacctaaaaattagtccaaccattccttttaattccttgcttccaatttaccatgtatatctaccactttggagagaaaaactgttaatttaaccttaatttttaatttaatttaaaaattttaaaatgtaactccatttaaagaagtatcttgaggaagattgaacctgggagcaggtaagtaggagagatcactaaagagcaaagtgtaaggtagagcatttgtttccttcttttttgtttgtttgtttttgtttttgttttgagacagtgtctcgctctgtcgcccaggctggagtgcagtgactcgatcttggctcactgcaagctccgcctcccaggttcacgccattctcctgcctcagcctccccagtagctgggactacaggcacccacgaccacacctggctaattttttttatttttagtagagacggggtttcaccgtgttagccaagatggtctcgatctcctgacctcatgatccacccacttcggcctccsaaagtgttgggattacaggcctgagccaacactcctggcctccttcttttttataaggatgtgtgcctcttcacatagagtgctgtgtaggacttgaacttctatctcatgaatgtctcatgttggcggaggtcatgcagcatgattctcattgcttttaagtgatggataattgagtgattaataattgatttcactgcattctgtgttttttgcaccttttaaaaaaaatcgcttaagctagggtttttgtttctgttttttaaatgctaccccaagtttggttgtgttctcaagtgaaaaacattgctagctatgccgtgtgtgaactttcagcctagtcattttgtggccataaatattgtttctrtgagcctcttttcagctgtgctagtcatgtgttttctgtttgttccttaaattatgtaaaatgacccctttggcagccaacaaattttatagcttactatgataaagagcttccttatggaaaaaatattcaagttatataaaatgttttctagcaggtcaatttttttctgaataaatagttttaaaaacaaatttaacaggaagcttaacaattttttgaaaatttgtacaagcagtgctcaatgtagggaataaggaaaaccaagagatgagaaaaattaacacccaaaagctcatcaccagagaaaactgcttttactctctcttcttctagtcatttctatgccccattattatttttgcatatttgaggtgatgtggtgtaaacagtatgtatattcaatgtgtatattctacttcttcaaactaatattatatataaagattttctacaaaaattattttttgaacgttttataattatatactattcagttgtgttaagttcagttagcataatttttctaactgttctcattaagggcattttgtttgtttctagtagattggctagtatacaggctgcagtgagcatttctgcataatgtctcttctgtaattagaattgtgtccctagaatatattcacaggtctgaaattttgcagtcaggaggaatgaatgcttttaaagattttgatactcacagccagatggctttacaaaaaaaactctaccaacattaaattgtttttactttttttccccgcctaggagggtctaagatctttgtgaccctaaaaaggttaagagccactggtatgtttatgaaaaacagattttatgcttcttgaggtcatcactgccttttaacttccaggaaccctaccagtaagcataccctgaagtagatgtgcaagaaatttgttgaaaataatgatcttagtgagatctgcatgtgaccaaaattgaggatgcctttcaggaatactaacatgccttaggcagtggaaagggtggccaactcctctttggtgtcaatttgaaaaccttattttatttacttcatattgtcagtggcagacaacagatttttgaagaccattttgtgtttttgcaaaatcacaatagcaagcacggtagctcagtttaatggtcctatgtgccaaagtgactagctgaaaataaagtatttcatttttatctgtagcagtcaagtcacatgagatgagtatatcatttcctgcatattacaatttattacatcttaatattcacctaccctagtgggcgtcatagtaagtttttacttctattacagtagcctttcctgagctgctttattatgaattctagttagtagtattttattggtttgaaaataaaggaaatttttattgaaataaatgtattgaaattaacagtgattctaaggaatatatttgttttagcatttaaatagtctacaaagataactatcaatttatttagctagaagttccctagaaattctagttaaggatatgaaaagcatggatgcctccctcgacctagagagagtataatagttaagaacatggaatctgtagccagagaccttggatttgaatcctacctttactgcctccttggagcacggcttttatcaagttacttaaactctgtgcctctgatttcttaactgtaaaatggggtaatagtggtatctagctcaaagagttgttgcaggaattaaaagagatacgtatgatgcaggcagaatcatgcttgtttcattgtatgggttcttctaccttctcctcatcgtattatcgtagtctttgtagtcgtcttcatgatggaagtcagtattcaatgaaatactttctctgataaattgatttactactttttttttcatttttatctccatttttcttggtaagcctttggaggttctgttccaactttgacaatgctttgactgacacattggcaggctgtcttaagtgtgtgctatagtaacaacatgcttcctttttcatttatttgtagataccaggataaatgtgctgcttaccttcattataccaggtaaaagaagggaaccttttcaatagaaaacaaaaaacctgtatgacttagggtcatcagaagagtatggcaaaataaaactgagatattcagtgagacttgccagtgtagtcttccaataaattattgcatattatttgccagagcttcaccttttgttgcaaacagatagcaaatttcagttgcaccacttcagcagcttatgttcatcaactgaggttggttggaatgtgtcagaccagctaaatttaagcatatgttattagcttctttcagttaatgggtagagttgcttcctgttgcttaactactgctatgtttccttctctcaaagtgccaaaaagtttttgaaataaaatgattattttaatggtttggtattgtgaacatggttatggtaaaattagaatattgcttctttcatctaaaaggtggyaggtagcaagatgaagaaatggaaatagaaagtaagggaaagttaaagttaactatcatatttttaatgttttaatatgagtataatctgtttactatataaatcagaaattaaattaggaaaacattccatattattctgtatgaaagtagtgttttgatatgtcactcctaatcctcacttgggtttcatagtgaacattttcatgtgtcctagaaaacagactgttggttgtatttctggataagtactctgtgaggggttttctccctttctctcactgatacctcttacattatgggaggggagaaaaatggaactctggtcttatatataatatagttagcatgtcctgggaaatatagtaaattattctgtgatagtgtaattatcttctgctgtctttatggaaccaggcatttgataaatttttggttagagtagaatatcagcaaagctataggaataggctcaattgtgaataatttagttttcctccatagccacagcactacttttgctcacaaaaaggcaagagtattcatgagcgatagtttgaacatctaaaaattcacagtagtacctcagttggaacagtctgcttaacataggwtgaaaagcactttagtccttacttatgggacagactgatttaattctttgtatcaaatttttaaaaatgtttttccctttatttcacaagctgtcaggggaaatcatgacctaacacattgaaggaacaaaacacctttgacaggcagatctcattgtgcagtgtaagaattggcttctttggtgtaactggttgccaaagatagccttataacatgattttaaaaagcagaataaagagacattaaagtatatattaatcgcatgttttaaaggcccctcgagttaattgtttttgtaaatttctgggtttctacaaagtagaagtcattatcaagcagtcttcttgaagttgtttagcattgtggccaccagcacaggatcaggagtcacaggccagggttcaaacctacatcagtggcttactgattgtgtgacttaatgatgtatgatctcctctctaatctttggcttcctgaactataaaatgtgagagtaaaattacaggtcctgtctcactggatagttgcgaggattggagtatgtaacatacttaacggtgtctagtagttttattttttaaaatcaaaaattgcactgctgttgccccaaaaatccatctaaaaaacataaggcaggccctcctttaaatatatggaggccaggaaacatgtttcctgttgaataactgttattatttttgtatatgggagtagaaataaggaaactagaaatggcacagaatttaggagaaaggaagacacataacagaagctcttcctgtgcaaaaggagcaaaatactaagactctcctcaattagagctttttagtctggttggggaagaaaaactaacatataggacagttagagaattataaaaatattgagtagaaattcataagaggaaaaatatcactggaactagagcagatggtgggggctgagtctttataaatggaattggaactgaacttagaaggaagagaggaggaaagcagggcagtgctgtaggctaaggctggtaagtgagcaaaccctagaggcaggactgaaaataattttttaaaatcatctcctgaagggacgtgactgactaatgagtacagggacaccttgagtgagtacatagtgggtaacactgaagccaggcaaagagtttgagcctggttagggagactttcagtctcttaaaaaaaaaaaatccctgacatatactagaaagcagtggtttttataaatttttgattgatacatatgaattgtacatatttatggagggcatggtatattttgatacatgcatacagtgtgtaatgatcaaatcagggtaattaggatatctgttaccttgaactttttttttttttagagacagcgtcttgctctgttgcccgggctggagggcagtggcacgaccatagttcactgcagcctcgaactcctggcctcaagcaatcctcccacctcagccttccaagtaactgggactacagacacacaccaccatgccctgctgatttaaaaaaaatttttgtaaagatgggggtctctctatgctgccgaggcatgtctcaaactcctaccctcaagagatcctcctgcctcagcctcccagagtgctgggattacaggtgtgagcttgtaacattccttttctttgtgtcgggaatgcctcagatcttttcttctagctattttgaaatgtacaataaattgttgttccctatggtcaccctactgtggtactgaacactagaacttattccttctatctaagtgtatgtttgtacccattaaccaatctctctttacccctttccccttcccagccactgttagccatcattctactctacctcggtgagatccacttttttagctctcgcgtatgagtgagaacacgtggtatttgtctttccgtgcctggcttatttcacatagcatgatgaccttcacttccatccatgttgctgcaaatgacaggatttctttctgtggctgaatagtactccattgtgtgtatacataccacattttctttatccattcatccactgatggacacttaggttgattctgtatcttggctattgtgaatagtgcttcagtcaacatgacagtgcaggtatcctttgatatattaatttcctttcctttggataaatacccagtagtgggatgggtgggttgtatggtagttctatttttaggtttctgagaaacctccatactgttttccataatggctgttgtaacttacattctcaccaacagtgtataagagttcccttactctgcatgtttgccagcattgttattttttgtctttttgataagaacctttctgactcagatgagatgatacttcattgcggttttgatttggatttccctgatgattagtgatgttgagtattttttcatatatctgcagtatttaacagagctaagtctaaatgcaatatatagaatagattaaatgggagacactgttggattaattcagactgcagtggttgaggatttggatcccaaagaagagaacaatgccagtatctgcaccaattccatctttcctattacatcagaggggttgtccgcctcccagccaggccagtccccatgactgctttggctcccatcccttcttcattctcaagaactttgtgcacttgattaccccttctctcacatgctttttaatgtctcacccttgcctttgcttttaaaaatcttcaagcttttcctattaaaaacaaactaaattttctcattccacttcatatttcttccagctgcctcttcatctctattcatcccttaacaggcaaatcaaatttttcaaaaaatgttgtctattcttgtttgtatcgtttccacatctcccaactccacacttccactcactccagttgggctcttgacaccattaccctgccaaaacagctgtcactgaagttatcagtcagcttcaacttcacgttaccaaatgcaatcctcatcttgcttggcttctcgacatagttcaccgtgccctgtgtcttgaacacactgttttggtttttggttttctttccacatattgggctagtcatctgtctcttctatagtctcaccctcttccatccatcatgtaaggggtgaattcctcaaggcgggatccaagatcctctccttttctcactttataatctctccatcactcgtcttattggctcttgagtcaattattatctgcataaagatttgtgccaaattatattctccagtccagacctcttcactgagctataaattctgtttctgtctcctcttgaatgtttcagaagcacttgaaattcagcatatctaaaagggaactcatcatcttcaattctggtctatttcagtgtttcctctctcagtgaatagtatccagttgtataagttacaaatcttaaagtcattcttcatacctccctctccttcatcacacatatccaatccatcatgattggatagcaaaagaaaacagttgctcattttacttcgtaattactataatttgaatgtctgtcccctcaaacctcatgttgtaatttgagtcccaattttggaggtgaggcctaatgggaagtgattgggtcatggaggcagatccctcatgtattgtttcagtgccatcttcactgtaataagtgagttctcattctgttagttaccaaaagcactggttataaaacaaaacaaaagaaaacaaaaaaaaactggcacctccttctctctgtatcttgctccctgtctcgccatgtgatctctgcacacacctgcttcccttccctactgccatgcatggaagcagcctgaggccctatcagaaggagatgctggtaccatgcttcttatacagcctgcagaactgtgagccaaataaacctcttttctttataaattacgcagcttctggtatttctttatagcaatacaaatgggcgaagacactaattaacccttgaatctgtccactttccactttttttcttccaccaccaagattcttatccagactactgctgtctattctggaatctatcctcagtcactctggcctgtttccaggtctgttctcttactactcagccaggggattgttttcaaaatgcttctgtcccttccaaggtacattaaagctattaactcactttttactgctctcagatgaagtccagatgcattaccatggacaccaggcctggcttgatctagctactacctaatcttcagcctcaccttgccccaggcacgcctcactctgtactccagccrtatctagtccttcttgcttggcataggccttccttctacaggcactttgcacaacacgttctctacctgggatactcttccctcctgtcttcacctaagtaacttctgttctttcagatctttgctcagtgatgtactcattctcaagaaagccttttcttttcttttcttttttttttttttcttgagacagagtcttgctctgttgtccaggctggagtgcagtggcacaatctctgctcactgcatgctccaccgcccaggttcacaccattctcctgcctcagcctcccaagtagctgggactacaggcacccaccaccacgcccagctaatttttgtatttttagaagagatggagtttcactgtgttagccaggatggtgtcgatctcctgacctcgtgatctgtctgccttggcctcccaaagtgctgggattacaggcgtgagccaccacgcccggccacaagaaagccttttctaacttcctaaattggatcaattctccttgaagtttcttacagcaccatgtttatatgattatttgtttatctgtctgccccactggacagaaagagccacaaaagcagggatgtatttgcttacctttgtatctctgtaacctggtacatagtaggtactcagtacatatttgttaaaccatcagttaggcatttgaaaggaatgtctagggcacagcaacaaggggatcacaaaaatgctttgtgtgctctagaaggtagaaagcagtatgacagatccatcctctagctgggtaggagagaaccgtgaggagtccagaggcctttctagttccatgctcctggggcctccaccgttgtctatcagagagctggcgagcgagccccactgcagcactgccattaccatacttccctggcctataccttcagactttgtcattcttgttacttcaacatcatgactgcagtttttagccctgttgaccactcctgccttgaaattctctcctactttgccttctgtagtattttatttttaagttttttcttatctctctgacaacatcttggcttctcttcccactcatttgctctrtccgagtactcattccaaaattcagctttgatctcatggctcccatgtaagaggataaagtctgaacctstcagcagttcttaagagaccctctgaggaacttgccagtatctcaagtttcatctcctgcccttctgttatagcaaatgatttggcattctctaagcactccgtgtttttatgattttgtgccttttcctcatgccccaccttacatccccaccgcctatgtactggggagcctctactattttcaaaacgcagatcaggtcacttaggcctgctcaggcattcccttcctccaggctgtgactcccttagaggcaaggcctttttctataacatggcacttttatatagagtacctggcatatagtagacctgtaataaatattcggataacaraaaggacagttcttttatcttttaatgatgcatataaatagtaacctgaatgacarataacactcatgataaaccagagtatcactgaataagcattccttcttgagaacagacctcttgatagttaaaaagtaaaatgtcaaaaagtttattacataaataaccttgatctactctgactgtatttttctgtctcacataattctgttacattgtcacaccctcctaaaatggatttctagtcgtgccatggtaataaaatgttgttctaggctttaaaatgatacatctgccctgaaagctttgaggtatttttttccctggggtggttattttttcagattgccaagagaaggttatcatataccaatcataatgtatgtgttgtaaagccacacattgcaatactttttttatgagctgttatgtaagccatgcttcagggcaaagcagggatgcagtggaggaagagccgttttatgcatttccagctgcacaaagtagtaacatttcatgtggcagtgctatattcattttcgagtttctcccctagagggataataggacattgcttttttgcctttcaaaagggtataacaaacattctctcccaacacaaatgccacatttgacctcattctgctctcagtcagtaaaatgtttttcttagtgtcataagaattattttctgttggtgactttaatttcctataaggtttttaggaaggtttggaaatcattatatggtttcactgggtttgccagatgtgaaggaggattaagaattaaactgtttgcttggctttggctggtattagattataaaatgcacttttattggaaacaagaatcaaaggataggcctaaataagtacttccctggattaaaaaaaaaaaaaaagtgttaacagtgtggtctccagggattgatattcggaatgctattttaaaatattttaaagagcatcgagaaaagagagagtcttagctcttctaggtactaaagtagggttgattggcacaagctgaaagttcactccaaaacattatgtgagtgggcagaagaggagcagatgtgacctcattttcaatcagttcagcttttaagccattcccctttctccacctgatgaaatgctgtggttattcttttgaagggtctgtttagcagggttaatttcttattatcctactaagccatttggtttttaaatgtatatttcctctctccatgtgcatacataatatatatgcatacataaattattcatatgtttaaaatttctcacagattttattttacaatctttctttcattactttgctttcattttttttctcttcactttcccaatacctttcttatttttagacagatcattttgtaggaataatgtggtaagatatttcttgtaaaatattgacttctattaaaatattttgtgtaatttatgatatctcatctttagaataaaaatgctacttaggagctttctttttaaaattcaggaattgcttagttcctaaacatgaagagttaaaatctactagagccttttattatttctaaaaagtataattatcagccttttagtagctatgagagatggactgttcagtggcattcatatgccttgtgtttataggcctgtcttgtcatacgtgctcttaccactgaaatgatggcataaactttgacaaatgcagttttatcaccttttgaaatatactacaaaacgatgtattaactgtttaatatttatrtgtgatttttttcaagttcagttcaaatcagctaaagagttaatgttaaatattcacaataaaaaatattttttaaaacctgtaatgcatatttatgattcagttgatgagccaaagcatgaatttttataaggtctctgaaagatagaacttacatagattttataaatattttcaaatttcatgtgttacatagacttcttaattagttgtctatgataactttgatctgctccaattaaacagtcttaagaataaaagtttttttgtaaaacaataatcaatttgttgtttatttttctgttgcaaaaattaacctgtattttggtcctttaattacttgcttgtttttaaaatttattcccacttgagtattaactcatgtttttctgacctgatttagcagggaactgtttgcaagataaattggccaagagaactaagactaacatcagcagatttcctttttcatgtttaaataaagtactcattttccttgaagtgccaacatgatttatccaaatctgaggaagagaagaaactaaaaaaaggattattcaaattttagatttgtagggaaataatgttttcacttatctcatttggattcccaaaatgctagcttaaaccaagccaagcagtggcataagataatagacccaaaatcagtttatattccagcaggataatagatgagccacagctggatgttctccatttactcatccatgaacaaacatgcactgagtacctgctgtctactaggtactcgggacacacagataaataatacacagtatctgtcctcaaagagccctcactttgactggggagaaacatacagatactaaggcaatacagaagtgcaatgttagaaatattcacacgtacgaaagccgaaagtgcatctgtgtaaacaaaacaaaacaaacaaacaaaacrggacccaggaccatgggaggagggcagagtttcccaggagctggttcctgagtttaaatgtgctggtttgaactattgtgtagttaatggtaagttcacatttacaaaatagaacattagacattacagtgttaacacaaagaagggttttgtatgaaatctccctttttccagtaataattttaacttatatgttgagaatcggaagtttttattttgtaatttaccatgatgcctttaaaatatgccgtgcattgttatggttctttaaaagtaaatttagcataactttagtaaatttgatcacctactttagtttggatgaactaaattttgttcaaaattgtactatatacttctgagtaaatataacggatttgttacccatatttactaatatcactgccaaaaccacttttaaactatacctaatcactggaataatctagagttccaaaagatcaaacttgtgacttagaagattttgtatttctgaagtttttcttcttaatatagcctcttatctctgaaacactttaaataaatgtatatcatctaaagaaagttatacttgtccattaagattgggttctggtaaaataaaggtaatatttcttgtcagttgaagagcaattttcctaaagcctgagtgaagaggtgcctccccaccagaaagtatattcactcacaatgtccaatgatctgagattaaatgtcaaatacttactaatgtatctacttgaaatagagatggcaatggaaagtggacactggctaatttttttttttttttttttttttttttttgagacagagcttcgcttttgtgcccaggctggagtgcaatggcacaatctcagctcactgcaacctctgcctcccgagttcaagaggttctcctgcctaggcctcccgagtagctgggattacaggcatgtgtcaccacgcctggctaatttttgtatttttagtagaggtggggtttctccatgttggttaggctggtctcgaactccagacctcaggtgatctgcccaccttggcctcccaaagtgctgagattataggcatgagccaccgtgcccagccgaaactaagactggggataccatcagtgcataattattgtccaaagacagaacatatgggactaatatgtcagtgttttttatatactaaattgaaataaatctggtgggaacaaacctgtttaacccttgtttggcttcttcaatgattttaaattcttagaatggttcaaagtttttcacattgagatccagctccccatctttcacctggaggaagaagctctgtggggggttagaaacagggggatggctgtgcatgctttgcttctgtttaaaaagggaattcagtctccagaagggaggggattgcactggatgcttggagcaggcatcagaacatgtagatggttttggataatcttcatatgaggttatcttcaataactcaaagagttgattgacaaaaaatagttgattagccaggcacagtagttcatcccctgtaatcctagcattttgggaggccgaggtagcaagattgcttgatcccagtagttcaagaccagcctgggcaacaaagtgagaccccatctctatttaaaaaaaaaaaaaaaaraaagaaagaaaagaaatagttgatatttttctaatgagcatgtagtatttttggtacatttaattttcctgttaagtcaggcaaatcacgaaattatactaatgatgtgggagaaattgcattaaaactgggggaaaagagcccaagacttaaaacttacctcatctagatattctgtagttgatcataattactgtacagaatgcagagatctttagaaaattattgtgttgatacagatggggacttcttttaagaattccaaatggtaatgcataaaaatcctaagattggttaacaagttgcaaaattgtgagatttattgagaggctcttatataatggaaatcttccttttattcagatgactaggtgatcaaaaatgtgatatagacaactttttaagaagatacctttgtttttgaaacagggtcatgctctggtccccaggctggagtgcagtggcacaatcatggatccctgcagcctaggaagatacttatttatttcagtattcttcattatagtacaggatagatctgtattatatactgtattatatattttgcttgtttggttaaaggggggtggcatttaattggctcaaaatgcccccttagaaacccgataaaatcttcccagtaggtggctaaaactgcttcacagacttgcccacttgtaactgcagttaccatagtatattagaagtcttgagataaaaataaaagatataactattagctattccataataggcatcactccattgtcaagagtcccagtgtttcaatcygtaaagtaacttygggacgaactggtttactgtgtagtactcagcctggttaccctgcttaagtttaatatacagtattagagttgctgaccttgatttcttttagtggagcattatgatgtcaactctactattttctctattttgttaccctttggtttatatcttggcctgatacttaaagaaagggraaaaaaagataaagaagaatagcaattcctctaagcgrgtctatttctttgagcagataattcttaccagaatatcatactttaagccacacctagagcttatatagaatttttatatttccatagttacctgaaagcatgcttcatccattttcagttctgccctagttgctaacagaggcattgccattggaaagtggccttcaatctctttctagtttagggatattaaaatatacttggaaatgggtcctttcctgtatggatgacattctagatatttaaggactggtaaggtctctgtttaatcttgggcttatccattttaagccctgattaagcacaaattccttgaccatgcccagcagggctgcagctcccaatgcagtcatcgctcagtgctctgaaaggagcaagacatggagctcttcagtcagccggaaatgtctagtccatccagctgtaactaagcagagagaaagaagggtactgaggctggtgcactccacattcccacccacatcctgccacatgttggtgagagtctggggagccccagcctactggcacgccttgttccctctgaatttctggagcttatttatttttaccacctccctctctgctttctgtgtccattccttctgctccttttaggtaactgcagccagagaaaggatgctgataggatttttctgaagaaaggtgtttttgatcaagagagttaaaatcacagaatgaagtttggcttgttatacctttaaattctgtggctcatgaagcatgataaccaagtagtgtgcatgttgttcaagcagtggccctttcctaaagctaagtcatcatttctcaagagatcatgtgactgcataagctcatcattaaaagcttagttttctaggcttcacctgtgatttcaaattcaaacaagcctatgttactgtcatttgctctaaagaccatttttctaaatccctttggatttatattatctctaccaaggcatggccatcttggaaaaatattacatataagcaggatttgggggtaagaaggggcactttgtaagttgtaaggtggatggttactagcctgaccttacttctggtaatccatattaccatccagtgataagtggttatatttttcagtccatttccacctttatgaacatactgatcttggaaaattatctactcatcctcttttccatttctgtttaacagtgattcattagtttgggctgtagagtggatcagctggtgtttacgaaggtatcattgtaccagtgagtcacagaggcatctactgattctcattcactctcagaaaggaggagtatgtagctttcctcctcaggggagtaaagtattacaccactttatagccgttgtttgaatcatataattaagatttgatgtgattattcttagttgacttggggttagacagacaattcttgtatttggttttgccttccgatttaatgacatgcagcctctgagaagtgagcaaattcaatttttctggtgctattatatggcattattaaaagtacagtgccgtgtagggaatatagagttatgttcttggtgaattcataaggtattgccagtacgggtctatctgatttaagccctgctctcccattttgtattttccattctttatctccccttttcttttcggagtctatcttaccaccaaagcagaaattttaggattcattcatttattcagtgagtatttattgaggaattatgtgccaggataagcactgggcatgcagtggtgcgtacgatggacatagcctctgcactttcacagaacttacagtctagtgcagggactagggaaccaaatccagcccaacacctgtctctgtaaatacatggttactggaacacagccatacccattcatttacatattgtctatggctgctcccacactgcagaggcagacttgaataattaccacagggaccctgtggtctgcaaagccaaacatgtttactacttaaccctttgaagaaaaagtttgctgacccctctctcatggatagtgctgaagacatttcataaatgcagtctagaactggaaaagccttgccaacccccttgaggagtgtgtattctccagagggcagtgggctactgctggaatatggtaagcagggaaagaaacatgttgatgtatgaattttagaaaagtccctgtggctgctgtgtaggaagtatgtgtcagggcgagaagcactaggtcatagtagttaagagtgtagatcctgagccagactatttggattgaaattttgactctactacatactgattctaatcttaggtaacttccctgtcagatgtcccatctataaaatagacatggcaatcatagtacctaactcatgggattgaataagttaatgtatgtgaagcacttaggacacagtgtttaccatcatcactattattcctattgtaatcttgttcagaggtgagggtgcctgaattaaggcagtagcagtgaggatgatagaaagaagtggccagatggaggctctacacaggtgatagaattgacaggaatttatgattaattggatgtcagaagggtagataaaagagaataaaaagttgagggtgattgcaggttttggatttcatcagttgagtgaatggtggtttcagtccctgaagtaaggagacagtcagtgaaacaggcttgtgatgtgaggtgaatgataggttcagtttttggtatgttaaatttaggtactagagagatatgaatagaaatgttcaggaagaagttgcctgtaaggttttgagttcagaaaggtgatacgggctggggaaatggatgtagcagtgatcactataaaactggtcactgagcttggaagagaatgaaataacctagaatgaggatggaatgacaaatagactaataacagaaccctgaagaacactaacagtttaagattagacaaagaaccattaagtcaaaaaaaaaaaaaaaacaacttttggaggaaaataaacatgaatttttaatccattaaaatttctgtcattgaaatagttgaatttgaaaaatatttaaatttgcaattttggtattagcataggtcaacctaaactatggcgtgtatttcacaatttgatttcatgtactatcatattctatattcttctaatattcaatttcttctctatggaacattaggtaacttagtggatgctatggctatggatgctgacatcatatgagctgttccaactactcttctatatttaataacatttccttacctccctgtttaccaattcacttgagcctgtgaaaggaaaaactgaagtggaggagaatgtctttctcctttttgtgttatacttgtttcagcatcaacaactgggaaccagtttgttacaacattttataatgatatctctatattaatttacttacaacactaacataagtaagtataattttggaaggagccaggagataaattggagaaaygaacactttttccatcatcagaatcaccccttacctctctcttacagtcatgcgtgccttacactttacttagttaattcccaagagaatcttcagttcttcctgaatatgatttccaaaaaaacagccttctactcacttactctgacccttagtatggctcacaggttaggctcaagctaagtctctgaggtgggacaatcagaaggctgatctagaggctttctcaaccctgtaccacacatgcctgaagaaaggcatcacatttatacaatcaggctgtgttgccttttctatttaggggggaacttgtgaaaaactttgaaatgctcccaaaagatgtctgtctaactcaactttccagcttatctcaccctttcctattttacaatcctggaaattacagaaaactgagagtgatgcaaaggactcttgcccattgaaatggaaatagttctggtggaatgcaattgattattgccctatgcagagtgaccaatttaaccagatttgcatctatttgtaaattctttgcaatattcttgatgtttatgtttgtcctttggatttatttttgaaccagttgtaatatcttacaggttccttttttaatgagttagttaaaatttatgtcccatcttcaaaaaaaattatcttgttatatatacacatgtatgtttatacatgcatatcacatctgtagaaaaattcacaagaagttggtagctgtaattacccctgcagaaggaaaggcaggaaagcttgcttttcactacatgcccttttggatgttttgaattttgtgttgtatgcctatgttacctaaacaaatagaaaatttttaaaaatttctttttgaactcttgaaaatcaagacttagcgatcccttgactactaatttcacgtctgaaataactgactttctataaaggtttttgcctctaaataaactactaatagagagcagcctacacatcaacatcatacttagagacttacttttgtattttttaaggcaaactagtaaactttacttttcaaggtagctctaaccctgtagaaagattttggtcgggtggtgctaattctatgactactctgttggggaatcacacagttttagtgtagagggaagtggcagacccatcagcctattttgcatttattctgtatgcaccttgcctcttcaccagctgtgtcctctataatccccttgtctaattataacgagcagccctcccattaagccagtgattctcaggcttagatgtatattaaatcaccaggagtgcttttaaaaatcgaaatgcttagaccaattgaatcacaatgtctgagggtaagacacagacattggcattttttaaagtgatcaaggtgatgccaatgttgagaaacagtgtcttgtgcgaagaatggtactggcttaggaaaaaacttaacaaataatacctcagaagcaaaagcactcaggatatctgactggaagatctgcataggtgatgaagacggcccaaacagaaaagagaggcaccctttactgtgaatgaatatccttgtacaaagaatctgttttgacccatgctgcttctggaatggggcaaactagatatgggggagtggtttaaaagcccgagctgacttagttacagatattagctttttttatacttctgatttcagataaactctcagtgagtaaaaaataccaaatcgggactctgcatatccccgccttgttcctctgccatttggggcactgagccagcctgctgacagtgacatccatctaataccactgccaccatatggttgtgctaccgacaaaaggttatatttatcacacacggtacaactgggaaaaccacatactgtacaaacatgacctattaagcatctgttttaatcaaagattctagaacttctttgctctaacccttaaaaatatgctttattaagaggtctttgatagagaagtagatttgtaaagggagaagtaaaaatgcatcctttcattaattttgaaatagtaaggcgaggagatagcctatttcttggtatttcttctctaccctgaaagatatctcctaatgggaagtcctgattaatggcccgcttgtattccaaactgttttattgttgcctcagcctttttcaaaacctgaaaattggtctcatgagctctactgtggtggtttgccttcatgtactcattgtatatcccctcccttttgtataggaagacagagatgtcaatgaccccatgcccaaccgaggcggcaatggactagctcctggggaggacagattcaaacctgtggtaccatggcctcatgttgaaggagtagaagtggacttagagtctattagaagaataaacaaggccaaaaatgaacaagagcaccatgctggaggagattcccagaaagatatcatgcagaggcagtatctcacatttaagcctcagacattcacctaccatgatcctgtgcttcgcccagggatcctcggtaactttgaacccaaagaacctgagcctcctggagtggttggtggccctggagagaaagccaagccattggttttgggaccagaattcaaacaagcaattcaagccagcattaaagagtttggatttaacatggtggcaagtgacatgatctcactggaccgcagcgtcaatgacttacgccaagaagagtaagcacacatcctcttctttctaaaaatggggcaactgttgttttcataggtttttaggtttagttagattgttagaatgaagaaataattattgatgcctttatttcaaggaaataagaggatctttgaacagcaaaatggtcagaaggaggcagtccctccatttatgccattgtattgaaggtgggctgtataaaattctggggccctctacgtcagtgctattcaaaatatggtccccagactggcactggtcaatgaattttttgttaccagtccacagtgagaaaatgagcttgcaccaggatgtaagtcaactacactattaaatattttgtttagtttaagtgacaactttttaatagcaaaacttccttgatttgttgattttcattctggagcaagtgccttatcttgttgtggaacaatagcaaacagtaacagtgttctgggtgtctcacatcattaactagatttatgtttcctttaatttttttcctcagtactgaaactggaaattgaaacactttactatatgcaaaagtaacactcagatagataaaactgtgacctaagatttccaattcttttcatgtagtatgatttttaaatgaaggattttcagctcttaacttttgatggatagtgattactgaatgaactcaaagcttttctctttcagtttattcaataactggttctactactataggatctacatagctttcattaatgtagttggaaatttaattcactgctactagaaaacactcaaaatgtattcctgatgatgtattgttagcataatcttcatttttaaaaggttaatacagcaggtgctcacactcccatacctgttcacatacacgtatgcatgtacacacacacactcacacctattcaccagcattctttatgaccgctaagtaaaatcctgtgtccaatataatgccatttaatagactttgagcattcctgtacatttactggtaaaagtgagaagagatgagtgaaatgtgcaaagaaggtaggagtggaagtgcagcagtgtgatggtgagtgatacaacctcttatacagagaacagtcagagcatctcccagggctgtgaaggaagaatcttagagtaatttattcccagtagagacttgcctagtcatagatagcattgccagatttagcaaataaaaatacaagatgcccaattaaatttgaatttcagataaatggttaaaaaatttagtatatgttccaaatattgcatgggacatacttaaaaatttttttaaattggatttccctgaaatccaattttaactcggtgttctgtgttttatctggcagtcttagtcaggagataaagatggttgttaaagagttacagctgccatgtgaggaccctttaggacccctaacaggatctcgagtccctcgtctagaacgtgtctcagttatcctcagtgcagcactcagtcagatccctcatctctgttacagaggtgctttgcgaaatgactggtggcatttcatcactgtaatgagggagaagggaagggactttctgctgcaggctgggacttagtataaagttattgaattctcacaaccaaactgtgagagagctcttacctgtgtgtgtgaagtctgaggctcagacagagttgtgacttctttgcatttacctagaagaatggcaaaactgtgagtcgcccctaggtgatttggtgtgaaagcccctttgtctccatcactgcacacctgaggtatatatctctctctctgagtagtgtacctcagtgcagatgttacaatcagagggtgagcttaacagtgtggaaacaagaaattttagcacataaactgtttatttaaaaatatgtcacttaaaacaccaatataaatatagctaacttttcaatataagaaataagaaaattaaatgatgtacaaggcttaaagcagggcacaggatttagagacatcctctgtgccttcctccccttcacccctcacatccagtccatcagcaaggccccttggttctgccaccaaaatgtagcccagatcacttctgaggtccgcttctttcctctcctctacctccacctgaggccatgcaaccatcatctctcctggaatcctgcagaagtctcgttactggtctttccatttctactcttgcctcttactgtcttttttttcagacagaaatcagtgtggtcttttagaaacccaaatctaaaaccattctgtgccttcccattgcacttaaaacccaaactcctaacgtgcagcagcccccacgctgtggcccttacccaccttgcagacctcttcttgctactatacttcttgcccacatagtccagctgtgctggcctgtctcaggtcttctgcatatgctcttccctcctccatgaatgcttgttcctttcttcccatgacgggctggctccttcccatcctttaggcctctcttgcacttctctaaccatgctgtctaatttgctaaggccccactttattctctattacttctctttagccattttcttcatggtatctatcaaattttataattagatattggtttattaagttgtttattggctgcctttctcattagataagttcctaagagcaagaactatgcctatttgtaagcctagtaactgacaagtaggaactcagtagtagtacccagttggtaaatatctgtcgagaatgaatgaacgtgtgaatgaaatcagccagggttcaaacyttgatgccatcactagatgtgagatctttgaccagttacttgtcctctctaaccctcagttacctaaacgttaagacagatctaaccataccaatctctcaggattagcattagaattaaaatgacataattgactacaaaaagtcttttattagcctgttggttagaaacctgagtattattagctgtttttactgctatggtattttcttccttaccttgttgtcaacattcgaatgttttcagttactatttagctttgataggctctgttgctttttggaaaacataaatgtcacacattgccttgtctacatcctcttgcttctactagtaccttccatgatgctaaagccttcatttcctttgaaaatttcagacacactgatttccatgggaacctcgcatctctgagtcctccttgcaccccgcagtttccttcctgtctcctttctttccttcttccatgccttgcatagccagttctgtcccgtgttctttcctctggcacaactggagcagtgcctagaaataggacattgcatgtttttgtgtattatttctgtaaatattgtgtctccagtaaaattaaaaggcccaaatctattttagtaaatgctcctaagcctctctttgaaatcctatactagtgataaaagtcattttttaatatttcaaaatgcccaaatataataaatcccagaaacttttttaaactgaatccaaattattttttaaactggattctttctcccacttaaaaaaaatgagataggcttcattcctttttgaacacttacaattcagtgtagagtataacatacttttctaagtaaaattatttatactttagaatgtggacaatctttggaatttttctctaaaataataaccaaccatgaataaaaatcgcctaagtgttgcatattacctaatatgcatattagcacttgtctgcttttactagcaacatattgaaaacatatcgcacatccatattgtgcacatgaggatgcacccttcctcatcctcatccctcatggggaatgtgcttggagcccctcagaagctggcttgctgtggctggctttttgccgcttcagaacacaggccctaacagccttgttctcctgcctctgtctgtcatagaaatgaggcacctgcatagcttagagaccaggcttgggctgtttgtccagctgtgacatctgacactgtggttagcttgttcgttcttgcggctgttgtgtagtctttgtagatgaatgttctcttccctagaagcaggagagaactgtccagctgctggcatgactcacacttctgtatgtgatagctttgaattacattcactgactgagtaatttattggctgttgattgcgtgttaaaagggtgagtaacagtattttgagtgaactggaggcctgcttcttttttaaagacttgagccaagaatgacttcacctgccttcacacttttttctataaaatacaaatatgattttcttcacagttcaacagatattgagtatctctaatatgtaatgcactgtccctgccttcaaggggctcaccatctaccactagggagaaaggaaagaatgccataatgtaaggcagaatgtaagaaccattagaaaggtattttaataatgtggttcagaggagtgagaggtcaagttacaggggagtcagaaaaggatactttgccaggcatggtggctcatgcctgtaatcccagcactttcagaggctgaggtgggctgatcgcatgagtccaggagttcgagaccagcctgggcaacatggtaaaaccccatctctaccaaaaatacaaaaaaatcagctgggcgtgttggcgcatccctctggtctcttctacttgggaggctgaggtgagaggatcccttgagcctaggaggcagaggttgcagtgagccgagatcacaccactgcactccagcctgagtgatagagtgagagcccatctcaaagaaaagtaaaagatagttttcttttctgagggggatactagggaagaccctgaaggatgagtagggtgccttcaggaagagggcacttgaacatgtagtagaagacatgagcatgtagtgyggtttacttggatctggaggtatgtggagggaaatacagctgggaagatagtagggcattggaagactacatgccattcacagagtctacattgaatctggtatttgggaagacccactgaaggtttataaagagaactttggggatttcaaactagtagaggtgttagagtagattagggggtggaggcctgttagagggttagtggcatttgagtgggaactccagtggaggttatagaaccagaaaaaggagattcagtgtaagagaacaaaagagttagaagcagtaggccttgggaggtgatggagtggaaggggaaatcaaagataaatccaaggctttgaagctcagtaacacaaagaggagtggtgccattaacagaaagaggctggttaggatagaacagtccactctgcccaaagctcgtttacctgaactggtctgctgcccggtttagatgaattcatgcagagccagtcaggataaggagcctgtttatgggaagaagtagaaaattctgtttgtggataggttagattttcttctgataaagtttgggattttatttccttttactgtgaactgctgatgcaaacacttggaaatattcttaccctttttttctgcccaacaaagcagacaatcggaggtattctgattcaaacaaatgaattaaatattttgacttattgaatgaattcatttgcttctaatatttaaccttttctcccacttacacaccttttgcatttctgttttgtagaaaagctatcttagttgcaattacaaagtgagatgatagatgtaaaagtgctttgaaaattctaagagctatgcacatgttagtaagatcgttaatatctttcttaagcttgtctatgggaaatwttttttaaaaagatattttacatttacactcatgccttatatgccagataattctcctcttacctgagtccaaaataaatattaattcttatactgtaattttatctaaggtgaattgtgtttgtgaggttttcttattctctatccatattaaaggytctctttgatatctaccaagctatttagaatgtattgctataatttataaaatggttgctatttttaaaacattgatttaattggaatgctatagctttccttttagttttgttttatgtatcttgatccatagatttcagctagagctaaaaccttaaactactcataaaacattaagacaaatatttagaatatatagaaatcatacatacacatacatatatgaatcatgtatatgcagaggtatttgtactttgccctagtttctgtttttggaatatgtggtggttctatgtgaccatccaaactaattgatgacaatttttcacacacaatcccttttttacatagattgcccaaaacatattttatttttcagactacagtttggcaattttaggtctaatgttcagaaaacacatttgaaagtggtttcacatgacccaagatggacatgttgcttactgacctgaaaatttttactcttggaaactagactactttgtgaattcaggggttttccagatttactttaaaataagtccttgtgttctgatgtctacttttcttcttcacacacatataaacacaaaaacatatacacattgcatgttagaattttctcaagttgatttttgtttaaggttctggctaacaacagatgcatttagacaaactgaaattattttaaaaaacaggagttaacttacgttacccccatttctacagcagtttagggaggtaccatatttatttcagtgaggctacaaaaactggaaatcaaggtaacttgtttctctaaacttccattagcagagtagcagcaatcttgaatccctctctccctgaagtgccttcttacccttgataggttctagatggctcccttcccttggtggaaacgtccttctgctgcccagacctcatttggttgatgagagccttcccactctctggttattgtccaagttgctctattgacagaggatttatcttcatttcccctctcttcatccctctagctctgccaccaatgttacaattcacaaagtatgcctgataaaaagttataaactcacgttgcatttattgtattttcacagacctctacccccaactacgaatttagaaaaagtttcctggagactagtttgaaaaatatttayggtggcaccactagatatcccataacaacccaccccagtgacagacaatttcaggaaaaccttgactctttttttctctccgaataagtcttttgcccatgggaaacaccaacacagagattaagggatgttttttgtaccctttcctcctagagcatctcagtgtttgagctaacagtcttttcaaagtatttagtcattgttctctgccaaaaggtgatcagttccttccgaaagacagcctgtgccaatagacccagacatgctagagtgcagtgtgcatggcggaacacacgcccctttccctcagtgggtcagcatggtcacctttggtaatttagctcagactattccagaaccattagawacaggctgtctactacaatatatgtttctttgatgcatattggctcctgtgtgtttggtaaatagggaaattatatcaattcagtgtgtaagtttttgtggttcatagatttcctcttgcatattaatgtttggaagtgatcaggaataaggtttctcacagctaaagagacagccataaaaaattatttatgaagaccttaaggggaaaaaattctcttctgcagaagtgtttttatttagtgaaagaaatggggagtttaccggctttaagactcactcactgtagttgccgctatatttagctgtctgaagaagctgcacgtgcatccaaagaaactgagaaggaaactgattgatgaagaaggccatccttggatcatacttttaattttggtgaaattgctctgttattagaaatgaatgtctccaaagacctacaaaaaggaaaacacaagcctatgggttttaagtttgcaaaggatggactgtcatacgaaatgcaaaaattagttgcaattttaactgtgctgattggttttggtttctttagggctctggtcccaaagttcctaaagtttgtgtggtctggtcattgtccctattttttttttaagtcctattgccctccctctctccctccctccctccyttccttccttcccgtattttttttctgaagtctttctttctttctttgttactttctttgtttctttctttcgcatacccttgcaaaacagagattgctaggactacatatacgaggcagaaatgcctataattgcacctaaaaggtaggcatagccagactgctgggcttagggctatgctatgactgctttgcataatatagccataatataaaaggaagaatgggagatattttctatattttagattaataatttacatgacactgtctagctggtaaaccaagcataaaccaacacttatatagaaggaatatcccctacctctccatttattgtagaagcagagcatctattytgaaaaatagacgactctcaatagacagcaaggattacatatggccacaatggggagaaacttggcccagtttagagccaggactcaattttgccatagtcggctataaaactccagatgacttcactctttacatttacacatgtagatctttacctctggaatatctggtaaaaggacctgcgttggagagaaggcaatctttaaaagtagttgaaccaggctagaggcagttaggggaggcttccttcctctcattctgagtttaaaattgacttcaactccttgatctataggaatcatttgtgacagtttccccatggttaaggcaagtcattggagagagctgtaaagcaagatcataagcaccaatttttttttcttcagaaaggattgtagaagtagtaatatgaataatggttgaataattgttatataacttcttgaatgcacttataaataagttaattatctttgctcattttaagctgaatatgtaaaaggtacacttggtatatcataaatagatttagtctttcatcatttttgcaagatacaagttgaaagtgctaagaaggaaaaagggcttagcaccaaagccaagctaattacatgagttaaaattatataaataatatagtttaattacattcagtaaacttttagtctgtccctgggaaatgacctgtagctttgcttccctcttcactgaatcctaggggagattccactcttcaaaatgtagctattgtataggaggtaaatcacatttttaatagcctggtgacttattttagaatgaaccctgccattttaatcaaatggaaaatattcgtgcattctccagagtagaaaggcccagtgagcgaactaaaaccatgataagggctctagagaaagatttgagaatctaaactccacattcttaagaccctggagattcacaagtgtcactttaaaggaaagtgttgtagtcttcagtagaaggatgtacttcaacttttgtgaggcaggagctccctccagagtccacacgtggtaagctgcaggcctgctggagtgggtccccatccaaggaagatatttaaggctgatttcttctcccagtgagattgagttggggaaggggtattaaaggaggacagagaaactctcttgaaagcttctattgaagtctgtgtaaacacaactacttaagaaagcagccttgggtattcttatttaaatcaaatacaaagaagaatctatctatcttctgggcagacaataatgtaacctagactagagtttggttggttcttgacctcatatcttctgtcattgtggtactagtctctggctccagggtcatatgccagatgttgaggctgatgagtggaagggctggaattaacagtgtgctaagggtgtgcaccagtagacatagagtggcccagaaagggttcagccctagtgtacttatttacacttgtttatatggttttcaggaatacttctcgatcacttcaaatgaggtctaagctgtgtcttccacttccacataattaactctgttgctgtgactgctgcttttcttatctctctgttgcagcagctgatggagatgggggggcctcagtcagtgacagtaaggatcagcagcatcactgtccctgtgttacacctatatgcctagcagtatgctgggtttttaaatgtactatctcctgtgcttataaccatactgagatagtatattttcaatttcactatatttttggatgatgaaagtgaggctcagagaactagaaaacttgcaggtcacgtaactcgaagatggagatcctgggactcaaattctggcatatacacccattgccttgttagggatgctaacagccaagaggttgtgttccagtttgctacaggacattaacttctttttacagggaaagttagaaaaaggtaaaaggcaaaggtttagtgtgtcattattgcagaattttttcttgcctcctaagacagggtttcacaatctcggcacttgacatttgggccagataattctttgttgacagttctttgtcctgtacattgtaggatgtttagcagcatctgtggcatctacccactagatgtcaggaacacacacatccgcttccacctccctagttgtgacaaccagttctccagatgttgccacatgccccctggggggcaaaatcacccctgattaaaaatcactgctgtaaggggttaattgaggtaatgttrtgggaggagggtgtgacacaatgaaaataacagagatggatttataggattaaggggaagaattggaacagattgatgaaatgggacaaatagataggaagactttgtcctaagatgaagatagttgttagattagtggagggggttacatgcaggttcacaggctccatcatggcagatctgaatattgttggtggtagtacagtaatcattcatggatgcatttataactctttctctcttctccctcctcccgctttttttttttttaataacaaataccgggagtggagaaaaaagatccaatcctgctatttctctagttctaccttttggccagttggtggccactgagggcgtttcagaatttggtgtatatttgtccaaactttattctgagttatattaaactcattctcctcttgaattatcctccttatttcttatttccattacttggttttgttttttgttttgtttttgagagagagcgtctccctctgtcgcccaggctggaatgcagtggcacgatctcagctcactgcaacctctgcctcctgggttcaagtgattttaccacctcatcctctccagtagctgggatcccaggtgcccgccaccacgcccagctagtttttgtatttttagcagagacggggttttgccttgttggccaggctggtctcgaactcttgacctcaggtgatccacccacctcagcctcccaaagtactgggattacaggcgtgagccaccatgcccggcccatttcttgtatttttaattagaagaattgctaatacctgtggggggaaattatttgaagtaacaagaaaaatatcaatcatgcttattttattaaccttcaaagacaattttacagtatacttatcaggactattataagaaattcacttataaatattgtagttacataccatcgaatgccagaatgaattatacaaaggtaaagtacgtaacaatactatgagtccttgctcagtgtcttcaataggttcaggaagaagatgtacaatgaagctaattttaccataggcaaattgatattgttgactgaaggaaaaaaatttaagcttttaaataattaaagttagttctatttggaagtcttactgaggactatagactgaggcttataacccagaagcaattctgtcaggctgttttaaggcagtattttagtttatggtttacatgtaggtggtgaagatttaatatgtgtaaaattatatctaagtttcagtgtaagagtatatttggtgataggttatagaagtataatcattaattttgtcaaatgttattttatgtataggaaaagacaaggactaggatcattgatcttttaagaaatgtagtgactgaggcaagagttgtggtggggccatgtgttttattttgttttgtctttaaagtattttttacagagctgtatgtcatcactgaatcaagagctttgtgaaattatgttggcaagtagaaatgagcatgcctttttatgtttgttattgtgccttacaacataaacaagagtcaagttcctatggcatgtttctggtcacaaaaatatcaccaaacttctaagtaaggaccaaaatacttctaatattaaatattgaaataaatgtgaagtatgcatacatttaataaatattaataaaaacaagtaagatgatgatttactcaatttttggtgaacccatgagtgatggtactcatagtggtggtgaatttaatcaacgagtaaacgtttacgaagcgaaaattgtcaggagtaccttccaccaccatgcagttcaaaaacaagcaataacaaatgtggggagcttgctgagcgcttctgtcccacatcatttattgtcctgcatctgtataattgtcgtctacattacacatttttatttcacagtaatttgtatttattcatataatttgcaatccactcattccagtttagggtggtgtgcagccagaacaaattctggctgctgaaaacacaagatgggcaccctccctggccaggacgccatcctatcacaggtgtactcagacacacccatactcattcaccctaggctatgtagacacagcatttcacctaatgggcacagcttggggatgtatatccagagaaaacccatgcagacaagggaagggtgtgcaaactctacccagacagtggcatcagtttttttttgtttttttttttctcatcagcattaaaacaaaacaaggttgaatgaggcaatgttattcaaggacctgcactacacttatttaataacttggcttgtcagagcttacagagcaccctttaacgtgcttaaaaaatagatagctacagctgggcatggcagctcacgcctgtaatcccagcactttgggaggccaaggcgggtggatcacctgaggccaggagttcgagaccagcctggccaacatggtgaaacctcatctctactaaaaataaaaaaaaattagccaggtgtggtggcacgcacctgtaatcccagcttctcaggaggctgaggcagcagaattgcttgaacccggaaggtggaggctgcagtgaactgagactgtgccactgtacttcagcctgggggacagagccagactcagtctcaaaaaaaatttaaaaaataaaaaataatagatagctgcaaataattaggcttttatttatgtcagttaactatcaaaatatacaacattgaaattaaaataaaattttaatcgttaattcatttaagaataataatttcattacatattacatattttatgaaaataatttttttaaaattaaaagaaacgagtatcattgtcttagatttttaccaacttctgtaatgtctggcttatagaagataactgaattccaacacctacctctgcattcagtctatgcccctgggttgttttagttgaaatatatgaagaaaatctggcctcactcagatatgtaattgcaaaaggggggagcattttaatagcttttttcaagtaattgtggatactcctttttgatactgtactaaaaactagtggtagttttttaaaaaagtagctgcaatatagaatctgaaagcataaaaaagaacctttagtactgtttctagtctgtcttgcactttaacaggacattttaccattgtatgatgctgtaatatcaggagttggtcatttggaaaatattggtttcccaagtaatgcagatcttttaaatattgacaatttcattatataatgataagaacaatacatttgttaacatcatcatcagtctcattggaaaggccttaactcctgagaaactgtcatatttccaaatttcttagtttcgcctgagagctcaagttttgtcattggcaacaagtgatgtcagttgtttttgttgaagtgacaggctcccttcattcatgttcaaaaaacttccagataaccaatctcagtgaccatagtttgtcctttgtttctttcaagtgaaaatggcattctattaaaaaataaatcataaaaacttattcagcatacagatcagtctcagacgcttttccttgacacacccatcatagttgaatatctaatagaagtctttcatgcatacttcccatttcgtctcacagaatattaaaaaggcatacactcaagggatttaataaaattaataaatcttcatcaaggaagacttactgcttcatcaaggtcattcagtgtaagtggtatgtgttttatatttagggtatatttatgaaggtatattaagtatattagggtatattattatgaagaataacttaaatatgggtaccatttggtgtcattgccttgatttatgctaaggcaccagcagttttacccactttgctttggtaccatcagagtaaatatccacacagtgaaaaagatagtatcttcatatgatcagcaaaataattttgacctcaccaaacttcagaaagggccttggggaccccacaaatctgtggatcatactttgaaaaagccgctgctatagattttagaatgaagaaggtgaataataagtttcctcagaaaaagtttgtcatcagcagtcttccagtttgattattgacaaatacagcattattttataaagtaaaatttaatctcttatacttgatttactggtaatttcagagattctgtgcttagtgatgatttagataattaagatgctcacttactcaaaattgtattgagctctattttaattaactgatacagaagaaaaacttgattttatattgcagaagtgcagtcaacatctgcacaaacatagatggccggatagtatgaaatcctatctctacactaattacttaggattgatggataaaataatagcaaatcggccagctttaatattcctgggactaaaatggttttaaatggtatagggcaaccagcctccaaactggaaggagtaatttattttaccatcatcctattaattaaaattaaaggaactcatgggaacaaaacccaagggttcaaggttcatcaatttattagttgggtattttattataatatcagtattttgtaatgattgcttttggaatgccaagaattcattgaacagggttcccaaaagttgtccatattttttaaagtctagagatagtgctaagataaatataaacacatcataaaataagatcaatggtatttacatgatgaatacctgtggtcagacattagtctgattacctaggttctaaactgctagctcattggtttggaacatctgcaaagctattccacgcaaagccttccccctttagcaagttacttttatcaataagtagtgatatacatagacaaaataattgttttaaagttagtcttaggaccaaattttcagtaggaaaataatataccaacctgagggcatatttcgatttttccaccccctccacccttcccttttcaaaagaaaaatatctgctatatgatacctgagtaagcagtaacttactgtttgtattctaatgattgtaaaacgttaagcagatatataatggaatcagaagaattcacccaaagccagagtaactaagatatgagtggttatgataccaggcaaaatgttataagacaaagccaaccttgcaagatgataaattgtcttatttttcccatcagtgtccattataaggtataatgtgtgagtctacacactgtggtgttgattcttgtatctctgtcccaatacggtgtgagttctctgagcacacagtagggttagatgggtattgctcttccgtattatcctctgagtctcaattttcttatctgaaaaagagggagtcgtcaatttttctaacttgttttaaccacaagaagccccagaatcctttttcaagtgacttcctaggcaactctatgcttttgttcttggcaccttctttaaatccgtgggctcctccaacaagtttggaaacctgagacctagatgttttcccaggtctctctcattttaaaattaagtttttctgtgtttctacattctcccctgggtgttccacaattgtttctctagataaaaaagctgaatagaaccagccagcaagcagctggtgtgcagctgttatcactcgagcctgaactttgtggcatgctttcttttgtggtattgcctcttcctgcatcctggaggggggagtggcttcacagcccttgggccactgccaggtgcgacagctctttttggaaaataatgatagatgtggcatctatttacttggctacctagtattggtgcagaagcaaatgctgctttgatcccagcactttagcaacttgcactgtttggcaaaacttgcgcttcatgtacaagccactcaacactgtgcccatcctggcaaggagagcatcagacgcagccaggataccaggcttgcccttcttcggtttccccaggagcaggcaggggaccagatggattagctggaggacagtcagccattttatattgccaagctcaaccatgctagcatttccaggatataatcctgttatgagaatgtcttcctctattagcctttgtttgtgccagctccaggggtggaggaaacccattttgcctgacatactaagaagtgacctttccagagccagctactgtttggtgaatagttgtcatggtctttccccatatctctgtatatacattcatgacttttagaacatagaaaacttattttttgttctaaaagcttatcatcccgtatatttccttatcctttacccttaccagccttctctacatgacctcaggtttgtgacatgtttagctcaccacctagcacatggtaagcagcaagtacatgctagctgttttactagcagtgatggtggcgtaagcatctctctctctctctctctctctctctctctctgtctctgtctctccacccccaagaccccctcattccccccaatctccctccctcccccaccccccaccctgtctctctcccttcttccttctctgaagcaatatgggattgtcttgaatttcttccacatgtcttttcagagtttttacctttttcatttcttttttctgagtctagcgctttgctttcatctcagtcttcaaatggcccagataaactgcttatcagaatggatgggagcccagtgcataagattgcactttgggagtcacatggtagcttttaaagggaatggcttggacgcttcaagaaccttgctcataatatattaaatgtgtcatagaattttagaactggccaggctcaatggctcatgcctgtaatcccagcaccttggaaggatgaagcaaatggatcacttgaggccaggatttcgagaccagcctggccaacatggcgaaaccctgtctctactacaaatacaaaaaaattagctgggcctagtggcgtgcggccatgatcccagctacttaggaggctgaggcacaagaattgtttgaacccgagaggcggacgttgcagtgagctgagatagcaccactgtactccagcctgggcaacaaagcaagactctgtctcaaaaaggaaaaagaaaaagaaaagaaaagaattttagaactgaagggggccagaggggttccttggtactgtgagagatccctcactttgtggataaggaatcccaagtataaacagtatgtgatcatccaggattaaattaagtggctgagaagaatgaatccaggtcttctaggaccgacctttcactataccagacaaaagagcacgaaagtgtgttgatcagagcagtagttttaattgtagtatttttgatacatttgtgaaacattttatagtaataaaaatttttacttaggagcaaaagaagtatgttatcaatcccaaggtaactctttttaaatgtggacatataaaattccaattatatgtagaagggcctctgcttaaatctaagttgtaagaagttatactattaataagagaacagatataaaaataataaaatcctgccattttcggcaacatggatgagcatgggggacattatgttaaaaataagccaggcaccgaaagacaagtattgcatgttctcactcacgtggaagctaaaaaatttgatctcatggaggtagagagtataatgacggctacctgaggctgggaagggtgtgtgtgtgtgtgtgtgtgtgtgtgtgtgtgtgtgtgtgtgtgtgtgtgtgtgtgtggagggctgggatgtgggataaagaggggttggctaatggctataaacatacagttagctggaaggaataagttctaatggtcaataggacagcaggtgaccatagttaacaacaatgtattgtgtatttcaaaagggctagaaaagaatatttgggatgttcccaacacaaagaaatgataaatgtttgaggtggtgcatatcctaaataccctgctttgatcattacccattatatgcatgtatccatatatcacatgtatcccataaataggtactattatcatatattaatttttaaaagccaccttagtatggcctagaagtagaggatcagtgttgagggtatgggcaaaatttaccattgtaccatgcctgtcacttagatcaccctccagcctggcccctgaaacgcgtacctgaatgctagggagatacactgaaagagcattccattaaaatgcctgtcaaactgaaggatggcaaatttctgtacttgagggtttgtggacacccataggcagattaccagccagtggcttctgcagcgccaggaaaccatgcctgggcacagaccagcaaatgtcatcagcaatggccattccttagaataggcacagcagggggaccagcttcacaggaccaggggcccctttgcagcagagtcttcacctcagcaagcagagctcacagaaaatgaggggtgctgcatggtatccgagagtgccaagttcataaatacacatgaggttcactttgggaatcccatacagagctgaaagagtgatgagcatgatattgagcatttagggagctttggtttcctcttctagcaattgtggataataatacttggcttgtaaagttattgtgggtaacaaatgtgctaaaggacataaaaggcatatcacacatgagctccaccggttggaggtcacagttgttggaggccaccttcatcccttgtgtggcatagagaagcttcagaagctcttttttctgtataggcctctcatcatgccaggtgtgtggtattcagccttatctttaaaatatggtaccctcttcattgtatttcatcctgccgtcttactacaaaagaggaggagtcctaaaggaagttagtaaatacaaagaagttcttaaggtcaacctaagataaagaaatgcttgcttgtaagtgctgggtgattgaatctataatttgcgtcaagagaagtgaagaaaaatgttagggtggtgcaaaagtgatcgtggtttttgcaattttttaatgacaaaaaccacaattacttttgcaccaacctaaccttgttttaggcatgtatctatttaaagacactttattttacctataacgttgatgggtttacattgaactcagggccaatagcactgtaactcgcacccaaacaaagcttgtctcacgtggattttctgcacaggacacagcacagcatctttgtgcttaggataccaggtagcacactgacattattctcgggaggctgttttaaacagcaaaattaccaactaaaagcacaaaaatgagaaaatctgtggcaccaaacaaactgcaaataggacacttgttttctctctcgtttttttttttttttttttttttttttgagatggagtctcgctctgtagcccaggcgtggcgccatcttggctcacagcaagctctgcctcccaggttcacgccattctcctgcctcagcctcccgagtagctgggactacaggcgtccaccaccacgcccagctaatttttttttttttttgtatttttagtagagatggggtttcaccgtgttagccaggatggtctcaatctcctgacctcttgatccgcccttcttggcctcccaaagtgctgggattacaggcgtgagccaccgcacccggacacttgtttactctatgagcagaaacaagaaacagaacatcctcgtgtgcatgcccatcaggcatctccaattgcaatccacatttgtggacgtagaatccacaaataataaggagccactgaatttttgtatatttagtatggggctcaggttaatcacagaaatatttactatatagttagtgggcaaaatgcccagtaccccattataataaacccaaatctcagtaacagtgaagatgtttctcagaggggcatggctcctctgatgtttgtcagataagcatgtcttattataggggcactcagacaacagaggcacagaacaaaacaaaatattttttgtctgttaatttatttcaaaaatgaaatctgataatggcttttagaaatgtgaagaccaaaaagcatcaaattttgtttttccatttaaggaatagaaataaagtggccgagttattattatatgttccgcccataattcatctttccttgctccttcccacccctccccactttatcttccacctccttttatagatacctaactgctaaaatgggcttgggaaggcagctggaatcatgccaaggtgtacccaacagaagctgctgcagttagtgacatgagctatggaacacaggaggtcttttgcactgattggaatatttattagatttagtgctgaaatagtctctgctgataagcagacctaatctgaatttcaaaggtccttatgaccacgtaaatgtgatagtatcatatcctcaggccccaagtgcatcacctttcctaaatggttggatgctgtattgaatctatttaatatcctggtaactagctttgacttttttcaggaatacttaataattttagatttaatcttccctcctcctcctcctcctcaacagaagtaatttaaattctttccaagtagtcattgcacctgtttcttacttcaatcttggtctcaaagaaatatacaacaaactccgatagaccacggccataaagtccaattttataatcatgcaggaaaaggaatgcttcttgaggatcaaaagttgcagtcatgatgctaggatgtttcatatccagtaaaactagagacaccccacctcatcagctgattgtgggagaagtcgtttacaaaagtcctgtgaagaaagaactagatgatataaatgtatgcatatttctagaacctgaaaaatataaaaagataatcaagtgtacttggacccatagccactggttttaaccattctgcagaagtatagcgcaattattattggcaatatgtgaagatatggatgatttcatggggaaatctttgaaattaaagtgggataatttggaggtacaggggaaatgtttttccctttaaactgtggcaataacccttgtaattgcatgtgctctccagaataaagatatagcagattgacatcagcttcagaaaatgagacattaggtacctgagggattcagtcaaattgctcctatgaaatcttgagttttgaagattgaaaaaaaaatgcttgtttttgtgacaagtgttttggggaatattttaggggataattgatgttctgcattccaataccttaggtaatgaggaagctgtggaaacagcctcctttcttttatgaaggctttcgtattcaagatcaccatagaggtcagtgctgtgaagctaatcttggacgcctatctcaattgcttcagagtatttaggatttctaaggtttttgatggatttttttcatcaaaagatataatttttcctccacatgaaatgctttaaagtggtgataattaaacatatttactcagtaatatttggaacattatactggaattcagaagctctggctttcctctttggatttataaaccaccaaaagttggcaactggcccttgtaaaagatttcttccagcagagctcttgtatctttgtttgtgttttcctttcccgcttaagcacatttatctttgcttttagctgctgcagccctctgagaaacagcagtcttcttggcagctgcattctgtgcaggctcctgctctatcagtatgacagctatctagaaggactatatattagatggaataaccagctgatatcagaagggaaaaaactggcagcaacgaagcacaaagttcccctcagtataatttgcaaatctttcaattaacctattgaatcaaaatgagaatgggtataaatagtaatgatttttaaaatatgcccttgctttttagaatagatgcattttcagcaaagccatctgcaaagtgaatacgaaaatttggtctaattctgttagtaagttgacattgttgttctggggaaagctttaatgtattattttttatgagaataaaggtatcaggctagattttttgcccaggggtttgctgattatgaagctgccagagtaatgttccattcacttgtagttgtcttaagtagcaactttaaatattttgaaaaaaggaaagaagtatttatgtttagtagaatatttaaaggaagaaagtaaaaacaatcacctgtaatcctaccagccaagtaatacatatatttatgttaaactgtttgtttgtttgtttatttatttatttatttattgagacagagtcttgctctgttgcccaggctggagtgcagtggtgggatctcagctcactgaaacttcctctgcctcctgggttcaagtgattctcctgcctcagactcccgagtaggtgggatttcaggtgtgcaccatcaggcgtggctaatttttgtatttttcgtatagatggggtttcaccacattggccaggctagtctcgaactcctaacctcaggtgatccacccacctcaacctcccaaaatgctaggattatagatgtgagccactgtgcctggccccaagtagtatattttaaaaatatgaggtcattttaaaagatgaggttagatgttatatattatttctaaaattttattaaaattgtttttacacatttttatgtatctttaaatattttttgtgcaacaccattttgctagctatatgatctgctgcatggatgaccacaatttatttcatccatcctttattttgggacatttggattattttcaggttttcactattgtaaacaatgctgtgaggaacccgcttatggctcagtctttgtgcccatcattgattatttcaagaggacaaattcctagtggaatcactaaatcaaaggattaataactggttccttttacttggtagtgttttgtcaactctggagtctctcctctgctctccatccctgtccctcactgcttccacttcatacagaatatatttgttttgcccttttccatttttctctttttttgtctcctttggtaatggtctccccctgtatatggactatctgtagaccattagaaattgagggactctcaagagagaatgcaacaaactgatactatttcaagatgacagttgaccatagcttacatgcagtgttcacatgagttaagtcattgggttccctgccagattttaagtgaactaaaatgttttctaaaattttggtttgagattttctggcatctgcctctttcagagtgagaattaacataccatctcagttgttataattccatcccatctttgagccataaactatttgataactaacttcaactcactcttcgtgactcactcgcctcagaaagatttgattttctggaaaattacaatgaagcagagatgtaaaaagataagtaaagataactcaattgattccggaaatgaggtagactaccgcaataattttttgaaatagtattaccaaattttctcctttacaacgtttttaaacatctcatatgtatcaattatatgctaatgaactacttgtttcctaatatctttaacaagataaattactaagtgtagccaacatatattcttactaaccccagaaaatgtctgttctgtgagttaataaatgttaactgttgtatattacatactcttttccatatttgttttacagtggagagggtcttcaaaaaacgatctagtacatctcttcattttgctatagggmcattactatcaatgtttaagacttctgtaagtaaatattacaacctgtcttgcaaccaatcctgtaatatctaacaattctcttttgagaaattatttactaactccagcctaaagttatcatgctgctactgtaagactgtacctcttcagtcattaacagtgttgaaatttgcttttggaaatgtaagtcctccatatggttgatgtcatttcctcattgtaattagagtacatcgagaaggcatataatcactcactgagtgatgaaacatggattgggagagatgactcaataaacattttaaggaatgtttgtaaagtgtgattttcaaatctgtgttgaacttaaattyccaacttgttctctgcacaactgttttttactgacttgcaccttggtacaatgccattggtctccattgaagtctttatggaaaacagcacagtgaaactctttactgtgtttaccataaggaggcccctgttgttgttgtttaaaaacaacaacaaaaaatcccatccgatcttcacgccatgaatattgtacttcttctgaacaactggtttgttaaacacagacctcaccaggttttcttgctagaaaattcaagccaatattgtgatttacccataagaagtatttggtatacccaacccaccatgctactcacttggggtggtgcgttcatagtgtgctcattgtcagtcgtaccccagaactgtgcacacaggagcccttgaccctctggtatatacttctaaaacctcattcttgattcctccttctttttcctctcattctttctttatccatctttttccctccttctatttttaacttttgtaatactgttttattctgtgtgtctttgtaagctgctcaaagtccttgtggaataaggtgtagcataagttaataactaagtcaaaaatgcagacctttatttgctcagactgttaagttatctatacatccatgcatggtgcccaatgttgatccttactcctgttgtttcagctcaaatatattggtgtttgataagctggtacttctgtaacacagaatatggcatgtaagctcatatttgaaatgagagtccaatatagctataaacatatggcttacactgtgaaatgttctttttttcctttcccagggagttttgaagaaatatacaagaacatatgtccagtcctaggaatccctgccagattttttttctctaaattgtggtttgagatttcaaatcattaactggatacatctgtctgagtatgttttccttttcaaaaaaagaaaatttgaaaatagctacccaaaagacatagttcagtattcttaattttccataacatagttagtatcctcaacctttaaaattaaactgacattctctgagctgtgtgcagtcattttgttggtggccatgtatttcctgggtattgggtgaaaataaggaatttattttcctgtatgttgtttaagcatatatttgtgtgtaattcttagtaaacttgtaggtttaaggaaagagccttcaaattagagtcaaaggattcatttttaaatcttgctgctgtcactaactgtgtgactttaagcaaatcatataacctaacagagcctcagtttctttatatataaaatgaataataataataatgcctgccctttctatttcacagggttactgtgaaactcacatgagataacatgtattaaagtgctttgaaactaatagcagagctattagaactgcattgcctcagtctgggataaaaggagatcacaataactaatagcaaaatcaccatttatttggcttaaatactatctactctgctagaattttaactccctcaaattcacaactagttctgggagtcagccggggatgttgaacatatgcttgggaatggatcctgttggattcctcatggatgctcatgtgccttctctgtggctcactgctgtcgtctcctctgctgctcttgcagccagtgcttagtgactccacggtcataggacctgacgcctctaatgtcctcaccaaaaggaaatacagtcatccccatgcagccactcttaacaactgtcagctgtgaagttctcacctacatcttctctcatggtatctcaacatggggagcataactttctcatttttgggggctcattaggacactaagtgaggaggagcatcaggggatggctgagactgaggtgttctctaaaactgtattcgaacgtttctgtcccagagtttatacacattatttaaggttatagtagagactgcaagctgaatggtccaatgacgatgtgacctttaagaagcctctggcttccttcgtgaattctaaccgtaccgttactgtgtttgaggatcactggcagccgagctctgagtggggaactgagataagaaaggtgttgtcatgataacacctggacagctgcatcccacagactatgggagtgccaggaaactggctacctcacagcagagtagagaaaatggaaataaacacaaatataagcttttcagtgagctgtgggtcagagaaggccacaagtggtctggcagatcatggtgcagctctttgtttcatgagctacgtgcagcagtagtttttatgagctctttttgtagctttccagccctaggattcagccatggtaaggtggaaagtttctggtactagccctgctgttctgctaacaatggtccactttcctccaaacccattgattatttagacatgaaataaatctatgcatctcaactctctgcctcagaaaatgaaatctgtcccaggaaaagttcagatgcagtaacctgctaggaactagggatgcttgtcttaaaaccctacacacatggcaaacactgttttatttagattgagctgattgggaggggtggacctgatagggatatgggcatgatgagctaaagccaccaactggcgctaccttcaaaaatgggtcctaccttccaactatggcaccatacagtacactccaaagcaaggattgtagttaacagccatactttcttaattatctagtttcatcctgaaaggcagacccatccattaattccatgagcattgattttgactttcagccttaaatagagcaacaagtaaacattttttattccccttttcattaatatttaattcattaatgaggacagtgggtaatgttctgtgatatagtactcgtgtgacaaaggagtagtcccaggaaaatttttggaatcaaatcaacaagtatgtattgagttttgacataatacatgaaaatgctgttttggctaagagcagaacttctgatgattagttttgctgacattttaatcttggagatgataaggtagaattataggcttaattttgaccttcacagggattgattgataataacattggaaaaaggtaactaggttatcttagagtctctattagccaaggaaaagaagagaaagtcttcaaggaattgaggcattgtttgagaaaatgattaaataaaaaactataaccacagttttattttgtctagttaaaataaagaatatatagtattatcaagaaaagaatagtctacatgggggttagaataagggaacctaagaaaagatgtgattattgtaccactagctatccatcagagagggagcttgagtcagtcagtataaatttagtctgttcagcacaccctattgtggaggaggaagcagggagcttcaaaactgtaaggcatcagccattaaaacagattctgtgtttgccaagcaaccttctcattgtgaccagagtttgcaggcagagtttccagtgatgactaggttgcatgaaaattttttttttctcatttcaaacagtattttatgtatcagcttcttgtttggtgagcatgtgtaattctcttaagtttaattaattttgcatatttataacaatttttaggaccttccaagtagtaccatctctgtctctagcttaccttcctgtaacttcaacaatgaccatagaggaagatctccaataatctcaaatttaaagagacgatagatagattgattgatagattgattgattaaaacttagtgaaaagctctcagtttaactcttagttcattaatatataataaactaaaatttacaaaaatatcaagtgtagcgtttagacatggattatttgcccataaacaaatctgtttaactagtttaaccttaaacaaaaaaatgtggagcggggtggtgcgagctactagttgaaaggatatatgagtatctcatagaacccaaggtcaggaagtacacatggtggctgtgggagactcggaagtacaaactgaaaagttgagaactaaagtcacatgctctgtctttctcagagttcatgaattctcatctctacttctttctctctgcttctgcatgaaaatagctgtccagtccttgcctgacaatgcaagagcctagtagaaaccaacaagagttccagaagctcagagtttgcagagaaggactctgattggcacttctcaaacaggtgtgcactctgagtccattttgatggcctagggatgacgtcacatggttgctttttcttgggaactgctgtttaaggagattcttagagaaggggacctcagtagggccaagtgatggaacagctttcagaaaaacaggagacattctagatatgtattccaagtgttgtctgcaacgattaaaaaattgctttaaattctgttcagagtaaaataatgaaaaagcaaagagtaggcagattattagggcaaattatatgattttaacgtatgagaagaaagacagatgtgcaatacttttttgtttccttcttagttatctgcaggagtgatttccatattgaaagtattataactgacatcttaagagtgcactagatttgttaaagcctttaaagcctcttacagcaccagctattgaggaacttgccagatgagtttgagaggaagtactgtcagtaatcctcaggtactggagagaagaggagaaattttaggaaactggaggtgggaaaatactaccttatatttttcaaaggggagagagaaaacttgttcttggaaacttgtcactgatacacagtatttaagggagatcatttaaacatatttaaaaagtagccatcactaggtaccagcatggggctatgaaaaagagtcagaccaaagtcacagctacacctaaaagaagacatgtgtttaccttagtagaccaggagactgtgtgatagatacctcctgcagtgtgagttagcaagatatttgagtaaagtgttcagatccccgtggagaagagaaataaatatagtttgaatgatagtgcarttaggtgaaattgataaatggagtgatatcaacctctcagggaaaacacatagctttaaaacagtatttgacctcatattcctccatataaacagtagataaagtggaatcatattagtccaattttcaacatagaaaactgggagggatggttatacacaacaaatgacaaaaaccaaagagggcagaacctgctggaacatgcacctaaaccaacaatataaaatgcaataaatgtaaacatggtattttatactaagttcaactgctgaaatataaaatgggaaacattggacttaacagtaatttggggagaaaaattttagggaattgtgagatagcaatatgatatagttgcaaaaatacagtgccaatataattttagattatacttttaaaggaattatatccagactaagagttgtagcgttgatctcatatattgtccagtccacatctgaattattgtagcagtcctttttgggaaagatgttgacaaaatggggcatttccagagagggataatgaggaattttaatctataaatttctttcgaagcttagattttttattttgctatgtgtaatgcactgtatggaataaaatctaccatactgtgttcccaaggagcatactttgtgtcattccaaccagtgtccatagaaactgaacacttgggtaaaattcactcccctcagtctattgattctgataactgggtttaacagtgacgtattaggccattcttgcattgctgtaaaggaataacagagaccgggtaatttatgaagaaaagaggtttaattggctcatggttctgcaggctgtacaagcatggcactgacatatgcctggctttgggggaggcctcaggaagcttacaatcatggcagaaggcaaagggggagcaggtctcacatggtgagactgagagcaagagagagtggagggtaagctacacatttttaaacaaccaaatctcaccagaactcactgttgtgaggagagcaccaagaggatggttctaaacatgagaaatccgcccccacgatcaaatcacctcccaccaggccccacctccaacactggggactacattttaacatgagatttgtggggggcaaacatccaaactatatcaagtgataaactgtcttttcactgaaaatgtatattgatttctgaatgctaaattaaactttgtattctacattagtaacatattcaagtgtcagcactgtttcttataaattgtaagcatttttccacttccttttatgatgaaaatgagcaaaagaggttttagatgaaagcaggaaaggtcctcaatttattataaaataaaaatggaggccgggcatggtggctcacgactgtaatcccagcactttgggaggctgaggcagatggatcacctgaggtcaggagttcgagaccagcctgaccaacatagccaaaccttgtctctactaaaaatacaaaaaagttagccaggtgtggtggcgcgtacctgtagtcccagctcttcggggggctgaggcacaagaatcacttgaacccgggtggcagaggttgcagtgaggcaagaccatgccactgcactccagctgggtgatagagcgagactctgtctcaataaaaaggaaaaaaaaaaggatagttaaaaaaaatcagtgtttctcaaattgaggatttgtttcctatgcctaaagaatcttcctggttatatttacttcagaattaaggggagagaatcaaaaatgactctttgtcttgagactcctagtgaatggtctaaaagtaagaaacaacctttaagaggagcgagagatgagtaacttccacacaccaaatacacaaaagcatgcacacacacattattgtagattaatgatagtgtatattgagtgcagggactcgcagcctcaaaatgttacgtttttcatagtctgctgaattagatattatttattgatgaagtctaaatataacaaggttttatattaaactacagatgttaaaaacatagctgatacagagaaaatgcaagtgagacatttcatttttatttttgaaatctattttttaagttattggaaaatcactatggaaattcattattctcatattttctgctaatgccaagcacctgacccagatagctaccctgaaaatattctgtaaaattactctaagaataactctaatcattgcaagcctgtaatctgaatgtgagtatatgtgatcagagcagttctacaatgtagctgaaccagtactgtccttggtgttagaggattttaaagctttcttgggaaatgagataccaaagaggagaaattagtcaaaaatatatatcagggcccatccatttaaatgttgtccttcttattagaacttattacaaattctacaccagtaaagtgagaggaatgatgcagaatagggggttttacctcaatacaatgggcatttctttcttactaaatcttaatagcaaggctttgtgtattataaatactacttctgtgtgctctacccagtggcttcatctcacagtgacaaaccagaaaagagctaaactttaagatcctgccttcaggttgacggtggcaaatgaaagcttgtaattgaaggtagctcaatttgtgttgggctgaagctttcatttgggataagtgtccaatccagtcggcccaaaattcagactccctctctgggctgtttctgtgctccagagggtctcttttcctctcttccttttctctctagcatcctggtgacaggaggattgtgcacccttgaggaacatgttttagatggttctggcctgcttacctctgtctctgctgcctcctcctggttctgggtaggtgtgcctgtcttcccgggtatactggcaccctttcatctgctgctgaaggaacccctgctgcagtaacttctattcagttctcttgctgcctttgggaccaacggtcctttcctcaccagacccactatggggacttatctccattttggccctcactggtactgtggatcctctgaagcccgcttgtctacaagagcctgtcgtgtcttaagccttccatcccatagagttgccacatgtcatcctattccttattactgtgacccctggcaggccactggctctcaactcttagctaccatccatgttccccactggaagcatgtggaaacgtctgggctccctggctgcaccctacagccaagggagactgcacagcagatgtggaaagggaagttgtctctaggtctcctgcccaagtacacttcagcatggtttctctttcacatggcaaccaccttctattggatagtctcctccaaagctgggaaatggaggctgcgcacaaatccgttccttcatctgcttttgttaccttctatccccttgttccctccagatttcctacctctccctagtagaagagcttctacttcccttttctgtggaagaggaacatgtcctcctccacagaatgtggagccatgtggacttaacttgttctgttgcagttttgccagtgcaccttaaagtagcggtttctcgttgtctgaacaagtacccggggttctttgtcctgcatccaaaaaaattaaggagcatggacacaagggtgggggtggagtgaaagtttaataagcgaaagaaagcacttcgcagcggagaggggagtccgagtggattgccgagttacagctgactccagaagcttttataagaaactcttctcatctctgtagcagtttgagtaacttctcctrtcagtaaagctgtctgtgcaactccccttatcttatgcagctgtgggtatgtctctaggcaagcacaaagcgccacttctcttttctgtataactgtgggtttgttttaggtaagcccccgtcttccctgtgcaagtttctgtggagcccaccatgtatatgcctcaaaaggggaggaaactttttcctgggagcttgctaattatacgaagaacaaacggcttcttttctggacgctgtctgcttctctgtgtgcaggtgcagcctgagtttttgtcccagattgttttgtttttgcccattgctgtgacttttcaggcagaccgcttctacactgtaagtttgccccaactgattttttcttttccctcaccctcattccccacttcagaagtgggaactctaactgctgttagggagattgggcattgatctttctggctatttcttgctggagaggagcattgtgtgaggaacagcagctaggattcctcccgaggctggtttaagggtcctcagaaaaaaggtgcgtttaatgtgtggttccatttactttaccatttggagcttgatggcctctagatgaaaaaaacaatttgggttattagacaacatgtattaaaatgagacaaggaaggaggtaaggatagcttaaaaatcatgaggctgctgacatgccctgataactggtggctatagttaacgtctgttaagattgggtgtatggggcttggctttggttagcttccttggtttgaccttccccaaaaaggaaacctccaggttatgggggcactttatttactcttattacctggcagaatttgtaggataattgcccagaactagaatattgttccagattttgacattacccatccctttctgtctctctgagctgcagccagagatggctggttggtttacaggaataagcagggttagtctaaaatgtaggcaagaacttaaaaatcactaatgagactagaaattaatgaccactgtatgataagttttgaaacataatttccctctctccagtcctcctttttgttaaaaacaaatcatgataggactgagttgtttgcaaaatagactttagttttaaacttggtctgattatttacataagtgcagcaagaatccttatttttacataggccttttagattggctttgatggaactttgttccacaaggaatcttagataggactttctaaagccgatctagacgtggtcatgcctctaatcccagcactttgggagcccaagacaggcagatcacctgaggtcaggagttcaagaccagccagaccaacatggcaaaaccccatctctatggaaaatacaagaattagctgggcgtggtggcaggcacccataatcccggctacttgggaggctgaagcaggagaatcccttgagcctgggaggtggaggttgtgagccaagatcatgccactgcactcggcctgggcgacagagcgaaactctgtctgaaaaaaaaaaaaaaaaaagaaagtgacattctttactcaccacaggttaggaaccctgtacaggggctgtgtagacaaggtatgaggccggttttccaggaggcttttactggctctgcaagtcgaacttgactctttaaagggaaacacaccctttcagtcaaagccttggtaaaacaacgagtttttccaattgtgttttgttgcaaaataaagtagattcttattgcgctgatgcaaacaactatattgttataagtcaagaatacttacaaccagtttctgaattctagagaaaccaggcagagagaaacaaacatgttccaaattttgttcacaggagtataccttacttagttgttaaaagctctagctaatttgaaagaaagtttccttgactctgaaaaacaaaacaagaattagcagtgttcaaagcaaaaatcaaaaagattcgtttagttttctattaggttagtccattccattaactcttgttctgcttaatatttgtaaacatttcagcttttcatgagtcctttacatttttctattatcagaaacctgcattcaagagtacctattaaagttccacagtgattataaaccattttttgaagaagattaaaataagacaacaattgtctgtaaatgacaaaatgtccagggtggttacagtcaagaacatgattgacaaatttggttatttctgtggcatacaataacccaacataacaaccttaattgtgattgatagcamatattcagacattagaaccttagacatcccatacaattttggacatatgttaatatttttccctaaaacataacctgaagaatattagacctcattttggcaatcccatgtacctaaacatgttaaataatcctgtttacctctcttcagcatgctccagggaccctttgtagcacccaaaagcaaggggycaggaaagacaaccttgagactgaagtttaattttgggaagcctgtgaaatatgttagaggcttaaaacactggatattatgaaataaaattttaccataagtcatttgttttgccaaaacaatgactcaaaaatttgaaaaaaamaacaacaacaaaaaaaaccttttcattagcccttattactacatgaatagagagccaaatttacccttgcattagtctactattaatgttaaccccagtttttaatgaagccttatagacaatcctattcaatcttaaccagtttgaccatgaggtgagatttttacatacatttttttgtatggttattttataaccctttacaagttttgctgaagagtaggtcagcatcgtaagaaaaccttgttgtgcttttatttcaaagtttaatttacagaaaaaaatatataatacccttttgaatttagtcaatatgttcacacacatagtttcctttgcaagattaatatttacagtcttttcacaatttgcttaaaccttctgctttattttatctaatttaagacaatcctttatctctaggcaaaatggacatttccatgccttcttataatcttttaactaaaaacacattttgctgtttttacacaccttgcatgcaaatccatgttcagtagtctcaattacatgtcataatggtaactcttagcgatttttaactttaatgtaaagcctggtaagttgttttaattatgtgctagatgcagataaagtctgattcctttcagcgtagttaggagcatggtcacttctatttgttcccagaccatactaattgtgaagcaggcaagttgacagtttttaaaaggccaaagaagcagtttgcaaccttaaaacatttagcaaagctagtatctgacctgcataataaattagaccacatttttacaccttgaagacgtttgtattttaccaataattcttgtctgtttttattttaaatattaaagtcatatgaactgaaaggtaccacagcttttacttttactgcaaaatattttatttcagtgcttattattcttaggccaattaattggcctttttatagacttcacatatatatcacatgtatgactacacagacagacagaagaagatccagcagctcagggtggagcccttttacgaacaggggtatgaatatagttttcagggcttaataaacaagcacagccagaagacaaagacagatgttgagaggggcttatccacctctaattccaggggttccatgaggaaaacagggatttctccaaaatgggatktgtggcaccttaatctatttcccagggagtcccaggccaccagaagtcattctagggtctttcacgtatgcatcaagaatgataagacacagtggaaaaaagtaattcagttgactgaaaaaaaacaacaacaacaaaaaaccttttccagaaaaacaagatctatgaagagaaaaacataaaggccttttacatatacccatagctcggatatccactttgaggtaagctgagcattctttaagaaaatcctttctcattaattaaaattttacagagaatgtaaacagtgatcttcatcattccttttactggtttgcaccactaccttttcacaatcatgttcaagttctccagtttcctttgggagaaaatggctcggctctagcaagggcaggttttcctctggaccacagatccctccagtagcaaagcttgatagttaaggaggcgattgtctgttagccagggactttccttagagggcagcactcctgctatattgtatgggttgtaaacagttgtttcccatgggtaacccagtggcctctggcaccaacaaagctgccattgtaactgcttagaggcaggctaaccagcctttagccaccaagttaagttcctcacttaggtaacccactggctgttgagctggacctcaagcttcagccagaattcccagggccatttccttcttttctgaagcatagagactgaatgcttttcctttgggaagactgggggttgatgctttaagtaaggcttgctttagttggttaaaggcaggttcccaagttagtgagtgagttttaactgcttgagtttcgttatgaggtggtataaagggcaagctatttcacggtatccaggtacacacagtctgcaaaatccactaatgcctaagaatcccctcaactgttaaaggaaatgggcatcctttcttcacctgatgctctagtcccttctgataagactagacctaggtactttactgaagtctgacagagccaagctttagattttcagaccctatatcccctttcagctaagaaactgaagagagcctcagtgcctccctgagacttccttggttgggggacagaggagagtgttatttatgtactgcaaagtttcaactcgagggtgagaaaaattagatctttggacagggcctgtttcagcaactttcttcccatattaagggctgtctgagtaataaacctgttctttattgaataaaaaggtttaaagatttttatttagcttttggactatcatggaaagcttggaagagttaataggtttggctctaatcccctgcaagttctccaatatacacatttgaaagagtttccttccccattttctgatgctatcatcatggtcccatttatggtcctccaagggcactggtattttccccacttgcttctccatccctggaacatccaggagagtttaaatacttgggttaaatcttggaaggcctctatacggcagtgaagttggggcttgccccgagtgaactttagggtctgaggactaaaggagatccaggctgcactcaggggtagtgcagacttgaagatggggtgttatccatgtagaaaagaggcaagagaagaggcatccctcagtctccttctcttcagagtgacccaagatggagggaaaggctggaggggcatcccccttcacccccttcctcccgtcctttgggtcccagtgaccatccttcataggtgccgccccatgtttgcaagtatgaccttcatttatggtcctggagaagctagtcagcataactagtcatgctcatctgcttatggccttggcccttcacccttgctggtttcctagacctactttgcccataaggttcccagggtaccctaagggtccaggagagattgtatttgggcaagacaccttaatggaatggaggaagtcttttaatattatctctggcttcccttgctatggccctagtgaaacattgaaatcccagagaatgggaccaattgacttccaaatataaaatcccctttttgtttaaatgccaatgtagttggatgtagaacaggtgcctcagaaaagaacatatgaggccgggcgcggtggctcacgcctgtaatcccagcactttgggaggccgaggcgggcggatcacgaggtcaggagatcgagaccatcctggctaacacggtgaaaccccgtctctactaaaaatacaaaaaattagccaggcstggtagcgggcgcctgtagtcccagctactcgggaggctgaggcaggagaatggcgtgaacccgggaggcggagcttgcagtgagccgagatcgcgccactgcactccagcctgggcgacagagcgagactccatctcaaaaaaaaaaaaaaaaaaaaaargaaaagaacatatgaattgaatggctgtcctcttgactgttaaagatggagctttgatatttacagatgggtcatggagcctggtccctaatagagggacataggagggaggggaattgaggaactagaggttttcgacaaacagccagcaagactccccatggagaaaaaaatcccatcccactaggtggcgctgtaggatctgagatgttaggtaaaaactctgactccatctatccaggcagaagttagagaggtttggggtttaataggctgtccccagcggaataaaattaacttgtctcataaagaaactgtttaaattcattgggcagtgctgagctttcacgtggagggaagaaataacccaaaaggagaaggaaacaatccaaatggagagggaagaggatattcacttggggtgaaatatccccttatatagtgccatcagtgtctatcattgaggacaaaaagcccttactaggtgaaaatttaaactgatcttgaatttaccctgtctccaggaaatcacaaacacaacaactctttgtcttagtaatcaggaatgtaactcaaagagttgttgtgtttgtcagttggtgtcttagtaatcaggactgactctacccagcaagactctgtctctaggatgcaaaaacacctgtaacattgcatagaaagaagggataagaggcatgatagccctgaaaagaaagaaggaaaatgcagtaggaaaagactggaggtccttgtgccagcaccctgacggctgtcggggactggagataatactgaggggtagccccagccagaaaccttcagttgccctaggacctccttccaatcccatgcaatgtctgggccctttgtgaaaggaaactggattggaatagacaagaaayctcagaaatgaaagtaaaagggtagaggtccgctcttactcacccttctgatgatcccttcttcctgcacctaaatatgttgtagttttgccaatgcaccataatgtagcagtttcttgttctctgaactagtacctggcttctttgtcctgcgtccaagaaaattgagcatggacacaagggtgggggtggagcaaaagtttaataagagagagaagaaatgctccacagcagagaggggagtccgagtggattgccgagttacagctaaatccaaaagcttttgtaagaaactcttctcatctctgtagcagtttgagcaacttctcttatcagtaaagctgtctgtgcaattccccttatcttatgcagctgtgggtatgcctctaggcacgcacaaagtgctgcttctcttgtttaactgtgggtttgttttaggtaagcccccatcctctctgtgccagtttccatggagcccaccatgtatatgcctgaaaaggggaggaaactttttcctgagagctcactaattatggaaagaacaaagggcttctgtactggaccatgtctgcttatctgtgtgtaggtgtagcctgagttttttttttccccaggttgttttaattttacctgttgctgtgacttttcaggcagaccatttctgcagtctgagtttgccccaactgatttttcctttccttctgcctcagttctagagggtatctcaaagtagaaagattgtggggtgaagaatagacattactgagaacaaaatataagaggcatttcaaaaatattatccccaaagcaattcaggaaagaactatggagccgctgttatgtgttatatgctgggaatatggtagtgagcaaaatagctgaggctcctgtctttaatgagcttacagtcttgaaaattttgtaggraagatttctatgcaagggcatagaggtatatacaaaaggatgattattgaaacattattatgaaatcaacagaaatgcccatcaataaggaagtaattcagtagactatggaacagccatactatggaacagccatactatggaatattcaataatgtattgaaacattattataatgttttcattcttattaaaagaattatgtaagtcttatacatgctcacatgggagaaaagtctatacgtactcatctgaacatgtattctatatacataccagacatgtctacatgagtagacaaaatattaaaaactatatacagccaactattaacaatgatttcctctaggagatgagatttgacatctattaggggatatctctcctcctcagaaaagggaagtagaagctcttttagggagaggtggaaaatctggagggaacaagaggattgaatgtgacaaaacctgctgaagagaggcagggagggaactttcacctttatgtcgtaaacttctatgttgtttgaattttgtacaacaaactatgcattactttgtaattcttaagacaaagaatataagtaagaaaaacacataccaatagagttattctggcacacaacctggtttacattttttgaattattatttctaaactatacattggtgaaaggagatggaaacattatacaacacacaacacaaaattatgctctattccagctctgttgtcccctgtcctctgtaagaacgcaaggcctgcagatgttccccaaatggaggtccctaggacagcaaaggtgcccctcaccaccttctgtcaccttcaccccacccttttcctccctccttcagccccttgatgtttctaattccgtcctgtctcccattcaaagtttctatcttgcccttttccccaagttgctatcttctgccttagaagcaagtcccaaatttcctttcatgttttacgtattttcaccaattctggtgtccgttgtaaatcaaaattgctgtctttctcacccagttctgctgttttaagcccagtagttagggtcagaagaagaaaaatgttgcctgagtccccatctgggttatagtttgtttggggggattattatcctcacccatctaaaattaggcataccttgctctgcctgcttcagtttctctccagaaacattacatcttcctacaagatctgcttttccctactactgtgtttttgaacttatcctgaaagagtgtttggtccctcccaactttgggttacactgcaaagtactctttcagaatcaaaatgagtctttaccagtccctgtttggggtttcttctatttaggaagaggcttctggaaactgtactcctgctacagttgtttcaaatagttgtgtagaacaactaagctctttagctaatttaaaagctctaaacaatattatcactttgttcattccacagtaaatttctgaatgcttgctatatgcctcaggtcaacctgtttaatatctttctgaatattttagtaaaacatagcaatatagtgtgtttagctttcaaacgcagtaatataatggtttatttagcaagtgaaataaatctcttgtgccaaaagctcatttcaaaaaggaaaataactaaggtccaggtcatgaaaaaaaaaaaaaaaagccaaccacctgatagctgtaaatactatcttaagtgtcctcagcataaattcacaaattaagtctttttattacagaataagtattggttatgcagtagctttacctaggagtaactttatctcataacagcttctctcttttatcttgcatttctgttaaattttgaaggctatatttcattcacttaccgtagttaagtcgatagtatgtaatccaatcagcaaatatagtcagcttggagccaagcagtatagattacctgtaaataaatatgatgaaattttctctttacagatgcaagtattggcattatgatgaaaacttgctcacttcgagcgttgtcattgtcttccataatgaaggatggtcaaccctcatgagaacagtccacagtgtaattaaaaggactccaaggaaatatttascagaaattgtgttaattgacgatttcagtaataaaggtaatggctgtgaaactcacattttgtctataaaataagttaagcatgaataattgcaaaaaggtgatttcaaaataattagctttaaaaaattaatagcatctattgatagcatctgttatcaacaagttgacactgtgccaagcattgtatgtgagttattttgtttaatactaacagtaatcctttcagtggatatcattatgtccattttacacgctcagagatgtacaagtagtacacaaaaatttggttgtacacaaaaattcagtaaagtataccactgattataatgttagaagcgaagataaacataggtagcatgaaaatatcgttcaaaatggctttataaaaaagcttcctccaaaatttaattgagaattcttgcagtctggataaacctttgctggttttgcaaggacatgattagaatcttgaaactgtacacatatgttagcacgaataaatagaaatatggcctatttttcctttcatctctgtgcagctgatccttttattaactaatcatttttaagtatcctagagaatgtatagctttaaaatttttagccatatcaaatgcctttagagtagaggctttaagatactttaaaacttttcttcagttctcatgttaatgtcaaatctaaaagcttttaggcacaacattttatgtatgtccattttgtttatgtccatctttgttgtgaatttctataacaataatgttttcattaaaatactatttctatctcaagacaaatgatactgttggtacaataataattgagatgaacaaaaatctaaatgtataaaataacttttcaaaatcgcccaattttactaattttaagaacctctatattattaataccagtaaaagtttatcatatcctaaaaaaagtgaagatacaccaaaaggtatttagcatcctaaaataactgctttgccaaagaaaagaacacaattttggacctcagagtattctgtatttttttactgttgtcttttttttttatctttacttcttttacaaatctctaatgaagacaatcatgcaggtcccttgagtttagagtaggcagagaagtttgggctacccttgaatgaaagtacagctttaattagttttttcaatttcaaaacaacctgaaaatctcagtcctatccttagtaaaattatatactgtttggttaatcagacttgagtgataatttggtgtgtactttccctaatatattcagaaagtaaaactttaaagatttttcttttaaagactaaatgcatataaaaggagctaactcgtaatagcacttgggtttctgggcatcacagtatcctctataaaggtttggagcttttaactggaacaaattcctcacatacgtgtgcatcagctaactgcgactgagttgggccgaagtaaaagcaaacccacactctcagtggctcgcacaacaaagggttagcttttgctcaaactacacggtccttgtgggtcagcctagctctgcaccccatcctcaccacaggacccaggcgtgcagagcagcctcagctcagacactgcctgcagaggggcagtgggaaagaagacacacacaaccagcctcttaatgcttctatgcgtgtgactgatgtcatttccacccacatcttgttgaccaaggcaagtcacacatgtcctagcctgcagtcagtgggttagggaggataattttcatccgaggaagggcagtgaatattttgagcccttaacacagtgtaccacagtgtgaaatacaaggaagccagaaggtattggatgcaccatttccccctttggtccatggtaaccaagaatcaaaacttgaaacataggccatcaattcatttctgtccataaaaacttaagatgtgtttaacttgtatatgcaaaaaatcctcctaatggaattcaaaaaggctttaaaaaaataatttaggactgcactggactttaaaaaagaggataaaggctttttttttttttaagttgaagggaaaattactcaggttttctgaggggaaaaaacatgattaagcacgagaattttatttataatacttattaaaactgggtaccaaaatagaaagttttttttctcaattccagatacccacgtgtatcttactaataataaatgccctaaaatgagtaaaatattaagtatacagtctgatttgcccatttagccactaactcatctctaaatacagcaattttcctgtgattgcatattcatgggccaaatttttaaacaattttaaaacaattgaggacaatgcttgtgtcctcaagaagcatcttttaaatgatctgcagctcattctgaccgtggtgagctaatttcatgggctcatagtgatacaaacaaaagctgttctcttgtaatgggaagccaaagatggaaattttgccaaatgtgtctggtttttataacacaaaacttcctctactaaattacaaacacatatatacatatatgtatgtataattagaattatatttataatgtataattatacacttgatgcttaagataaagagaaaatgagatttttttcttatttgccaacttggtgggaaccatattcatcataccaaggttacagctttcaacactgattgtggttggggaaagatgtcccagaaaaaaatgttaaataacctataccctgtgtggattccagtgcaattgtatagtattgttagtaggcagtgcatcttcagaaaccctaaccattgcttctgtcaacagcaaacaaaatgttgttcctgaaagcgttcagatttgacattaacatgtgaacaggaacaaaaattttaatatgtcttaaaaccttaactgtcaattcgaataatcattgtttagaagggtgtttgataattctcagactaaccagttctctgtaggcatagtaaactcaaaattaacttaaataatatacttcgccttccttcttgataaaacgtgcaatctggtccatgtaaaattactgtctacccaatgcacctgtattcttgtttcctgagaaaaataataactaattggtttctattcgtctaatttataatakcgattgatttttcttaacagaacasttaaaagaaaaactggatgaatatattaagctgtggaatggcctagtgaaggtatttcgaaatgaaagaagggaaggtttaattcaagcacgaagtattggtgctcagaaggctaaacttggacaggtaggaagcatttgatatctacaatgtcaacattttgggtttggtaactaaatcatacacatttttaatyattcttcagtttttttaattgaaatgagaatgctggcttaaacagataacttatgtgtcagaattgactataatgctaatttttattagcatctaattttaaattgtgtgtaatatatgatgtaacgtatatgaggagtattctttcacctgcctcttttttttaaggttttgatataccttgatgcccactgtgaggtggcagttaactggtatgcaccacttgtagctcccatatctaaggacaggtaacattaccttgctttttttctttcctggttgaaagtaaaccttgtcctagaagggcaaataatattttcatcctttgattccagctccattcagtgcatcgagtgtgctttagtgttatccctcrtctatttgtttccttgggtggagctagactgatactgtggactgatttaaatgtaggcagtctggcatttgggagaaacctagggttcctcactcaagaatcattttgtggttgggttattaagacccctctatctccaggcactttctctaagagttatatgaattgctccctctaaactggggtgagagttctaaacacttgaggaaccatgctttgatattatacctgttgatttttgtgccttttaaattagtactttcaatagtaaagaccaggtgttacttgtgtcaaggttttgggttcctatagaaactttaaagtttagaaatagacaactattccatggaattgtgacaatcaccattaaatttccagaaatgtctaaaacaacataaggcaccatcagttttctatctccaaaagccttccttgcttctagtccataattaggaaaataaaacacgtccatgtggcaaatggcaaatggcatgaatcaaaggcagaactttggaggatttaatcatgagaggatttaatgtgaaggccgaacatgaacatttttcacatgctgtctgatttaatcctcacagcaaccctgcaagatagagattattagccccatttgactgaagaggatactgaggcttagagaaattaagtaattttccccaaatcagagagctaataaactgtcagaccaaggcctccctgggaaagtttacactgcaccatgtatttaggaatgtgaaaatcataagtgaggacagttaactgaccaagtgtcaggtaactttctctaggtgaataccagcaggcttctgggcagtgaggaagtggttttccagattccagtggcagattccacaaatctgacaatgaccctccagttcacactctggagagaaggaagcatctttctggactttacttcctccatattaaagttctaagcactgtaggttttcccttttccttggtttttaaacttctgaaaagcagcttgacctggatataaaaagctgtcattttcattttaggaaaatagattttaaaatcctttctgacgagatgaacattgtaacaagcagggtaccagataatctttgtaatgtcactttgacatctaattggttatagagtactagcattttcgtgaagcccaaatataagagattttttgatccaaattctcagaccacttctgaagttcttcagcaagttttgagggattttttttgctttttttttttaaagcaacaataccttttttttttgtttgttttgcaataaaagctgttttctgcagttagaggagtgaggaagatcaagtaaaagtacagaaacacattttcataactgttcccaagaaatagcaacaaagggttgagagaaccgctaagaatgtggcaagtactatctgtgaccccacacacacgcacacgcatgcacacgcacacgtgagctttttcatgggtgatagggaaaataacaggcaagaaaatcttataaataaggtaaaattaccaaaagaaagttgcctttaggaccaaagcgaaaaggagaaaactctattaagctcagtgatatagttctttgtccctgacatttgtctgtaagcctagggggaagtctcctctctcctgcccttacgtaaacaggcttttcggcttttatgggacattcatttactctatttcccattagatattaaagtcccctagtgcacaaacaaatcaacaacaaaaagagataacgtagttaggcatgctgaactagtcttgggttcttaaatgctttttcattttctgtaaatgtttcagaactacatgtactgtgcctctaatagattacatagatgggaatgattattccattgaaccacagcaaggtggggatgaagatggttttgccagaggggcctgggactggagtttactatggaaacgtattcctctaagccacaaggaaaaggccaaaagaaaacataaaactgaaccttatcggtaaagactattactttattttcttatgttgaatgtttatctaagttcttttttttttcttccccatgaactcgtataaatgtgtgggtccatacatacgcttccatttgatctttgctgccatcaacacaatacagaaccatttgcactgtgccgcttatagatgtcataaatggcaacacatatgaaattataccccaagggggtggtgatgaagatgggtatgcccgaggagcatgggattggagtatgctctggaaacgggtgcctctgacccctcaagagaagagactgagaaagacaaaaactgaaccgtatcggtaatcactaaatcacttacatatttttcttttctccagttgctgctaacctattaacctcttgccaagctaaagattcgttattaaaactgtagatgttgtctcagattctgaaagaacatctttccttacactgtttcagagctttcaatctgctccatttgctccattgtaattgcttttaccctaaatgtgatgtccactactgagacgtacacactttcattggggaaagaaaaataatgtaacatggcatttgttccacgtacaagtgaaaaaaagataaaatcttagttatcctgtcctactggattagacatcaaattttattcttttgatgacagtgtcattctataaatttaaaatacataaattactttaatccaaccaagacttttatttccacgttcatgccgtgggtataatgttaacaatgaagggcactagcaagagatttctgggtttttctccccttttgctgttatgttaactctcaaatactaattttgtactagttaaatctgatgaatcacaatacatgactttaaaaaatgttacatagaatcctttattgcttcattctcagaaaagtgattgattaaaagaaaactctattcaaaaatcagcttttgtcccttcttgtggttctttcagtagaacaacttatgctactctcttcttttgatcttgtaattagaacattttactgtctctgtaaaaagtgaccccaaatgaaatgtttgctcaagtgttagtatagccttctcctgaatgtgtctaatcttatttttctgatcctatggttctgcttttggtctctctctccctgttacactgctggtgatgttagaactctgttttgggaaggtgcttccaatgttatggaaacgctgtgggatttgggcatgtcatgatatcaagatactgaatggcaaacataaagaagttatagcacttaattaatcatagtagcttaattggacatttaccaaattttttttggtaaatttcttattcagaatagtccaggaatcaactgcttacgtgcttaacttaacaaataactgtgggagaaaaaaaataaagggtgctgagcaaatttatatttctgttaattccataggccagtaaagaaaatttttaaagtgacctagaaaaattaaagggaggttatctgttgattaactcactggtgaccatgttaagatgcattttcaagtatatactgagatgaatgggaacatatttgaagaaaaataaacccagctgccgggcaaggtggctcacacctgtaatcccagcactttgggaggccgaggcaggcggatcaccagaggtcaggagttcgagatcaaccttgctaacatggtgaaaccccatttctactaaatatacaaaattagctgggcgtggtggtgtgtgcctgtaatcccagctacttgggaggctgaggcaggagaatcgcttgaacctgggaggtggaggttacagtgagtcaggatcacgccattgcactccagcctgggcaacagagtaagacttggtctcaaaaacaaaaaaaaaaagacacagctataacggaataatcttaaatgacagttaaataaaggtgacatgaaaatatcacctaaaatgtaatagtgttgttactgtgttaggcagcatattttaagaagaaaaagcatgagagaacaacttttttctgatgctattttcttctagtattgaaaatatttcttgattcattatccactcaacaaacgtttattgaatgcttactgtatgccaagcactgttttctggggatacatttttaaagatatgtttcctcattgaatttaaaatacagtgaatcagacagaaattaaacagataactgcataaataaccctaaaattagcctggtgtggtggcacgtgcctgtagtcccagcaactcaggagactgaggcagagggattgcttgagcccaggagttcaaggcttcagtgaacaatgattgtgccactgtactgcagcctgggcaacagagtgagaccctgtctcacaaaacaaacaaaactctggaacagcagctgtgataagtagtatgaagaaaaatcacagagtacatgagtttatggaaagatgaacctaatccagcttgggagatcaggaaaggcccttctgacaaagtgtcatttaggctgagacctgaaggatgagggaccaattctgtggaaaaggagaaggaacatttcaggatcgtgaataacatgaatgaaggccttaagacagaaaggaggctggcacgttcccggtgggagcagagccgtgaaggactcaacgggaagagagtccatggtgagcccagagagccgggagaggctggtatcatgcaggcgcatgtggaggagtctgctctggcccctgtgtgattagccttgagcagggggcagaagacaataaaggacacaagctcgggagatattggaaagtccaagcagtgttggcctggtctaggctggtggcagtgaagttggaaataagtcagcagattcaagatgtattttcaaggctgggtgcagtggctcatgcctataatcctagcacttagggaggcctaggcaggtggaacttttgagcccaggagttctagaccagtctgagcaacatggcgaaaccccatctctacaaaatacataaaaaggtagctggatgtgttggtgtgcgcttgtagtcccagctactcaggaggctgaggtgggaggactgcttgagcccagaaggtcaagactgcagtgagccgcaatcatgccactgtactccaggctgggccatagagtgagactatgtctcaaaaaaaaaagatttttttttcaaggtagaatcaatggaaccttgaaataggttccattgaacctatttgagtagattgaatattatgtatgatgatgaagttaccctaataatactgagtaccctaaaatttaagaatcatgatggattagtaattaattgttcaggggaggggagcagggagcaagataaattctgctgtaatttctcccaatggtgggagtgacttgtccctaagaagctaccaaatcttttttctcttggacctaaaaagtgtccaatttaagatccattcaagaagccccacagatacacaggtcacccttttgcattcctacctcctggcacagtaaatatctatatctaattctcctgtgtcatttctgtgctacatttgcaaactctgaatgaactgtggttgttctacaatgatttacactgttatttggcgagcccctgagctataaaattaaaaaatgacagactacttccatggtgtatggttttgttcacccaagaatgactcataaatcaatgcaggagcagttagcagaccacggctgtatggctcagtgtttttaagagtgaaagagaaaattctattttaactaaaactaaggcttaatttttaaatccacagaggtaccaaggcgccctctaatggtgaactcaaacaatgctctattttgtaatgarctacagtttcagttagaaattgtggtaaattcgttagggaattatgaacagatttttttctttttttgtaaaggctttataatttcttaatgtttggccatcagttttgtctcttctatgcattttcaggctgtattctacaaggcttcttgcctattggtgaagggttattgggggtttgtctgtaatggttattgcagtgtttctttttcttaggtccccagccatggctgggggattatttgccattgaacgagagttcttctttgaattgggtctctatgatccaggtctccagatytggggtggtgaaaactttgagatctcatacaaggtaacattttatttcaacagatggaattctccaagtcgttactaacttctgtggctttcagataaagctagttttttgtgggggaraaaagcccacaattatatcatgcatttctccaaattgtatagaatgatttaatgaaaatggatgcctttgaggaaaaaataaggcaaaatgcaagctccaaacttaccatatatttacagggctcagctcaaaattgtggctagcaagctttagaaatgaaaatatctacccccacaccccaactttctatatattggagctttttattatagaagcccttggaagaatctgcatgcgttagggccacaattgaccacccactgacacagtcaccctttaccactgtaggacatgattcaagacagaagcagagccccacaatgactgtatcctcaggctgactttggcgctgtcttcctgcagcatccaccctgttgttgaagcagtctgggagcaatactatcttccatgctccagcccccacctcaacccctattcctacccccattttccaaaagaaagagagagagaactatatcagagtgtgagttaaacaggtattcattacctcttgtcttaaatgtcctgtgcgtagcactgtgagggatagaagaggagtaaaccagttgttgctctcaaggaacttgataagaagatattagaattatacttaaattcataatacaagaaggcagaatggcattcagttggtgtgcttaaaaaaccgtcggccaggcgctcatgcctataaacccatcactttgggaggccaacatgggcggatcatgaggtcaagagatcgagaccatcctagccaacatggtgaaaccccatctctactaaaatacaaaaaattagccgggtgtggtggtacacacctgtagtcccagatactcgggaggctgaggcaggggaattgcttgaatctgggaggcggagattgtagtgagccgagatcgcaccactgcactccagcctgggggacagagcgagactccgtctcaaaaaaaaaaaaagaaagagcgagcgttatgctagatgcagaatttgcggcagaagtaggaagatgggtatgatgttagtaagcacagataagggatgggagggggacttctaagcaagtagcatggggaaaagtacaaagaagagaacacaaggaacattcagagaacagcaaggagcaaactttggcagaatcaagcaacatgaataaggaagacatctaagaagataaaatgggaaggtgtattagggccatattgaagagagcctttaaagctgagttaagagatttttatttaatttgataagcagtggagaacgatcaaagatattaagcaagggaataacatgacccaaagctgcccttcacctataataatctcttgctataaataaggatagttgagtagagagaagccgaaggtgaagaagccagttaggagtttattataataatcacccaagtaggaaatatattagcaatggaaatgattaatgagttaggaataaagaatccacatgactttgcaaggttatattgggagaaagttgctaggggctatgagtacacagtaagaggccccttagtagcagtttattattaatactgtattccctgttgccttcttggttgttacatgagcttttaaaagcaaattattttaggatttgtttagtttaagaattctgtgtggacactgtatataatttagattttagatttacacttacaagataaattttcagttatggtttatgtttgtatttgaaacaactttcacaacgtgtttttccttcatagatatggcagtgtggtggcaaattattatttgttccttgttctcgtgttggacatatctaccgtcttgagggctggcaaggaaatcctccgcccatttatgttgggtcttctccaactctgaaggtgagttttttggataaaaggggaggacagggaactaacatttatgtaccacatgctatagtagttacttaacaattgtcagcttattgagtgggctcttcagcagtcatgttgattctcacctttaacttagctagacttattcacgaaatatcttattgttctttaagattattcagctgaagcaggaggattccttgagcccaggagttcaaggctgcagtgagctatgattgcaccactgcactccccgctggatgacagaacgagaccccatctcttaaaaaaaaaaaagattgcaccctatttttttaattgacaagtaaatattgtatgtatcttgtacaatatgatgttttgatatatgtatacattgtggggatggctaaatctggctatttggacatgtattacgtcacctacttgtttttgtgctgagaacacttaaaatttgttctcagcaattttcatatatgtaatatattataaattgtagtcaccatgttgtataatagatctcttaaaactattgttcctaacagaagttttgtgtcctttgaccaaaatcagcccactccccccaatcctcaccttctggtaaccaccattttactatctgtttacttgtttacactccacatgtaagtaatatcatgcagtgtttgtctttctgtgcctggcttatttcatttaacataatattctccatgttgttgcaagtgacaggatttttttattatttaagggtgcatagtattaataccatcatgtatatataccatattttctttacccattcatctgttgatggacacttagcttgattccatatcttgactatcgtgaatactgctgcaatgaacaggagtgtagatacctcttcgatatacagattttatgtcctttggatatatacctagtaatgagattgctagatcagatgatagttctatttttaatattctgaggaacctctgtactgttttcccataatggctgcaccattttgcattcccaccaacaggtgggaagggtatcttgtggtttaatttgcatttctctgataattaatgatgttgagcatttcttcatataactgttggctagttgtatgtcttcttttgagaaatatctattcaggtcctttgcccaatttaatcaggttgtttccttactattgatttgtttgagttccttctatgttacggatattagcccttaccagatgtatggtttgcagatgtagcctcccattccatagattgtctactttgttaattgtttcctttgcttacagaagcttcttagtttgatataattccattagtctatttttatttttgttgcctgttcttttggggttgttacatccaaaaccaatatcatggaattttttcttttagaagtgttacagttttaggacttcacgtaagtttttaatccattttgagttgatttttatatatggtgtgagatgaaggtctagtttcattcttttgcatatggatatctagttttccatttattgaagagactgtgttttccctcatgtgttctcagcatctaccttgaaaatcaattgaccataaatgcgtggattatttctggcctctctgttctgttcttttggtctatgtgtctgtttttatgtgagtaccatactgttttgattactatagcttagtagtagattttgaaatcaggtagtgtgatgcctccagcttcgttctttttgctcaagattgctttagctattcagggttttttgtggatccatatgaattttaggatggatttttttatttctgggaaaaatgtccttggaatttagatagagattatattgaatctgtagtttgcttttataatatggatattttaataatattagttctttgaatccatgatcacagggtatctttccatttattttgtgtattcttcaatttatttcatcagtgttttatagttttcagcatgtagattttttcacctcctaaatattttattgttttgcttagctattgtaaatcggattgttttcttagtttgttttacagatagaccaccgttagcatatagaaacactactgatttttctatgttgattttcctgcaactttattagatttgtttattagttctaacagctttttaatagagtctctttagggttttgaatatataagattatgtcatctgcagagacagtttacttcttttctgatttggatgtcttttctttctcttgtctagttgctctggctaaaacttccagtagtatgttgaatagaagtggggagagtgggcatccttgtcttgttcttaattgtagaggaagagctttcaacttttcatcattgagtataatgtttgctgtggacttgtcatgtatggcctttattgtgttgaggtacaatcctcatgtaatttgttgaagctttttacattgaattttgtcaaatgcctttttcacatctattgagatgattatatggtttttgtccttcattctgttaatgtggagtatcacatttactgatttgtgtatgttgaatcatccttgcatcccagggataaagcccacttggtcattgtaaatgttatttcaattatttctctgtgtttgattgaaggtaactgagcttctgtaaaacaattatttagaattatttatccaggtctactactgggagattattgtgatcttctagtggtattatgtcctcttcatttttcagtttcttattgacttacattaatgcctgtgcattttgtggaccagtcacctcttgcggactttacaggctggtttcagcttcctctatgggggaaggaaggtgtgagggtacttgcttggtgggatatagcagttctgggactactgaggataccaggtatatattccctgtgcagatcagcccaccaaggtcagtgttggcaaagattctagtgctcctcagtggctaatgctgtagatatctatagtggcagtgaggcatgttggggtctttgggtatggctgccaaggtcatcctgatttttctctcattgcagaagttgaatgccccttggcactggttctgactcataggctcacttgcagcggcagtggcccttgtagagtggctggggagctgaggactgaagcacaagcatgagtggagagactatggctacaggatcttggacagtttaaaaaccccaggacttagggcacagatatttcgctactgtattgataacagaatgcgaggtaccagatgtttgtgagacagctgaagtagccaagaatgggagcacagatgtgctcagagttaatccagctctagggacagagtggtgcctaggtctctatggcagctgagctggtgcttgggacataggtacctctgctgccatgttggtagcagtatgtgaggcccagatgcttgtgaagtagcttttagagccaaggaaaggagcagaagcatgcgtagagttagagcagctcctgagttggggtgggttctagctctctgttgcagctgatccagggcctggagatggggcatgcacaataaaggcgtggctctgaggcctggagcatgaacgaactatagcaatggttctagtgtcggggcaggcccagtgcagccacagagcctggggctgcaatgtggacactagcagaacaactgtggcttcaggatcagggctcactgggccatgggagaattggcagagctttgcccaaagtaattcaagagtagctgctgcttggatggtggtgaatgttcagatgcatctccctctctggggttccccagcagaagggctgtcgtttacctcagtggcaagtgatgccagtgtcctctagggagcaggcctctggaaactatggtagttcctgctgcatggccgataccaatagcatctgcctttcttctttgttcctagctatctccttgtgcctcaggtatgtagacctcacaggtgatcctgtcctatgtagatattcttcgtttcttttcctccattgtgttgctgcagattcttcaatgggccctggagctctctctgggctatttgggtttgtgaataggtgtctgtatttgttttttagttgtgggggaataaaggctggtgtctcctactttgccatcttggtgacctcacctcccattatatcccattctgattaagattcctatattgaatgttctccatgaatacatttcaaataaactcaaaaaagtctgacactgtgtagggaaatagttgaagggaaaaatactagcttctgttattcacacatgagtaaaatatggtttggttttttttttaatttagataatcatgttaggagtttgcataataagcaaaatcgaatttttgaacagtgcttacaaaagattaatatctcttgtccctcaaagattgaaaagttaatgtgaatatcctttgtcctgttgtattctgcctccatattctctatctctgtcacataaaatagaggaaaattggccaggcacagtggctcacacctgtaatcccagcactcrgggaggccgaggtgggaggatcacgaggtcaggagttcgagaccagcctgaccaacatrgtgaaacccagtctgtactaaaaatacaaaaattagctgggtgtggtggtgggcacctgcaatcccagctactcaagaggctgaggcaggagaatcgcttgaaccctggaggcagagtttgcagtgagccgagatctcgctgctgcactccagcctgggcaacagagggagacttcgtctcaaaaaaacaaaaaaatagaggaaaatcccactgactcttttcattgtgacatccaaattgttctattgtaataaatattttgctgtgattatttaataaaaatctcatctcctatgccataaatatagaactaggattgataatctatattttaccaaaactcatgaacctgcagaaaaacaaaacattggtttttaaaacattttggaaatgttaaaaaatattttttgaataaataaaatgtatttaacttaaactgaacgggactgttttagtaggatgagcatcctcccgggcttctttcccagtcacacgtttattaggaaataaatcacagttctagttccttctattgattctccccattccagggagtgtacgtgctctctctcagcttcctcaaatgagatatgtcatagtcgccgtcttccaagagaatgacagtttctagctggggaggacagaattagaagtagtgtagtggtgaatgatgacctggtgattatccagccatgttggggtctcccagttctttgacatttcatcccagactagtgacacttaggggtggcatttatttatgaaacaaaccaaggaagcttcatgcagacatccagatgtcccactgcttggaggacaaagacctctatccctggcaaaacaactttgaggtttatttggttgggctgctttcataagttctaagaggcatgcaactctgatgcccctcattttctggaacgcttaaccaagtcaagtttattgttggctgtagacacaacttgggacagttcataaaatgggaataggtaataagcagacagctaagctttcagagccagaacatccttctcattggccaaatgaagccccagctacaacaggggatgagatttaaatgtctgtgataaaacaaaaatagcaccaaattaacaccaggcatgattgacattgcaggaaattccccttggagttggactcaacaatcacgaagaattgatgaaaagccaaattgactcaaaaaaagtctattctgaaagaaaaactaaaagagctgagaggtggctatttatcctctctaaaaattagctatatataccatacaaactacccagtaagtgtgaatttagcatacacttagtgagtacccagcatgtgccaggcactttcttttctccagttttgacagcatctacttgagccatcagggggccagtggccaggtctgtttctccagctcatttgtctcctctgagcctcaaaccttctagagttatcctctttgatgtcctttagatcttccactcaacagaagtcaaaactgacctttaacttttcctcaaaagtgattccttccactgtgttctctatttgcccgtgaatgaaacttagggaggcatgtagagttgttccctgtccctcccccttaccaagtgctggtgattctgcctcacatatagctcttcaatccatccctttctatacttagtgcagcccctcaaatctctcccatgaatagtaaatagcctcctacttggctctttgccatcaagttcaacccccttcagtctaccctccactcactaccggtgtcattgatctgaaaattaaatctgatgtcacttacctgcttaaaacgtttttatggttgtcatctcaagggtaaaattcaaagttcttttaaaaataataatattaataatagctaacatatggtaagtacttacagtgtaccaggcataaatctaaatcctttatatagattaacttcttaattttcacaacacactatgaggtaaggactatatcctcatctaatttttttatgttgttgttgttgttgttgttttgagacggagtttcactcttgttgcccaggctagagtgcaatggtgcagtctcagctcactgcaacctctgcctcccagattcaagagattctcttgcctcagcattccaagtagctgggattataggtgcgcaccaccacacctggctaatttttgtatttttagtagagacagggtttcaccatgttggccaggctggtctcgaactctgcctcccaaagtgctgggatcagaggtgtgagccaccacgcccagcctatatcctcatcttaaaatgaagaaactgaagcaagttttctcccagtgaatactgcattccagtttttgtaaactacttgctatactgcaatacaccatgatttgtcatactgcatttgcttttctctttgccctgaataccattcccacctaattaaccactccttcgagatggggcaacacagtgccactctggccctgtccatctgagaaaactaattgctccttctttttgttgccataatcttacatgtgtatacataactcttcaggtttgttcatgtctagagtacatgtactgtgtctaatttcgtatggatttgcaaagattcagaatgtttagtggtatattagtctgttttcacactgctataaagatatacttgagactcggtaatttataaagaaaagaggtttaattggctcacagttctgcaggctgtacaggaagcttggcagcttccgcttctaagaaagctcaggaagcttccaattatagtggaaygcaaagggggagcaaggcgtctcacctggtgggagcaggagcaagagagagaagcaggaaggtgctacacacttttcaccaaccagatgtcacaagaactcagagtcacaaggacagtgtgggcatgggggtggggggtggactggtggtaaatcattcatggaggatccaccccatgaaccagtcaccatccaccaggccccgcctccaacattggggattataattggtcctgaaatttgggtagggacacagatccaaaccatatcaagtggtaatatcgtatgttcttttatcatgctgcttataacagctttttttaaacccatgggcttttgtgacaacaatgcatctaggggcatgttcaccctttgatagttatcttgttgcctagaaaacatttaatctgaacactaggtatttcttttttgaatgtaaaacatgggtcggccacatggctgacaggccaaatccaaccctttttagtaaatcaagttgtattagaagatagccacactcatttgtttgtgtattatctacggttactttctcactacaatagcagagtcaaatagttgccacagagactgtatagcccaaaaagcccaagatacttactatctggccctttatagagaatatttgctgatgcatgatgtacaagattaagggattgagtattattttagttcatttagtgttgctacaacagaacacctgaggctgggtaatttatcaagaaaagaggtttatttattcacgattctggtggtttgaaaattcaggcttgggcagctacatctggtgagggccttatgctgcttcagctcatgatgggaagcagaaggggaatgcacatgtgcaaagagatcatcacatggcgagagaggaagcaagagagagaccaaggaagccagactctttaacaaactactcttgtgggaacgaatccacttctgtgagagcaagaactcaccccctcacctccataggaggccattaatgtattaacaacccaaactcctcccagcaggccctgcctcccagcattgccacattgggcatcacatttcaacatgaatgttggcagagacaaatcacatgcaaattatcactcaagtgtgtaccaatttggtcacatatattcatgcaaccattcattcatcaattaaagctttaaaagctagatatttgtcagctatcacagtgtcagcatattttattgctctatagctgctttttcttaaagtgaaccaactggggtcgggggcaatggctcacgcctataatatcaacactttgggaagccaaggcaggcagattgcttgaggtcaagagttcaagaccagtctggccaacatggtgaaaccccatccctactaaaagtacagaaattagccaggtgtggtggcgggcacctgtaataccagctactcaggaggctgaggcaggagaatcgcttgaacctgggaggcagaggttgcagtgagccgagattgcgtcactgcactccatccttggtgacagagtgagactccatctcaaaaatatatattttttttaaattaaagaaaggaaccaactggggaaaatacccagtccatttggggttatagtaaaatagttctattatagttataacaggatcaataaaatcacctgcaaaaatgtgttttattaaacagagcttttgtttctcatgatggtttctgaaatgatatttttttccctacacttatcaacagaacgattctaatagaaagagattgtaggccaggcacagtggctcacacatgtaattccaacactttgggaggctgaggtgggaggatctcttgaggccaggagtttgagaccagcctgggcaacagaatgagactccatctacacaaaaaaataacaaaaattagccaggtatagtggcatgtacctatagtcctagctactcgggaagctgaggtgagaggatcacttaaacccaggaagttgaagctgcaatgagccaagattgcaccactgcaccctagcctgaatgacagagcaagaccccatcacaaaaaaaaaaaaaaaagaaaagaaaagaaagagattattatagggaaagaagtacagtgtccagccaagctctcataaactctctctgagattcaatttattcttctgttagcagaatagaatacattatctcagcatatatgatcttccagctcagggatatcaggttttgtacaatactttttacttaaatacacatgatattttaatccttggcagatgacatattagagtcattaacttgcatttgttgtttaattaaatgccaggtcctgttgaaatgaatttgttatgtgtaggccattttcatgtgtctaatataggctgtttatgatatgacatttgtatttttataacgatatatatatatwtwttttttttttacagaattatgttagagttgtggaggtttggtgggatgaatataaagactacttctatgctagtcgtcctgaatckcaggcattaccatatggggatatatcggagctgaaaaaatttcgagaagatcacaactgcaaaagttttaagtggttcatggaagaaatagcttatgatatcacctcacactaccctttgccacccaaaaatgttgactggggagaagtaagtagtcacatctcaaaatgtatgtgtttgtagactgagtttgggagaaggcagagagaggtggaaatatgtaagagggaagtattcttggggaaaagttggggtaaaaactgtctgataggatctaccacctttccactaaacagctayagctgccagaccagctggccaccatgctgtctcctggcagcctttgctcattggccccctagcctgcaagacatccactcttcactccagctcctggcgcctccatgcctcttactccaactcccttccttaactaatttcaayttatcttactgctctcaacttagagatcaccaatactgaaaagcccttcttactattccccacttcatcaaaaagatgcagttctatgttctttccaggggttctcacaacacccaaaatcacctatctcccaaccagtctgagtgcttcaggaccttgatcacttgtgtccaggtggactgatgcagggacccatatacagtagatactccaacaatgcttttcaaatgaattaaaaataattaaaatcagacaaaagcactttgacaatcagacattgtcatttctttgtttattcaaacttgtcttcagactcacttctgattgctccctgcagccccgctgtatgcctcacaggtacactaaacctgccatgaacgttcaagtctacatccctctgcttaattatgttcagcaaatattggttgagggcctactatgtgccagtcactcttctagacagaaaaccagagaagcaaagtcgtttttctcagggaactggcatgctacctggggagagagaccaaaaaagtctgagaaaacaaaaatgataatgacagatggtgataaatgataatgacacataatactgtcaagaggacttaagggcagggtaaggaaagcctctctgaggaggtgacattcgctctcagatctgaatgataaagagtcagccaatcagagagtggagatgaagggaagctgaccaactgcggaagcatagttcatctgggagtggattccttatgggttggtgtgtgaagggataagggccagaatgacatcgaggttgttttgagtagctgattaggtggctgctgagattgggaagatagtaggggagtgaatggagggggcaaggcttctgttggtgttctgggcatgtgaagtacctgctaggcgtccaggtagagccattaaggcctactgatcatagattgtaggttgtatgatgccaaagtccagaagagaggccactctggagatgtgcatttggggccatcagcaggtaggtcgtttcatgggactgaatgaggtccccgagggagaaaacacagatagagaagagaagactagacccatccgtcagaaacgccagcatttagagttcaggaatagaaggaaaaascaacagaggacactcatgctgctctctctgtacttcttgctttaatatactttttccctatactcttwttttacctgtcctattacagcaaattatgtttaactccaactagaccataagcctttcaacacacagatctctctctgagggcccagacaagtatatccaactgtatgcttaacatcaggacttgaatgtgtaacaggcatttcaaactcgacatagcctaaattgaacttcctatctcctccccccaacccatctttgctgatttcttggtcaaaaactttggagtcttccatgaatcctgtctttgtctcgcacttcatatctagttccagaatctgatcccttgttgcctggtctaagccaccatcatctctcactgagactaacttgttgactctcctacagcctatttcaaatacagcagtcagagtgactgttttaaaataaaggcaaatcatgtccttcttctgctagaaaccctgcaccttcacctatgagtgaagacaaagtcctttctggtagtctccaagatccacaacatctgtccccattcctctctggctctccccactccactccagccccatgtccttactggtcctcagactccctccaggcatgtgcctgcctgtgctgttccctctgccaggaatgcttccttgcagatacacgcatgcatggccagctctcacacctccttcaagtctgctgacctaccacttctcagtgaggtccaccttgttacttcccaacgccctagctcccaccctaacttcctcttcttttcctttttttcaccacacttatcaccttttgccataacagacaaattgtctactatgttttttaacttatattctgtcttttttcccttacattcccagagtgaatggaggcaggggcccacattcactgtggcatgcccattactggggtaggtgtctttattttgttcactagtgtttcagagcctacaacatgcctggcacacatcaggtacttaatatttgatgattgaataaatacatgaatgaataaatggaattttctgtcctccttttactgtctcactcccaagtatatcttcagtttaacctcttcccattctgacatctgcactttatacttcatttctcggcatttccttaacattccagggtaaacccctacctgttttaaaggtgtctcttggggcagtctttggagctcctccaggcagggtgagcagctcttcctctgtacattcacacctctgtcctgactggtccactacccctctgtctctctacaggcggtgaggaccatgacttgcacctcttcatatcctcaaaacctgttatcattataggtgcacagtccatatttgctgactgaatgcaagaataaaacattttatccaaatagtatagcgatttataattcagagaaataaatggcttttccaaaaatagttcttttcatacaaaatgtacattccaaagatggaaacctgtgtttgcttttcatctacgtttatagagaaaagcctcactgcctggtcatgtgccatgcatggcctatgcaccctagacccctacaggcagctaccaaaagtgctgcatagccatttgggagaggtcccttacaaatccagtctgttctagatatctagggccaggccagtgtttattaccactgtggttaggttctctatttgcttctcattcacatgaattactgtgattctgaaattgcaattaatggtaactttttttttctctgtggtattttacggaaatgtatagtcctttgctcttagagaaagaacccattccagtgttgacttcaagaccataagttatttcaaaactatgtaaagattgacaatccagtaataacctgtcactacacatacccagattttccctgtaaactgtaatatttaacatgaaatgttaaattctgatgccagagttcatcaaaaactaaactgttgcctgctttttgcgtctttattcatttttttagatcagaggcttcgaaactgcttactgcattgatagcatgggaaaaacaaatggaggctttgttgaactaggaccctgccacaggatgggagggaatcaggtaaaccaccttacttttgtgtttaagttgttccgtattgagggccatcaggtttattgatcacagagtgatctttgtactttggttttcgatttggtaattttgtttgttttgataaagtaaaacattctgtaaaaaaattgacagtgttaaaacrttcacttaaatgatgggaataatagcagtattggttttcacataagcagtcagaatctagaattaatgtctaatataagggattaaaatatattcctgtgggagtatatatttgtcactaccgtaactatgtaagcctagctccctaacaattttttgcaagtattgctcactaatcctcatctttttgcaaatagagtgttactgccagtaatgtatatttcactaatatatattctcttacttatgtgggtatgtttttgctttttcattttttcacattgttggtacttaataaatttgtgttagtgacccatttggtatcttagagactaaakaacttaatgatttcagtgttaataaggatcttcactaacatcaaaataaatataatttgtctgtggacttacagttctaaacaaaattatggaaaaataagttagtcattcaatttaattataggagttaagtttctttcttttcaaatgcacatcagcagggaaggtgcctctgttacttaattctctcttttccttttacagcttttcagaatcaatgaagcaaatcaactcatgcagtatgaccagtgtttgacaaagggagctgatggatcaaaagttatgattacacactgtaatctaaatgaatttaaggaatggcagtayttcaaggtattctgcattttaacttctgaaatattatatgcttttcattttcagtaacatctagcatgtggaatttagataaataaatcttaaaacctgcattcaaattcacttgcattttcctctcatttagtcccttgcataggttttcctgagcactggatgactcattgttctataatgaggcatcacttttgttctctcttacaatattgtcatgtaatgaggccacgatgatgtctataaagagcactgctaattttagtaatacaagaaagtcagtgttctgtgaggcagtcatcaccattgctctcatcaaaatctgatttttgaaatgtaaatgaatcattcattaaagtaaaatatatttaaatatatttatactattaaaaatttggttaatatttgatattgtccagcaggtggagatagagacaaacaaataaaacttgaaatctaggctttcataacgtctttatcattgttgtgtgctaaatacagtgggataaatgtagctagttgcttactttaatggtcaaatttagttattcacgtgacactgctggggtagctttgtgtttcagctgtgagtatttaaagctctgtggcaagttgaggattacaacatattaatagatttatgtatagttttcaaattctagatttggctaacataaatcaatttattattaaacaaaaagtggggaaagctgcctcacactaaaaaaatctgtcaaccctccattttatttactcacccagtatttgttatcatatcccatctgtcatgcaagcaaggacttgtttgctatgtaataatgatatgacctagcttaacattccctgttactgtcatttacagataatttccaggaagtgataagcacgtatcaattgatgattttgtttcttataacaagttaggaaggagaagaatagcataaaccttaaagagtggagcatttattttcacaaaaaaaaaggatatataatagcaataaatagtaggggtcagtgagaacaatattagcaaaatagtaaaagagggctaacacaccagaaactacatcaagaagtaattgaacaaaaaatgacacataacatgttttaggtattttaaagacgcagcactgaatatacatttgtgtgttagatattactgaacattcacttggggaccaataatatgttagactgtaggggagttcaaaaatatagctaaagcacgctattatataatggcagagaagaaagaaatgcaaaaatagagataagcaaaatgccataggacagaaaagagtgattcatgggaggaattactgctgaggagtttcatagaggaagtgtcattgcacaagtcctgaagtgtaaaaaggctttccatggaaagtaaataagaaagcctggatgagcaaagatgtggcatgaaaacatgtagaaaattcaaagaattgtatttcatttggtatccctcaattgtgctttggaggaaagagcaccgaacttcattttttaagttttggagagggatagaccttatttgaggaaggtagtgatggaaaacaatggctacttttaggaaaataattctggaaacgtgaggtatggactgatgaagcaacgagatcagcttgagcagcagttctcaaactttctgtcctctggattccctttacactcttaaaaatttttgagctcccccacccccaaattgcttttgtttatataggttatcactagcaatatttccagaactggaaagtgtctgagaaatttgtaaagtttttatatattaattcatctaaaagtaataataatatacttattaaacattaatgtaaatgacatttttaatgaaaaataactatgtttacccacaaaaaatagtgagaagaatggaattctgtatttttgcaaatctctttaatgtctggtttaatagaagaagacagctggattctcatactcctgcttcatttggtctgatctgaaatgttgttttcgttcaagtatatgagggaaacccagccccacacaagcatacagtttgtaaagggagcgagtactttaatagccgttcatataattgtggctgtttttttattgtacaccacaacttaataattaagtggtagtttcttaaaagttatttccagtgtagactgatatccttgagcattgtacctcattatatggaagtacttgatacgtacttcccacttcatctcatagaattttttttaagtatactgaggggtcaagactgaataaaacgaatgttttgctccttcatcagtgacatccttaagtgaaaccggcatttacttttcaactgtgtgtggccatgagcaatacaactataggtactagcatagtttgattcatgctaaggcaccatcagttttactcaccattgcttttgcactatcggtataaatgttgctaaagtgaaaaggcaatggtgtcttcgtattatgatgaaaatagtttcggccttacagacccaatcctggatagtctgaggaccagactttgagaagctctgagctatattgaagaaacctacagcatayggtgagggccaaaccagggcatctgcagtggcgatgggaaggaatataaaccagagacattgcacatatccatccttagtgactggtatgtgagtgaatgaggaaaagtgcagtatttcctaaggactagagagctgggaatgtcattagccaggataggaacaagagacatagatttggaggggcagataatgaatttaggtttgtatacattgagtgtgagataccagcagtatattgtgacttaacaatgaaagatcttaggacttagaaaactgacaatcaagagaaatccagaaaactgacaatcaagagaaatccaaagtctgaggtgtggttgagaagcttttccatttccttaaactgtctcctcatgaaagtcaagtgatratttctgatgtcagtgatatcaagggtccaaatttgaaacttttttcttactgtgttttccagaacctgcacagatttactcatattccttcaggaaagtgtttagatcgctcagaggtcctgcatcaagtattcatctccaattgtgactccagtaaaacgactcaaaaatgggaaatgaataacatccatagtgtttagagagaaaaaaataaaccaataacctacctactgasaagtaaatttatacaggactgaaaaccgcctgaaacctgctgcaactattgttattaactctgtatagctccaaacctggaacctcctgatcagtttgaaggacattgataaactgtgattttacaataacattatcatctgcagttactgtttacaagactgcttttaccttaaactttgtagatgtttacatctttttgttgtgttttaagatgatgttggtaatttgtgcctttagctctgttttattagacagagttaaagcatgttgtcttctttgggattacactcaggggtctgaaaggcagtttgatttttatttttaacacacttgaaaaaaggttggagtagccagactttcatatataacttggtgattatcaacctgttgtgtctttatttaattttacatctttttgaagcactgccacaggttattagccaaggtggccttccttcacagtcatgctgcttttttgaaaggtgaatttcaacacatttagtgcctctttcatttctcagtatatatttcaagagcttgtgatgaaatctataggatggtaatgatggacttgtcacctgtatggggaatacttttactactcagaaatgaatttatgtgctgccatttgctataaagttgaactttgtatggcttgaaaaagaaatgacaatatggaacatcccaaggctgtcccatagggttggaagttgtgtagcattcacycccttacctactggcattcccagtgccctctgtccatacctacttctaggattgcaaaggagtcttccaactagagaaaaattgtccactgacatttgggatttacttttctccaatacctgccaatacagaaaactattatcagttgttattgttatcccttgaaagcgagggtgacaaaaacaacaaaacaccgttataaacacatcaaaggttcattctgactgaggtaagactttccaagcccttgttagattaggccttataaaacttgtgtgcattataacctaagctgtgcaacctgtgaagccaagagtgaactgatgtttcatttatattttcatccaaatgacattatctgcacgtttttaaaatttaaaaacaaaggactatttaaaaatacagtttattaacaaacgtgaactactttctgttacattaggtgttccctagtgtttcttaatttctttttagaaagtgtatttttattagtatttttccggtgaacagaagatttgtttggatttaaacatttactaagacagtacctattaggaaaaccaaatattgcaaatggtcaattcgattttaatttctcaaaagatactctgttatccagaagattaaaatgcctacattgagtgcttaaaaaaaaaaaaacaactgtgatgatgtgagcagaatggcaagtaagttaagcatttttgatcctgtaatcatggtatcattacaatgaaaggaattcacaaactactgccagaggaagtttgttttttaatttaagagggaaatataacctataaatttgtttcttccaagcttagctcttaaatttggagactcaaagttaaacatcctcaacagagttttatttataattttgaattgtcaatttgtattttgctactgatctgtgatcaaccattttaactttcatctctagggatgtttaacatttataattgcaaaataaaccaactataaaaaaagaaactaagagagaattggtactttaattacttgtgtgtttgcaaataggctccattttccatgttgagtagattataaccttattaactatgcataggcctaagaaaggtggcaatgaactgtgcatgtaaattttaaatgggtactttgtgcaattcgttaaaagaagatactctatgaatatgattctatatattgaaatcagaaaacctaccaaacaaaaacatcagaagctgctgccataatgactattttctactgtaggctgctttggaaataattcccatatccttgctttgtaagttggtaatatcactatgcatttctacacattttataaatttgatttatgcagattttgatacactgtatgtttctgtagaaattgtataaatattcaaaattttattaggataaatttgagaaacttacgtatatcttaattctgggttgcttgttttttaggtgacaaaaataaaatattgtattttaattcatgggtttttttggtgcttgtaatcatttcaaatctaaacactgcacatttgaaagaattacttgattttactatttacaagacacacaatacctaaaatattatagaccatagttattagttgagtatgtgcttgactgttgcttagcattctgttacacatgcttagaatactcagagcttatgtatctgttggaaggaaacaaaggtttatttttacctgtttgcctatgtataccaattttttaagtttatactttttttaattataaaaaattaccccagcaacatatatccttcttggctgtatatagaattgccttcttggctgtactatagaattgcctattagaagcaaacatgccttcaaatcaaatttgtttacaacctgacagatcaggttaagtggagaaaaatgaagagaagggaagcctaccacaatgaaattagaaatagtccatagcaccttgtacaaaacacatctcaagagaagatacggttgctaacagattcaagtaagtggctgtattgatttgggaaactttctctcaactgacctgtctattgtcatatctcccaattcttagctgctgtagaagtaggctaagaaatttgaaaaagtgacagcaccagactagaataaatgggagtttctttatttcttaagtttctcatagggatcttggaatatatttcatttctggacataattgggaaaaaaatccatatataattcaatggaaaacatgacaagtacctcaccagaaagccagatacctaataggccaatagtttaggtacgtgaaaattattccatgtgaaagcactttaagaagtgttgagcattatgaaactgtgatgtgataagtgcatcttgaagaatatctaagatattgtatccttcaaattacctttaaatgaaatttctcttgggcttttggtttgagcaaataaaccacagctgtattaagaattaactaaccgaaacaaaactaaatatttgaatagaaaatagggatgaatagacttccacttccggctataattttaagtggacttatcttgctaccccaaacaacagttaatgctggacaaaatatatgaagcaactgttttcaggaattggatactagtcaaagcagactgatatctaaaagaaaggaaatacacaaggtgaatcccaggttcaccatgtctgtctccatgggaggacattcccaaccatggtgcaaggaatgcggctcagaatggtggtattgctgaactgaggaggcggagtggaggtttccggctgctgaaacagctagaatctacaatccaggttattggaggggaagtacgcttgagtgtcaggagagctatacaggaatttttataccacagccatttgcaatagcgaaaaccctggaagcaacctaaatgcccattgacaggagaaaggatgaattgtgatataatcacacaatggaatattacagagatgaatatgaataaactagttgttataaacaagttttaggtgtacaggattgaatgaaaaaggcacttcccaaaacactttattcagcactttttatcaatctcaaaagtgactaaaagtaaacatacagtatgttaatacatttatacatgataggttaaataacttgtccaagttcacaaatttagtactggggtcaaggacataatcaagtccagtactcaatatccctctaactctgtgggatgaatatttatttggtgccaggaaaaactctcctaaagaatgtatgttttccacataacttctttaattttcctctctacctagactatcaagaacctcagggctggaacagtggctcacacctgtaatcgcagcactttgggaggccaaggggagaggactgcttgagtccaggagtttaagacctgcctgggcaacatagccatgtgtggtggcacacatctgtggtcccagctgcttgagaggctgaggcagaagaatcgcttgagtctggaaggtgaaggctgcagtgagctagaactttatctaatactccatcgtagtatctgtattaacccatgtatatcggcatatatacttttagctaatatttatcgagcatttactatttcttgccaccaggataagtgtcttaaatgtattactttacttaatcctcaaaaacattcaaattttacagatgaggaaaccgaaatgttacatgagttgtctgatgttacaaaaccagtaagaaaaacagagccctattcaaatccgtgattcactaccttgcttttaatttctttcataaccttgtttttttctttgtatattttgttcttgtttttctttgtataagccattaatattttttggaaaaaatttggagaatcaaagaattacacaaatatgaatggattatggtattttactatctcttatctgcccgaggacaatgtccaagttgattgtcctgcttttctaatgaaagactagatgatataaaggccatttccagttccaaaatttagtgctacataatgctgaaaagttatttttctttccttttaatgcgacagtctattgcactcctgagttactattctatagatgtggtaacacctaggatgaggatcaccagaagtctgcactgttaactcttgaagaataaaggcccaggagcacaatgaagttcaattgaaacatttttatttacctttgctgcagggtaagttgagtttccaatcagggcaagaagggtttctgacctataaaaacaatggttagctgtaaggcatatataaacttttattaaccttggacctgactcaagtaaaaattattacacttatatttactatttaatttatagaagtggcaaactggtgacctttgggcagaatcttacctatagacatgttttgaccccaaaattggaattcattgccaatactgtatttaaaattcagaattcacgagttctagttccacttgaaaatttgagagatctgggaatcctatattcacatttccatctagcaacaggactgagctaaacagtggctatcccctttaacctgggtatttgtatatttacaaacatgcttagaacactgtttcttgcattagagacaaagcagtatacaaaagtgaaaattttactgccctcacagagcttactttcaaaatgttcttcacttcaccacatccagtccttttccctggctagtctctataggtcttggcatttcctaatgtcaataaatactctgcctttctctaaaactgtcagtctccaacaggaatctcatgaagaactaatccaaacatggtgaggtatgaaatttcatttttaaaggactagatcttacacagtggcatagcagctcctttagctttcttgattttattccccaagaaataaaatcattactgctttgtaaagcatttttagtgatatatttagtaataaaaagccaggtttaagataatgctatttttctactatgtaagacaaccttatgatttacagtaagtgaaactggtaaaaggtaaaatacaaaaaaagcatactttcctctattgatcaagtttgcagtgagtgctttgtttgatatataagagaatttaggaaattctaacccagtgccctgcttttatagattaaaagaccaaaagtagtggctgacatcgggaaggaaacgtgagcccctacctcagtccttgcaccaaaattaattccagaaggatcaaagatgtaatcaaaaatttaaaaaaagaaaccaaaggataattatttttatagtcttttatgatctttgagtgggaaggacctcactagaaaagttttagtgaaagaattgctaaatttgcctacataaagaaatctctgcatgaaaaaagcatcataaagtcaaaagggtcattttccttaatatatagtattcccaaaaactattaataaaaagaccagtgagaaaagaccacaggaaagaatacaaatggcttttttttttttttttttttttttgagacagagtcttgctcttgtcacccaggctggagtgtagtggcgtgatctctactcactgcaaacctctgcctcccgggttcaagcgattctcctgcctcagcctcccaagtggctgggattacaggtgcccatcaccacacccggctaatgtttttgtatttttagtagagacagggtttcaccatgttggccaggctggttttgaactcctgacctcaagtgatccgcctgcttcggcctcctaaagtgctgggattacaggcatgagccactgcactcagccccacaaatggctgttaaacataaaaaaaaaatgaaactcataatagaaaacattttatctatatcagaataacaaagactaagaagtttgagaactattatgttgctgagatgaggaaacaggcactccaaaacatttcattgctatggagtgtccactccatagcgtagtacaacttctattgttgagaagcagttttgtttagcaggctccattaacagcaccagagcagtttctggcatatattaagcacaggttttagctagtatagttagcacatttttaaatgtgcatgtcttttggcccacctacttcacttgtaggtcttttttcacatgtgacatcaaatggtttcgtttttttcagaccaagtcttggtctgttgcccaggctggagtgcgatggcatgatcacagctcattatagcctagacatcccaggctcaagtgatccacctcagcctcctaaatagccaggaccacaggcatgcaccaccatgcccggctaatttttgtatttttggtagaaacaaggtctatgttgactagactagtctcaaactcctgggctcaagtgagcctcccacctcacactcccaaagtgctgggattataggcgtgagccaccatacccagcaagtgttctctaactaaaaatagaaaaaattagccaggcttggtggtgggcgcctgtagtcccagatacttgggaggctgtagcaggagaatggcgtgaacccgggaggcggagcttgcagtgagccgagatgtgccactgcactccagcctgggtgacagagcgaaactccgtctgaaaaaaaaaagaaaatatgtatataaaacaaaaacaaaacaaaacccataattatcctattatccttagggaactggttaaattatgatctattcaatgggataccatacagatagctatttaaaggaaaatggcagctctgttgctctggggtactgaaaacaatctccaaaataatgagatgaatacacttgtatataggaagcttctatgtaacactgtaacatatacacacatatatattttttacacctatgtctttcttaaaggatagattattgcattgttggtgttgcctcctgggacagggtagcagaatcaagaaagagtataaactattacatatccttttacattctgaactattaagatatgatctatttttaaaaagaaaacaggtttcacaaacacacttccaagtagtggctggtgtgagatctaattcttgccctcattttagttctttccaatatgttcactccttgaagtcacctggtcttgattattgagaatttggggaattttgatccacacttacaagaatatcaaacatgagccaggaaggatccatctcaaatcctgagttcattctggaggaactcttgattaaaagaatagttcttagcttagaaacttaaaagtatattttatggaaaagataatgaaagaagtcacagactcccaaaaagaaaggtgacaaggaacccaacaggtctgcctcttggatctaatttatttagaaattcttaaataaacaaacttacttactctatttcagttttagaaactcttattcgatatcctttatgcagtagttactactttaaaataacacttcgaccattaaaacactgtgaagtaggtaaagttcatactgctagcat

SEQ ID NO: 94154 - DNA, 129115 bp, Homo sapiens
  misc_feature (1)...(129115): n = A,T,C or G
aagtagctgggactacaggtgtgcaccactgccccagctactttttttgtattttgtgtagagatggagtttcactatgttgcccaggttagtcttgagctcgcaggctcaagcgatccaccctcctcggcctcccaaagtgctaggattacaggcgtgaaccactgcgcccggcctttgttttttgttttaagagacagggtctcgctctgtcacccaggctggagtccagtggtgtgaccatagctcactgtaatgtcaaactcctgggctcacatgatccgcctacctcagcctcctgagtagctggggctacagatgcatgccaccatgcctgcctatctttcttttaattttttgtagagacggagcctcaccatgttgtccaagctggtctcaaactcctggcctcaagtgatcctcctgccttggcctttcaaagtgctggattacaggcgtgaaccaccgcacctggcaaaaatttccagtcctgatagattagagcctaccccaaagacctccttttgacttaaccatctatttaaagatcacacctctaaatgcagtcccattctgaggtactgggggttaggagttcaacacatggatttggggggcaaaattcagctcataacggagtggatggggggaggaagtttagacagagaggctcgggaaggcctcactaagaagctgttttttgatggttgtgaaggaggtaagagaagtagcgtcgggcctctggggcagctgccttccacatgcagaagccctgtgtgggggctcacctggtgcaccagcatgaggaccacggcgagcctggctggacaaggcagagagcagccacatatgggacgggagaccggccagaccacagagcgcctggacttcagcctccacagagtgagctgtgcagattgacggtgtcagcagggccactctggctgccagcgaggttggggagaagaagggtgactagatccaagctaaagatgccagaccaggtggggacagtgggtgtctgccctgacctcaaactgtaggtcctggagggagcatctattcccccagtgctgcgagtgttgctcccggctggggtgccctgcccaggtcgcccctcttcagaagccaggaccgccggatgcactcaggcaactcgactcctcatcctccccctccccgtccatctttctccccagcacagaccccgcaggcacatcccctgctcagagtccctgccacagggaaccaaacctgaaacagtgagccagtgaaccgtgctccgagcctggatatgattttcagttagaactggcaggcttgaggctttctcctcgttttgcagaggaaccagagagccggtcagccaaggctacctccagtacttcagtccaccctgggtttaggcccagaggatcttgactatgacttctagattgygtgcaccgtggccagcgtcctgggcctttcccactctcgctaactcccattcccaccctcgtgtcctcatggggagctcaccaagggccagttcttgggaggatggcgcctcctcctccagcttgcccacagccctgtcccactgcctgctcccttctgcctccatacctgtcctcccaacctcctctccctccctctgaagatcctgccacctccttttcaggggacttcctttctcccctctagagacaggtgcctctctgtgctggggagtgagctctcctgctctgctctttgctatttgccttccaccatgtgcaggtctggccagtcctcgagggtctctgctatcccgtctgccccccattctgttcatcttgtgtttctcccagcctggcttccagagccagcagactacactcacagcgccatttcttccttatttctttgcaagctggcttttttgcccagccctctagtgaagctgccccctcaaaggtccccgttaccttctcaccaaaccaagtttcttttctgagtcctgattcttggataccttcctgaggtttttaaaccagtcacctctcagggcttttgcatgtgggaggctgtagccccagatgcctgatggctgtttctcttacctccttccggtctgttaaaaaatgcctccttttctgagagggaggagccctcaggaatggtttagcgccatcctctagacgatgagttttcactcagttcatgtgagatccagagctgtccaggtcacgcccttggcccctctgctttctcggggtacttcttgatcgtcttttcctcctgcccctgccttctacccctgtctgtctccactcccctttgatcgctgccatactcatttctggcccctcatctgtaggcatttcccactggacgacctgcccacccggtctctgtctccaattaaactcgcctcctcctcactctgggatggtatcgctgctgtcccattctcaaaatgccagggtcctgtctgacttcccactttcctttgtgcagctcatatcatacaatcaggcaccaaatacagatttgtatttcctttaaacctctcctgtcttactcggctcgggctctgataggggttagatgtctgtccactccaaatctcctgttgaaatgtaatccccagtgctggaggtggggcctggtgggaggattgcatcatgagggtggacctctcatgaatggtttagtaccatcttcttgatgataagtgagttcttgctcagttagttcacgggagatctgagtgtttgaaagagtgcggcacctccccccagctctcctgctctaatctcaccacgtgacatgctggttcctggttgccttccaccatgactgtaagcctcctgaggcctccccagaagcagacgccagcaccatgcttcctgtacagcctgtggaagcgtgagccaatgacatctattttctttataaatacccagtctcaggtattcctttatagtaacacaaatagactaataatacaggcttccgcaataaaataccacaggccagtggcttaaacaatagaaatttatttctcagttctagaagctagaaattctgagatcaaggtgccagctgatgtggctcttgctgagggccgtcttcctggccggcagatgctcaggcccttccctctgtgtctcttctttttttttttttttgtttttccttctttgagacagagtcgtgctctattgcccaggctggagtacagtggctccatctctgctcactgcaacctctgcctcccgggttcaagtgattctcctgcctcagtctcccgagtagctgggattacaggcacacaccaccacatccagtgaatttttttgtatttttagtagagatggggttttgccatgttggccagggtggtctcaaactcctgatctcaagtgattcacccaccttggcttcccaaagtgctgggattacaggcatgagccaccgcgcctggcctgtctcttcttctaaggacactaatcctatcattcttattgagagggccccactggcatgacgtcatctgaccctaacgagctcctaaaggttccatctctaaaaaccattccactgggggtcagggcttcaacatatggatttggtagggcaacagggggtggggatagggtggctcaaacgttcagtgcatgtctcccctacttcccctctttgtttcctctgataacctgttggggttcctgactccctcacccacaccacgctgagctacatttcctgctgtggcttactctggggctggtggagttggcttttgcttccttccccatctcctccccttcccaattccctaccctccaggcattatacatctcagagaggggaagcgcccaactctcctgccgcagatgggcccacccctttgcccaaacgccgctgggggtttaggtgtctgagccaaccttttccttgaaggcctcaaggtcagttgctccatctgcgaaaggtgcctgtgcctgggtacccttggtctatcaagccagtgcgcatgtgaggaagctgctccctctgccacccaggtgggctgtcccacctgaaaccagacagcagaggccccaaaacccagcaggctcttggctcacccagccatttctcagagacggaggaacagccactgtagttccttgagtctgagacgtgcattttaacattgtctaaatcagggcagagatgactattggtggcatgttctagtttaattggaagtttttttttttttctcagtggtacataaaatagtggttcattttacagttgatggtgacttggattctataagctgtgaggctcaactgctggtcctgactgcaggaaaatttctaaaataggtatggcatgccactgtgcaggactttagactatatgatgctagttaggaaagaggagagagagataaatggaagactgggtcccctccctaaggccttaccactcaatttgcaaaacagggctaagagaaaacataaaaacacttctcaagcaacatatgagtaggtgagaactgaagtctgtaaatctgggtgttatataagcactattatctgggacctcagcattccaggaaagcttcctggaagaagtgagtttcaggtcaaaaagtgggccaaaggctgatctgcctcactgaatgggcacactgttttcatgaggtagtaatgtttccatctacacagaaagaagctgctcggacagctgatgagcatcatgcctgggatattgagcacatcatgcttgacctgggcagagtttgtgggcaaggaaaggggctaagggtcaagataatctctgctggggttgttcaaatttattacccaaccatcacctgagaggttgtcccctgaggatggcttgtctggtcattactgaatgtctgcaggggcatggcagtgttctgcttggctctgggggctctgccctttctaggacaagtcccagagacaaacagcttggcccagtacagcagaatggggtgagagaggaactgagttcgtttgcgggcaggatggaaacagctgatggaggcttctcgggccatcctcacgtacccatcacaagcgaagggaattaagccgccaaaccaccccaaagagtgactccaactcagccctaaacacccatacccaccccacctcccctgcagctctgacaggccaagcctgggcgctagaaccccgcgccagaaggccgggccacacactccagcgtacacgcgcggacacgtgccggtgtccagagccggtgggagaggcgctgtcaccatctgacaggagaggaaggtggagcgcagagaagtcagggtcacgtggtaagtgggggtcgtggtctggggatcacggctccaggtctcttcgcgacaacgcaccgttgacccccaacacctctccctggcggggtcggtgaccgcaacagcctccgggatagaacgctagtgaaaggtaacctttctccagcccgctccacgcgctccgcacccgctaagcgcctccgcgaattaactcaggcctccgcgccgaagtaggcgcagttatgaccccgcttccccgcagggagaccgaggcacgcagggtcgaaaggactcgtccagggtcgcaggagccgaccacacagggaggcgcagcgcccccggcgggaacagtcagcgggtccagcctggcggactcccgggccgggctgcccatataaggctgcgggcggccggcatcgcagccaggctcccggggtcgccccgcgcggggcatcctcctccgcagcgaggaatgcgtggcatccgggaggctcttccgctccacgcccgcctgcggggagcctcagccccggggcgcggcctcgcgcagctgcctggccgctggggggagcgcggggccgggcgggaggcggcggcgcgccctcacctgccccaggctggggaggcgcgagtggggaggaggaggaaggggaggaggccggggaggagcctggcgcggcgggagcggcggcgcaaagtgaaactctggcaagttgcgggcgcgcggggagctgtcgcgggcagcgcgccctcgggaggacgtggccccggcccccgcccgcagtgggcccgaccctcatggccctgagcaaagggctgcggctgctggggcgcctgggggccgagggggactgtagcgtgctgctggaggcgcgcggccgcgacgactgcctgctgttcgaggccggcacggtggccacgctgggtgagtccgggccgggggcagcgacgcccggaggagagggcgcccgcattcgcccagcctcgggaagacgggtacccccccttcccgaggggatcgggcggcgctgggactgccggggcgtaggggtcgcgcgcagaggggtggctgtttgaatgaagtggggctggggactcgagagagcactctggctgggccggtggcgcacggaggccggccgcccctccacggggatctccggcccgcgccgccagaggatatggttgctggatagccggctggggcgctttgcgtattcatgaggatcccggggtgttgacttagccggcctgaccctgtgcctggcgccttttcttttgcacctgttgatgaaaccagtgattgccctttggtttgtgttggcggctccactcctggaggggatggggacaaaagccccaaaacataggctctggagaaaccgctgatggcagctttgtcccacgtaaatacttggtcgagaagcatcggtgctgcaatttatagaacttgtaaacaaatataccatgacctttatgctgtcttagatcctgccaagccagcgaatttcacctatggacttcagaagccttgaaactggcattgtgctatgggctttagtacgtgatctcacttaattctcacaattctactaaaaagctattattatccccattttgcagatgagcaaactgaggcctaaagaggctaagttgcttgccaaggtgacaccatccacctgacttttatgtggctgtttctgtaatgtcattcaatgcgtggcttcctggtatcgctaacctgggtcccttgttttgtgctaaccattataaggaaaacctgggtagcaccaaagcacgtgaaaccaggtctgattgttagacttctaaatgtggacacccgagagtaagctcccaccactaggcgtccagctgtaacagcttgccggtattcctagctaaacaaggtgcagcccggggtcactcgtacttgaggtggtcggcaaatgcagcaggctgctttgtagatgcctctagccttcttttcacatttgtatgcatcgactmccgttcggatgtatgtcttggaaggactatctctcctatttctgattccctaatcatttcattaacatgcatttatccagcttgttctcagtcacttgattactgaaacaatgtctccagtagtctcagcatcaaaagtaggcagtgaattgtagattaagttattttcagattattctaatttgtgctgtcctgaagagtctaagtttggttatttggtgtggccttgaaagaaaaccacagaaatttccattccattttagatgtctacttcataccacatttatcggaagcgaaagagtaatttcatggtacaaaactactgtttcatcaaatagattaagatgtccttcagttggattacggcaacattaagccaagttcatacacattcaagaattctttgaagcagcttagaaaaaagagattttattttttcaaaagtgaagatttaaaaatgattaatgacagtaatgtagtgcatattttccattaggagctgaagtttgggctgagatttacatcacggtggtgattacagtataccagattttagaacagagaatgtaagaaaggaattggctcgtcttcaactcatgtgcagtccacatttgtcatttaacctagcattcatttttcagtagaaaactttaaaaaaaaattttttttttttttgaaacagaggcttcttctgttgcctaggctggcatgcagtggcacagtcacagcccactgcagcctcaacttcccaggctcaagcgatcctcctgcctcagcctcctgagtagctgggactataggcacatgccaccatgcctggctaattttttctctttcttttcttttctttaaatggggtcttactatgttgcccatgctgttctcgaactcctgggctcaggtgatctttccgccttggtctcccaaagcgttgggattacaggcatgaactacttactgcgtctggcctgaaaacttaattttttaaagtctgttttgtttaagtaaaatgaaactatttttaaaaagcagctgtagcatttggtggctttgctggtccagagaatgtttgtaggagagagccttatgttactagaaagttgtttmaaactttcaacatatcctaaatgcatcactattggataaaatggctctgaacttgaaattcccatctgtgttccaaagtgctagctagctgttttactttcctttcttggagaaagtgattattttttttcttttttttgagatggagcttcactcttgttgcctgggctgagtgaagtggtgcgatctcggctgactgcaacaccgccacccccacctgggttcaagtgattctcctgcctcagcctccccagtagctaggattacaggcacacgccaccatgcctggctaatttttgtatttttagtagagacggggttgtgccattttggccaggctggtttctaactcctgaccttaggtgatccacctgctttggcctcccaaagtgctaggattacaggcgtgagccaccatgcctgacccgagaaggtgaatttttacaagaaggctgcaatctctacttttgtatgggacaggacacttgtggcagctggcgtagctggtggtctaatcttgacctttcaccctttccttgaagttccgagtcgggggtagcttccttttctcttcagctgtggttttcctgtgatgggtccctcccagttagtaatgagaggctgagagacaagttgtggtaactgcttcgtgggtagtggtctttcccggcccctgagtcattctaacttccatcctgctccgctgcggatgcacatagctgctttcctaggggcgagaggagatgaggggactgggcctgatgaccacaggcgctgccccttcatagcacattttattcctgaaggatcctaactggaaaagtacctctcgccraaggggctgggtggttccttatcattttcaggcaaggcctggagacaggggcttgaactgggctgtgatttttaggaaaaacggatggtccatgattcgttgattgctggactccttccatctgaacctgtcttcacctgtcttcacctgtcctgctctaaagtgaactcttcacactagggccgtctggcctgctagcaggattgttgaaggaattattccaaattcctgcttctaaaagaattaggttgtgaatctgaatctgtcttttatgtagatcagtgggagcaaaaattccagaggcagaaaagccaaatgtattggcactgatttaaaaggcttttatgaagtctygggaacctgactggagggtagttggccttctcagcacaggtgggaagccccgtagccggtaccagcatccctggccaacaatccacaattagcaaacagatgttcccttatttgcacatgggacaaaaacctactcctgtctctgtctcttgtaaacttagggaaaagtgcttattgttaatggattttgtgtattttcagagtaagcgacagtgttccaaagttcaaggttctccaacagcccccaggaacggtggcctgagggtgtccctgtgtttacagtgcgggctgtgtgtgagtgaagtcgtgcctcctgccgcccagccgggctttgctgtgaacaggcagcagggagggagggatggggcaggagacttgagagaattaattaagttaattaatgggtgtccctaaattactttgagcttctggggggaaaggttctgtgtaaacaccaggcccccaggttctcccagctgctgttgtgcgaggccacgtctcgagtttagctttgtttgaattggtgagatggccccagggcagagcaggactcagtctgaactgttgcctagatcactttctcaggcattatggccagatttatttggtcacggactggaattttgatctgctagagaggaccacagagaatcaaataagtcaccattttataaatgctcctggacaaagttgaaaccacaggtaggaccaggcaagggttccggggcccctgacgtgggaaactagagcagcgacccgggaccacagtggtctgtctgcctccaggactggtttgcctcctctcctagccggaggctgtctcagcgtagtgtttacaaaatgcaaactgggatggtgtgtgcttctcccgcgggttttgtttgtttgtttgagacggagtctctttgcccagctggagtacaatggcgcaatcttggctcactgcaacccccacctcccaggttcaagggattctcctgcctcagcctcctgagtagctgggactacaggcatgcaccaccacgcccggctaatatttgtatttttagtagagaaagggtttcaccatgttggtcaggctggtctcaaactcctggccccaaatgatccgcccacctcagcctctcaaagtgctggggttacaggcaatgagccaccacgcccggccttccccgtgatttttgtagctcacctgtaagatcgtgatttcaaatcttaccaggctcttgttttggctgtgtggctcaaaaacttggcttttagcctttaattgtgaaaacgttcaaacacaaaagtagagggaaaaatgaatcccctgtctacctgccattcggcattgatagttatcaatatattgccatttttatttcacttgtccctgtattttttatgaaaacgtgaatctcctaaaatttagtttgtttaaagccaggcaagattctaatttgttgggttggcttttttttttttcttgcatttagatatagaagttcaatttttttattttattgtaaattgacaaattattatcgttttttgagatggagtcttgctctgtcgcccagctgggagtgctgtggcacaatcttggctcactgcaacctcttcctcccaggttcaagtgattctctggccttagccttccgagtagctgggactataggcgtgtgctaccatgcccggctaatttttgtatttttagtagagatggcatttcaccatgttggccaggctggtatcgaactcctgacctcaggtgatccacccgcttcggcctcccaaagtgctgggattataggcgtgagccactgtgctaggccaacagattaggatgattatatattatggggtacaaagtgatcatatatgtgtacaatgtggaatgattaaatcaagatgattaacgtagtcatcacctcaaatacttctttgtttatttatttatcttttttgaggtggagtcttgctctctcacccaggctggagtgcagtggcaccgatctcggctcactgtaacctccgcctcccaggttcaagcgattctcctgcctcagcctcctgagtagctgggactacaggcgcgtgccatcacgtccggctaatttttgtatttttagtagagatggggtttcgccgtgttggccaagctggtctcgaactcccgacttcaagtgatccgcccgcctcggcctcccaaagttctgggattacagacatgagccactgcacctgaccacttattgtttgtagggagaacatttgaaatttactctcctagtgatttcaaaatatacattattattaactatagttaccatgctatgcaagttcgaaatttacttggcagatttcgtgtggccagcagcagaaatggtggcatgaactgattctgagacattggccaagacacatttttaaaagcaaagtgaccacttgggaagggtcgaccacagcctggaagaacagggagcgctctgctggtgagctcgggaggacaaggtctgggccctttgacggcactgcctctagccccgggcaagagagggccgagggccatgtccagtggcctctatgctcccctttctggatgacattcctgctgctcaagaccctggagtgtgctaagcacatagtgcagcctgctcagccccctcccagggcctcaggcagactgtgcagccgtatgtccaccccaggcccgggcgttggggtggcaagggcatgttacaggtggaacgggacacacactagctgggactctgtgtgtgtatgcacgaggctccctgcaggggggcatgaagcccaggttgggggaagtcggggaagagaaggtggccaggctggggccgccctccccactggctacataatgaacctggccttccaggtagtcacggtggcatacttttcgaggtaggaggatagaacctattttatttaactgttttactttgttagcttgatttaaaactgaacagctgggcatacaggatgcagcactcatgagtactctggccccagaccctacagatattcaggcagacctgtcctgggcacctgtcccagcccgtgtctctctgctgtgtctctcttctggagcgttcctggggtgctcagggtcccctttgtgctttttggctgctcagtttctgttgctgggctccttcggccttcccactgaggatggggaatatattctgttttctttccacttgaattgtccttaaagccatgggtaaactggttcaggctcagacttgggaatttgatcggagtccctttagcatttctgggcagggcttgttggtgtcgtggccagctgtcctcgaggtgaaaaccaaattgggttgggagggtgcacatgacacttaaagcccccagagctgcggtgccatcaaccacacactgtggacaggaggctgtcagtgggcaggctgggtccaccttcaaagtccatacgaaacagcccagttcagggtactgcttcttttcgagatctcacgggcaggagccttctggcactgttcatgtaaatgtaagtcattctttctttctggaggaaaatttagacaggtgaatgaaaaccggagtgcttaatccgctattctacatgcagaagtttatctcaggaaacagtcccagatcactagcccattttgcttcaaggatgtttattgcaagctgttttgagtttttcactggttaaataaactttggttcaacttgatcataatagctgacatttgtggagtgtttaccacctaccaggtgctgatccaagtggcttacatttattaacttacttcatccttatgtcaaggcaagtactagtaatctccattttacacttggggaaactgaggcacaagaggcctaagaacttgcctgaggctccacctccagtggaaggctccagagaacaatatgttcagtaaaatctcattcttatgtaaaaaaatgaatatatatatatatatatatatatatatatatatatatatatggaaaaagactccctttgtcctgttgtctctggcttatcttggttttcatctgacatacacttttgatcgaggaggttcccacttggggaaacagccagcccctttctgagcagagggtgtggcactacaaaggcgaaacatgatctctgggagaaacatgcttgaagcccacgctcctgggggcagagctgagcctccacacggatgtccccagcactgggagcagaggctgatgcggccccaaggtgctgaggaaagcgccccccagtgcaaaggatgctwcaaggccccaggcttctcaaggaacatgaggcctggcaaacccagaacgttagactgggtcggctccaagatgcccctgggtttgagctggagaagtgtctgcgggagggtgctggggctcctgcagagcgtgtcttcctgaccctgtgggcttttctggggggggctaggaggctctgccaagttggtggatggaactgtgccttgccctggggggcactgggcaggagccagcctcggagcgtgagtctggtgctgcgccaggaggctagatgccccggccaggtcctgtgggctgcgccgtctgtgcccttggcccgcgaggctggcaggctgccactgcttgtaaagcctcctggttgaaaaggtgactcggagcagcggattcactgggagcctgtcagccacagaggcagcttgtgcttgtgccccaggcccaggccgcaggaggtgggatcaagttccacggctccagtgtgaaggtctgagcttcattctaaggcaggtttttgaggacatggggctctcgggcacctggttgtattcctgcatcctgcattcctgcccactctctcatgcctycttctccttctccttggcgtgccccaagccagccttccatctcagatggagttgtatgtttctagtgagcccacacaccccctgaggacagggcctcacccccgcacgcctgcttcttcatcacagctgctaggaaatgaagatgcatgtccccaggggcctttgaagtaggatgtggtctccctgagcagaactctgactctaaattctctcctggctctggcgttggtgtgggacttgggttgcgggagggggcaggttgttagcggctgctgctcagrcccagcggaggaccgggctgctccaggctcccggcaagatgtagcaaaatggccaaatttaaggtgagcacgggctcccgtgcagtttctcacccctgctgctggctgcctgtctgtgaatgctaaggcgaggggtggttctacattgacttcttactgactggtgggagtaacccggaagaggcaaatgacttccttccctttcctcggctctgaacctagaatgttccagtgataccacctccaaactcttcacctgtgtcctttcccacctctctgccctgaggacagggaactaagtggctgctcacggtgggtaaaactgaggcttacaagacatccttgggcaatgggacagccagaccccagccctcagcacctgcctctcccatcccaagccccagtctctttttcagctgcaaagtcaatacctttgctttcagagagggagcatgtgccacgccaggagaggctttgggtgtatcacagatggagactgcctagcttaactgcgcagtctgaatgattctaaggaggggragagagaacgcctctggagcctggcacacacatttgccggagaaagtggtgagtgcgttgtgaccaggtgagggacgaaccttaaggagattggctgagaacacctcccctcctcaccctaagtcaacaaacccgggacagcagtgcttccaaaaccttacttgttcacctcacctggagattcttgtggcaaatcgggttctgcctcgttggctctggggtgggccttgagagcctgccgttctaacaagctcccaggtgatgctgatccacgaccagctttgagtaccaggatctcgcatcagcttgggagrgaggagacctgaatcctagccctggctccttaggctcttctttccagtggggrartttagttaatygctccgggccccaatatcttaatctgaaaacaaatgaatgacaacctagttgcctttcctactctgagattccatgcgtcttaaaagaaaaaagttttaaaactaaacatgtcacygtcaccatcgctacttcacacacctaaagttataaaccactcagaaatgcaaatcttaggagatgtgatctggcaaggcaaaatcgaagatggctttgaggtctcagctaaacctagaaatctgatgctctgcattttttatgggatgcttrtgaattaatgaaaatacatgagattatctctccttgagtctaccctttcctacaaccagcaaaaacttataaaaagcaattgaagcttactttgggaatgccaagggattgattaaaatatcatggactgtgctgattccatggctggtttagcagattcttgttaaaagccatgactttttaaaatttttatttttttgtgggtacatagtaggtatatatatttatgggatacatgagatattttgatacaggcatgtaatatgtaataaccacatcatggaaaatggggcatccatcccctcacacatttatcttttgtgttacaaaccaattatactcttttagttattttaaaatgtacagttaaattatatagtcaccatgttgtgctatcaagtaccagttcttattcattccttttatttttatttgttttactcattaaccatccccacctcctccctagacccccgccgctacccttcctagcctctggtaaccatccttctattctctatgtccatgaattcaattttgatttttagatcccacaaataagtgagaatatgcaatgtttgtctttctgtgcctggcttgtttcttttttttttttttttttttttccttttttttgagacagagtcttgctctgtcacacaggctatagtgcagtggtgcgatctcggctcactgcaacctccgccttctgggttcaacctcccaagtagctgggattacaggcacccaccaccacacccagctaatttttgtatttttagyagagacagggtttcaccatgttgtccaggctggtctcgaactcctgacctctggtgatccacccgcctcggcctcccaaagtgctgggattacaggtgtgagcaggtgtgagcaactgcactcggctggctggcttgtttcacttaacataatgacctccagttccatccatgttgttgcagataacaggatctcattcttttttatggataaatagtactccactgtgtatatgtaccacattttctttatccattcatctgttgrtggacactgaagttgcttccaaatcttggctattgtgaacagtgctgcaactaacatgggagtgcagacatctgtttgatatactgatttcctttcttttgggtagatacccagcagtgggattgctggatcatatgatagctctacttttagttttttgaggaacctccaaactgttctccatagtggttgtacgcatatagtacatatagtacataacatatataacatatgtatactacataacgtatatatagtatataacatatatagtggttgtactaatttacattcccaccaactgtgtacaagggtttccttttctccacatccttgccagcatttgttattgcctgacttttggatgtaagccattgtaattggggtaagatgatctctcagtgtagttttgatttgcctttttctgacgatcagtgatgttgggcaccttttcatatgcctgtttaccatttgtatttcttcttttgagaaatgtacattcaaatcttttgctcattttttggatcggattattagatttttttcctgtagaattgtttgagctccttatatattctggttattagtcccttgtcagatgagtagtttgcaaatatttcctcccattctgtgggctgtctcttcactttgttgattgtttcctttgctgtgcaaaagctttttaacttaatatgatctcttttgttcatttttgctttggttgcctgtgcttgtggggtattgctcaatacatttttgcccaggtcaatgtcctggaggtctttcccaatgttttactgtagtagcttcatagtttgagggccatggcattcttaaaaacataactttcattcttgcatagcttttttttttttttttttttttttaagtaacctggactgtcatttggctagggaggcgggagtttgtgtgtctggaaatgtgtgggtttttttttttttttttttttttttttttttttttgggacggagtctcgctctgtctcccaggctagagggcagtgcagctacctcggctcactgcaagctccgcctccctggttcacaccattctcctgcctcagcctcccgagtagctgggactacaggcgcccgccaccacccctggctaattttttgtattttttagtagagacggggtttcaccatgttagtcaggatggtctcgatctcctgacctcttgatccacctgcctcggacttcaaaagtgctgggattacattacaggtgtgagccaccacacccagccagtgtgtggtcttttttatctgtctgtttaaactgtctgttttatatgttgcatgaaccccgctttaccatgaatcttatcaatgactgataaatattgtctattggaaacattctctttaagaggaggtgaccgttctctgcagctcctgctgattcagcaaagctgaggtcaggtggagccagctgggcagagatgagtgattagaaggctgtcattggcagtgacagtccacgtgctccagggcagaacagtgacactggctgtcacagtctgtttcaacaatggaggttgtttgtttttatttaaatgatgtgaataaagaaaggaatctttgaaaactaaggctggagctgcccaggcctgagccaggcccttgtaacaaggcccttctgggtgggggatctacctctcttttcacctggaccacctggcggtgggtggcgagctcagaaccacagctgggtggaaaatgggagggccagcagcgagctgcaggaatggaattccatgatggcatctcatgtctccagagtggacagacagaagcttgtgttttcatttcaaagggcatctgccacgccctccaggcagaccacataaatggcatttttgggtgaggcctgagggattctgtctggtggtatacactgattttaaccagaagcaatagatttgggctctttttgacaggggaagatagatgagagatgatttccatgaggatgttgaaaatattggcaattctgaagaccccagggagtcccagggggttcctggccaggagcgcccctccattgccctgcaccaccttgctttccaggctgtggctctgtgtgtctgaatctacggcatgggggcacttccttctaattcacagaagaagctatatgggccccagactgcccatcctgctaaaactggcaaaggccttttcccagcctgagcagtagtgattcagccaactgcagaagtggtatttggagctcacccttaaaacataaagcaagttatgttcagactatatacaggcaatgagaaaatatgatgaaatatgactgcgtatgaatagccccagacttctagggcctttgagtgtgtctgtcttgggcaacatcttctccttttagatttcaggctcagtttactgtcaggaaaattaagttgctgagagcgtctcagaattttggcttaaaagagaatatacacctggaacaaagacttgaggggtgctcctattaaaaaaaacaaacagtgtgtgagcttcaaaggagcaccttgaaactccagttccatcacatccactctgctgggccctcctagggcagctctctgtcttgtgcctgccttctcttctgaacactcctaaggtattttgagtgcggaggataggatcatacactcaggaaagccgagagctagatcctgaagcatctgtgcgggaaatgcccatctgtgcctgaaatgagcatctgcgagtgaagtgatcccatgtctgggatctgtttggcatgcgccaggagacagacggacacatgcatgcacacacacacacagcggggacggggagttggtgaaataagagtgggaaaatgttgacacctccgtgagccgggtgacaagctgcttggtggttcactagacagggagttataaattggccgcttttcaacatcgacagataaaaatcaatagccttcccataatgccatcattaatcaattagagtctgtaatgggaaaagcagatgccactcccccacagtttctgggaataaacaaagtgtataaggcctaaaagaagaaagctatagaacttgactgaagcccacatctgtggaaaggcatactatgttcttggagtgggaacatcaacactatagagatggcagttcctctccagttaatctggaagtgcaagtatcgatgagtaaatccaattaaattccaacaagagcctggtctaaaatgtaacaggctgattttacagtatcgctggactccccctacatccaaacttattcttaccttcattctcccattttggttaatggcagcaccatccaggcaactgctggtaataaaagcctgtgagtcattctgacgccccttccttcctcagcctcatccaacctaccagccagtagtgaatcccaccccaaaacagatggtgaatcccaccgagtcccccggtcatcgctgctacatcgagagtgcagccactgccccatgtgctttcctggtctgcttggcagcctttgaactagtctcctggctcttcccctgctccccgtatagggatctgcttgaagctcacacagccctgatcctctgcccctgcctctttctccaccctcatctcccaccatttcctgggctcactgcattcagcagcctgacttgttcctgctcagaatcttcacacccacctgcatgcactccctcccccaggtgatatggtttggatctatgtccccacccgaagtcatgttgaaatgtgatccccagtgctggagatggggcccagtgggaggtgattgggccatggtggtggtttctcatgaatggtcagcaccatcccccctggggttatcattgaaacagtgagttgccacaagatctgattgtttaaaagtgtgtggcacccaccccaccctcttggtcctgctcctgccatgtaagttgcctattcccactttgccttccaccatgagtaaaagctccccgaggcctcccaagaagcagatgctgccatgcttcccgtatagcctacagatccatgagccaattaaatctcttttctttataaattacccagtctcaggcatttctttatagcagtgcgagaacagactagtacaccaagggttggcctggctgctgctgcctccgtctccccacctaccccgcccccccccacccagcttcgtgactgcagtaagaccttcctgacctctgtggctggaataccctgcagcccccacacaccaactgtctctgccccatgcctggtttcctttcttcttggcgcttatcactgaaattaccttatgtgtgtgcttacgtgggtgtcttctgttgtccactgcaaaaatgcattgtgggttgaattgtgtgccccagaaaaatacattgctgtcctaacccgggataccttgcaatcttatttggaaatagggtctttgcagatgcaatgaagatgtaagttaagatgggatcrtactggtatagggtgggcctttaatccaatgtgactggcgtgcttataagaagaaaagggacacaggcagacgcacgcagaggggagaatgtcatgtgaaggcatacagggaagacagccatatgacaatggaggcagagatgggagtgacactgccgcaagacaaggaatgcctgggctaccggaagctgggaaaagcaagggaagatgctcctacccacgccttgatcttggatttctggcctccagaactgtgagacaataaatttgctgttgtttcaagccccccgttctgtggttctttgttacagcaacccaggcaactaatacaggggcattgtgtatctcgttcagtaccttaccttaacactgcctcgtgtggaaatgaggcttggcaaacackgttgaatgacgaagcattggcaaaaaaaatagccaagattttgaaaaggatccacaaaggcagactgatttaccaggtagcacaacatattataaagccctaaccatcgtggaggctgtcagcacaaatcaacacagtagagtggaaggctcagaacagacttgtgtgagcagtgttactttgtttcttataaaggtgatgacttcagtcggtcagagaaaggtaagggtggatactcagcacctgctgttggtgtggttgatcagtgcagtgcctaagaggcccctgctctattcaactggatattcacgcaggcattcttggccggtctgctcagagaggaataggctggaaaccttggctggccagcaggatgctgcctgctgctctgcttccaggggagcgaggggtcttcctggcagtttttgcaggtggctgcacacacaggtgtccttctggtcactagctcctcccccagctgaaagccctgggtccccaaggagccagaatcccttataaaattaccagccttacagagccctgggttcacacaggggacattccatgttacaagagttaccacacctaaggaagccccatgcctggcwtcttcaccgagtggttataattcacttatgggtcttccctgtccagaggcaatttgccaatcaaggtcatttttaccatgagcaatgttgtctagtaacagagttgacgttccatcttgattggggttcccagggaaccagagctagataattaaacattaaattctcatacagaagggaagaaagattttgctaagcctgtgaccaaaactatccatatggacactaagtgagagtcctatgttttatcatacattaaaataaatgcagaggtatttaagtgtaaaaaaacaactttcaaagtattagaaaatataggctatgctttcacagtgttacggcatggaaagatgttctaaggaaagcatyaaactcagaagtcataaaggaaataaacctgacagatatgggaaatatttttattgaagtgtaacatacatagagaaaaatgaacactcgaagcgttgagctccatgaatcttcacccggtgaacacacccacatagccagcacgcagatctggagagagaacgtttgcatcccaggcccctgcctcccattccccctgtgtccgaatgatagatttgactacataaaaatggaaaactccaatatatcaaaagacaccataaacgtagtgaaaagacaagcaacagcccagaaggaaagtttgtgcagccttttgtaacatagaaaaaggccaaagatggatgatcatagcatataaaagaactcctatagatcatgaagaaggaaggacaaatagttcaacagagaaattggcaaaggatataatgagcaattctccaaaggaaaaatacaaatggccaaaacaatggagccagtgtggccggctctgcccagcacggccatttgcacatggtcactgttgggtgggtgagggctgcttgccccgtctccagccccactctcttgccatctccccctgtgattcaggcatggagctcaggccccaggtggcaggcagcgcactctgctcagttaccccagctcctggcttcatggccatgccctggcacctgtctccctccccttagcctgctgacctttttcccatgggatgtttggttgtctctgtacaggctctgagccagccctatgggcttccagacaagcccagattgagcctgccctctagggagcacccctgtgtagcttccagctgagaccttgagacacaggcccagggagccaagctcagggctgcgaacatccaggtggggctcaggtgctagaggcggacaacagcctggtgcaggacccagagtggcaagaggtagtaagggggccatggtgttcagaaattggggcaggtggtgggtaaggcatcctgcttctaaaggccagggtttgggagggcaaggaagcccctggcaggagtcagggcaggcatcccgggcaggtagtgtttgttctgtgaagcaggcttccccaaggaggggccctagagcagaaagctgtgatgtgcaggtgactgggagacctgttctctttcgagccgtgcagctccggttagtggatgacagatttcaagccctgctcaggccagtgtttttcacacatgtttgacctttggttgacagcacacagcacaacagcttatggtccaggagtgcacctcggcatgcagtttgggaatcctggcgatgatgtgattaagattctggggccaggttctcaccaagccaaaaggctttttttttttttttttttttttttttttttttttttttgaggcaggagctaattctaggtacagaaaaccattggtaaagtggaggaagctgtttccagatccacggaatgacggtaactagcgtcacttgagaaggtttcttctgcccttttgtaaaaaatagcatgatgttttctcctagagacagacagggcctctgtacgtaagagcagacatgtatggagaaggccggagagtcacaaaccatatgtgcctgagatgtgccacctgtggggctgtgaataaggaagcagaatcagtgtgtttactcagagctggatttggctgtttgttccttcatctttcttggaccacatgtcctggtgttcagaggctcctgagagcctggggctcagtaggccgtctcatagcccctctaacccaggtgagaaaacaggtcccagtgggtccctaacccatgctcattttctcaccaaacaacaacaaataaatcagaaagtcctgaaaaatgaattctggcctgttttctggattctggattgaaatatggagtaggagctgacttttagtaagttgatcaactctccccgccgaccccctagccttctggaactgtcttcagtaaacacaacccccgccacccctgacctacccgcaccgcactgtggtcggcctcttctttgaacacttcccttacagcacgcactccccccaagctgggccttctcttgagaccactctgctgtccttgggagtgatggtggaggcggggtagacaccctgtccctgtctcgtggtgctcctttgggccacagctcctcttccctccgtaggaggaaccatctggaatccatcttcctccttgaccacacctctccattcattaaggagcagagttccctgctcactgggtctctctacccctcctctgtccctgtctgggtgaggtcacagagagcctcacccgcctgctctgttggcctctcacttgccgtcctctctgccccgttccctctcctgcacacctgtccgcggtatccccagctcttagtgactctagccctctcccgccctcctctgcaccctgcatgcacttgtgttgctgaatgtggccggagaaaaacacagccatcttgactgttctgtgagacttcatagatttccagggctgtgtggaatcaaaaaatcttcctgcatttccccagccatctggcctccaggatgactatttcacatctcctcaagcctttcacatctcatccccctcacacctgatgattttgcttcctatttcactgggaaaatgaaggtaactgagaactttcttttttttttttttttttttttgagatggagcctggctcttgttccccaggctggagtgcaatggcacgatctcggctcactgcaacctccacctcccgggttcaagcgatttctcctgcctcagcctcccaagtagctgggactacaggcgcccgccaccacgccyggctmattgtcttgtatttttagtagggacggggtttcatcatgttggccaggctggtctcgatcttctgacctcgtgagccgcccacctcggcctcccaaagtgctgggattacaggcatgagccaccgcgcccagccaaaggtagctaagaactttcaacagcccccacacctactccctggctctggtacagtggacagcctcccaggcttgtcccccctcccagtgaccttgacccctctcatcttttaagacctcgctcccgcagtttccccctttccttcctaactcggtcatttgcaccattataccaacaggctgtcttagctcacattaagaaaccctctcttgaccctggcctccacctcatctcttggttttcccatgtgacgaggttgtctacacaccttccctcttcccagtctcccttgaagtgactccagccaggctgtgtcctcccactcttctgaaacctttcctcaaggcctccaggaccttctggctgctcagtcttccatccaacagcatcccacagatgaagcattttcttcgcttggcttgtcttacgctctgttctcatcatattgcttcctcactgcctgtttttctccagagcctagaaccatgcctggcacacagtgggcatctagaccctttgctgagtggtgaaattgaagtgtgacagggtgcgtggcttccctgctcaggctccctcagttcccaaagctgtgctccttcctggatctcatgtagcacaaggaggcatacgtgggtcgcaccacatggcttctagaggagtatgtgtgaatgtgttcatgttcatgtggaaatagggaggcggccctgaggtgggaggagccttcccaagaggaatcacctgagagaggaagaagagctggggaggaactgaggaactggtttggcaggttcaggaagaagtgagtgaagaaactggaaaagtagccaggatcagaacctgcagccgcaggacctaatttgttaggacctaaattaggggtgattgtgcaaggcagtgcagcatggaagccccactccaggacttccctggtggctaggaaacattgctccacccctccctcttgtcaaaagagaaggtgcacacacttggagagaaatgggtatttttgtgcttctttcttgttccctgttgggtaggagggttggggctaccaggcccagtgaaaacacagcccagccctgcctgttctgcctcatcctgaagtgtaaggaactgcccattgtgctgggccctgtcactggctctgcccgaggcatatgtggcactgggcctggctttttaaggtgcaaactgttttcctggatttcttatttttaagggaaaaaactcaactacaaagactcagtggccagtcctgtgctcaagccctcttgttaggggagctggcctccctctttggccacagctcagtgcagggaggggtgtggaaagtgctgggaaagggggaggacccaccctccccacagatgggtttctggctctgactgcgggaaaccaaactttcttgtattttctctggctgggttgtgatgtgggcatggcgttggtgggaggtagtgcatttgctgagggtgatgtgttctgagtgtcccctcactccgtggctctttcatgtggcctggactttttggtgagggagcagcagtgggaggacaggagagtcctttagcgggctgatgtgtgtctgccagttggctttgtcttggctcgcagcttctgtttcagacagatgttttgatccccctttgcttagcaaccagctgcagccttgctctgtcttgggaaaaccactgtctttctgaagagctgcttcagctccaaaactgataactctggaaggagcagccaccagccagtcagaactgagctccgaattaacacatgaaggagactttggcctcttgagaccctgaaatacaagaagatggtttcatgtcatgtccaagaatgtggccacaaatgctacctcagtctcgggctgtctgcattgttaaatgacctcattatttttctgacctgtgggccgggcttcgttggcatttccttaaggcgtgttattgtggaaaatattattcaagaaagaagagcatgtggtttgcttggttactgagctggactggctctgggtgaccagagctctcacgcagagccgtgcacggctgctcccactgagaccagcctctgcctcgggatggtctgacccacggagctctgttttgggacccagaatccatgagccacatttgctgtgctgtgggacaaaccacagtttccttgggagcctctcaagtggtggctgtttctcttccacacccttggaccactggagctggagacggggagttccccagcctcctccaaggataagcctattccttaagcctccacaagccccatcattatttatttttatcataagccatgttgttcgagtagcatagacaactttctcaggttaccagggaaacaggactagaaagtcaacccacgatcaaattaccttgccgaaagggaaccagctcagttaacccttgaccccacacgccattgtcagaggcgtatgaaccagagcgactccatcttgaataggggctgggtmaaatggatctgagacctgctgggctgcattcccaggaggttaggcattcttagccacaggatgagataagaggtcagcacaagatacaggtcataaaggccttactgctaaaacaggttgtggtacagaagccggccaaaacccaccaaaaccaagatggcaatgaaagtgacgtctggccatactcactgctcattatatgctaattataatgtattagcatgctaagagacactcrcaccagcaccatgacagtttacaaatgccatggcaaaatcaggaagttaccctatatcctctaaaaaggggaagaaccctcagttcctgggaattgcctacccctttcccagaaatgaataatccaccccttatttagcatataatccagaaataatcataaaaatgggcaaccagcagctcatactgctgccctgcctatagagtagccattcttttattcctttactttcctaataaacttgctttcacttcatggacttgctctgaattctctcttgcatgagatctaagaactctctctcggggtctggatcgggacccctttccagtaacaccacgagactgcgtccctcactgcccctcgtttcggcagttgcatggttccttggtgagttttccctctttctcgctgtcatttctcactatgagtctggcgcttgttcttggtgtcttcagtggccacgtcgttgatccttcggaggaccttcgccccctctcctccagtgagtgaccccacccctgcagccactcgctcccatgccacgcccctgacccctccagcatctgtctcaaacatcccactcttctttctccactttcaccttgtcactcatcctgcaattcccagtcccagtgactatttttttttttttttttgagacagtcttgctctgtcgcccaggctggagtgcagtggcgcgatctcggctcactgcaagctccgcctcccaggttcacgccattctcctgcctcagcctccctagtagctgggactacaggtgcccgcaacgacgcccggctaattttttgtatttttaatagagatggggtttcaccatgttagccaggatggtctcaatctcctgacctcgtgatccacccacctyggccttccaaagtgctgggattagaggcgtgagccaccacgcccggcccccagtgatctttgaccccactgggatggcgacccttagaacccatggccttctcatagcccctygtctgtctcacaccttccctctttgccatgtcagtgaccagccctgccttgcactcaccctccccacccgcccttctcttgctgggtcctccccacctggtgaaacctcagccctggttacatcctgcactccacgcctgcaccagccgctgtgcagtagaagtttctggagatgccccactaccacacgggcagagcgtaccatcaggtcacaacccctgagccaaggtgggcctttcacttgcgtttctgtgctctgtccactcccccaccctcccagatggcaactccaccctcccctttcctcagctctgctgtgcctcctccccatcctcactttcagctgatggcctcgtcctctcattccaccccaaaatttgaagccactggaagagaattcccgctggctccctgcaccaccactacccgcccaccatgtctgtcccccttcccacctgctccccgcagtgcactgtctacgtttcaggccagtgctacctgtgtgcagatgcccatggcctgctccagggcatggctttcggagctccctgctcctgccacatccgtcctgacctctctcttggctgcattggtcctgacctctctctcagctgcatcaatcctcgcctctctcctggctcatttctgccagcacaaaacttggtataaatgcccctggcctaaggaaatcttttgacccactttcctctccagcagcctctccatttctctgcttgccacacgcacacatgcacatatgcacacgcacacacatgcgcacacacgtatgcacacacgcacgatccatgcacacaatgcatgcacacacaggaaattcctcagagaatcatctgttgccactgtgtccattttctctctccctccccattcaggtttttgcccctcaactttactgaaactgttcctctctgagctgccaaagtctgactaaagtgacaaattctcagtcctcaaattatagatgcagaagcagcctctgacctgctgrctgctcttgcttccttgaaacgctttcttctcctggccgccaggatgccacgcactgctgggttttcttgtatcttcttggtcacttctcagtccaccctgaccttcaaacatgctgcacccagaagtcggtgccctccactcactccctaggggatcccctccaacctcatgattattttattttattgctgggattacaggtgcacgccacactcccagctaatttttgttgttgtttgagacggagtctcactctgtcgccctggctggagtgcagtggtgcgatctcggctcactgcaaccttcgcctcctgggttcaagtgattctcctgcctcagcctcccaagtagctgtgattacaggcgcatgccaccacacccagctaaattttgtatttttagtggaggtggggtttcaccatgctggccaggctggtctcgaactcctaacctcaggtgatgcactcacctcagcctcccaaagtgctgggattacaggcatgagccatggcaccgatctgtttatttttgagacagtgtctcactctgtcaaccaggctggattgcagtggcgcaatcatggctaactgcagcctccacctcccaggttcagatgatcctctcacctcagcctcccaagaagctgagaccacaagtgtgcacaccttgcccgactaatattttttattatatttttagagatggagtctccctatgttgtccaggttgttctcgaactcctgagctcaagtgatcctcccatctcagcctcccaaagtgctgggattagaggcaggagcccccacacccggccccatgattgtaaataactctgtctgctgggacgcctgggggatctttccaaccagatttctctgctggactccagacttgcagagctctgtcgtcagcctccacgcagggctgcaacagagccacggcatgtctggtcccagcagatgctctgcccagacctgtcctctcactctttgctgtcacgccagggccactccatcccttccattgttcaggcaatgaacatggcatcatccttgaaccctgtctttctctcatatcccataaccaatctgtccatggttccaccttcaaaatatacccagatatgtgatgatgttgaggaattgctggtaacttttttagatgtgataatggtattgtggttgtgttttgtttttgtttttgttttagacggagtttcgctcttgtcacgcaggctggagtgcagtggcgtgaccatggctccctgcaacctccgcctcccaggtttaagcaattttcctgcctcagcctcctgagtagctggagttacaggcatgcaccacctcacctggctaatttttatatttttagtagagactaaaaacagggtagtggtgtgatcacagctcactgtagtcttgacctcttgggctcaagcaatcctcctgtctcagcctcccaaatagctgggaccacaggctcccaccaccacgcctggctaatttctttaaaaatttttatagggatggagtctcactgtgttgcccagtcttgtcttgaactcctgggctcaaccagtcctcctgccctagcctcctaaagtgctgggattacagggagggagataccatgcctagctagtttcatttgttatctgcctggtgtgtgtagacatctgctttgtcacctccattgtggagagcaacatggggtttcaccatgttggccaggctggtcttgaactcctgacctcaggtgatccattccccttggcctcccaaagtgctgggatyacaggcatgagccaccacgtctggccatggttgtgttttttaaaagagctcttatcttttccagagtcttactgaaatatttacagatgaaataatgtgatgcctggaatttactcacaataacctagggcagtgcttctcaagctttggcatgcattcaagtcccctggagggctcattaaaacagctttctaggtcttgagcccagagcttctgattcacaaggcctggggtgggccccgtaacttgtatttctaatgcttggtgctgctggtgtgaggagcccattttgagttgagctgatctaaggtataggagagtgagtagcctgggcgtgggctgggagaaggtggagttggtgggtacgtggtaatgaaggtacaagggtttattatgtcaccctacttttctttggaaagttccgcaactaaaaagcacgtgtgtatgtgtgtctgtctgtctgtctgtctccagaactcttcagctcttccattgctgcgccctggctcaggctagagtcctctcttgcccaggtggcgctagcacctcctaactggtctccttccttctctccttgttcctctagagtcagttctcaacagagcagccaggatgatccccagacccctgcagtggcattcagagtgacacccaaaacctttctgtgacctcaaacttctgtgcagtgtgttccccacgccacttcctccatgaaccttcagtcacactgcccgcctcgctggggcttgcactggtcaggagtgcttctgccgcaggacctttgcacgtgcccttctgggcctacagtgctcctccactctccatgcagccatctccctggcttccttcaggtccgcattcagatgtcacccttgcaatgaggccttctcagacaacaccatctaaaatgtcacttccccttccccactattcataccctactccctgctcactttttctgctccgcgcctgtcactgtctatattgcactgattgatcttatctatcctggcaggaagcttgagcagcgcccgcctcttcctggctgtgcctcggcagtgcccccaccccagcctcccaccccatcttggtctgcaccccctgccatcactcatccattcattcctcctgttcctcttggccactrccaaatgctggatggtttccatctgtttggttcactgcagtgtctctgtccctggaagggtgccagccacagaaggcacgaagatgtgtccacagagccggcggctaaaaatctggcaagaggagtcgaggaagggggctgaggaggtagaagggagggctttcctcaaaaggccagaaattcgtggcmagccaaaggggaagcaaagacattctcgtgtaggaaaacttacaggaaatgcaactaaaagcgtgggagacaggaagtctgtgtatttctgagattatcaagaaaggggggatggaagttgcaaatgggcaggccaaattcagtctgcagaggtgtgcttccagcccacgcagtgcttaaaataaatggagatggttgccagcactggaaggtctggagtgccctgtctcctggaaacactgcagcctggcaccactgggctggtgagcatgactggcacctgcagcagctgcccaccagctaatggcaggtgtgtgttctctgctcacccaaagcccttccagcagcttcattttgttgttgttgtttatttgtttttgagacagggtagtggtacaatcacagctcactgcagtcttgacctcctgggctcaagcaatcctgctatctcagcctcccaagtagctgggaccacaggttcccaccaccatgcctggttactttttaaaagaatttttgtagggatggagtctcmctgtgttgcccaggctggtcttgaactcctgggctgaagcaatcctcctgccttggcctcccaaagtgctaggattacaggtgcgagccaccatgcctggctagcttcatttgctaccttcctggtgtgtgtagacatctgtgttgtcacccccattttggaaagcaaaaaggatttcttcttccttcaaacataattgagaaaatacagttgtttgggggcaagtagggtgcggggtgactctggaaccggcctcctgggaagccaggcctctgggagtgctggaggtgggcagtgaggctgccaggcccctgccttctggggtggggtgcatgctcctgatacatcagaagggtcgggggaggacttggaggtgaaggcactgcaggaagagaggaagcttactggagagacggtcaatggggcagtcaggctttaaaaggacgggcccaccaagtgaaaagatgaccaagtgtttgggctgaattgtgtcctccaaaaggatatgttgaagcctaacccccgggacctcagaaggggatcttatttggagatagggttgttgcagttgtaacgctgagatgagrttatactggagtagggtgggcccttaatccagtgtgactgctgttctaagaagatgtacatgtgacaatggagggacatgtggggagaggatggccacgtgatgatgggggggacatgttgggagaggatggccacgtgacaacagggggatgtcaggagaggatggcctcgtgacaacgggggaatgccaaaagaggatggcctcgtgatgacaggggacacatggggagaggatggccttgggacgacaggacatgtggggaggggatggccacgtgatgatgggaggacatgtggggagagaatggccacataatggtggggggacacatggagagagaatggccacataatggtggggggacacgtgaggagaggatggccacatgacaattgggggacaccacgcggggagaggatgaccacataacaacgaggggacatattgggagagaattgccacgcgacgacggaggaagggactggagtgaggaagtcataagccaaggaacgccaaggacagaacaagcagcaaacacaagacacagggccaggtaaggaggtcccyggctccaggtatcagaggagccctgctgatgcctggatttcagctctctggcctctggacccagaagagaatgaagttctgctgcctggggcctcccagtttgtttacagtgagtctgttcatggtggagaaacatcttctcatgatgttcctgtccaccatggtcaaggcctgttttgagctcctgcattgtataagtcagaggtaaagctgtttttctcaaggggtcaataattgacagtattggaatgggacaaggtggtcctgttgggttttgtttgtttgtttttaaaatatgaggatagaaagtcgtgtttttacttgtgcttaattttcccagtggccgggatgtgaagtccacgcctgtcatctgtaatgcaccagggcaaggggtcggttttgtttgcatagcttctcccagggtcatcttcccacccctcaagtgtggatttggccacaacactttgtttagcaatttcctgtcattttgttttatttggtcaggcttatttgcatagttgaatgaatgcacaaaggcctccttgtttcgtggttcacaaagtcagaactggatcataccagggcatacgggttctgtttcaaggctttgtaaagctgctagggttgaaataggtatttttggtgtcggaattattttattgcatttatcagtttatctactgagatggggcactgagaactgctgatttacctctctgcagccctgtctgcagtacctgaaggctgggggaagacatttggcaatgcacacagcctttgtttctgcctgtgaagttggggtttcataggccacctcccaggagggccctgtaggtgcatgacagagtccgagtgtctcaccagtgggtttgtcattgcacccaagcagatgctgggggagaggatgcctcttccttctcctcacccttcatcagtgtgtgagcagaggcaggagacctgtgggctgaaaggcccacatcctccttcccaggctgtgaatgtggcacttacatggcaggaggactttgcagatgtgatcaggaccttgagaggagacattatcctggatgatctggatgagtccatcgcactcacagggtccttaaaagctggaagagggaggccaggcagggagagggaaggaaatgtgaggatggaagagggatccgattgccgcgattgctgaatttgaagaggaaggaaggagccgagagccaaggaatccaggcagcctctgggagctgcaagagacaaggaaatggattctgtcctgcagccttcggagcagatgcagacctgccgacaccttcctttcagctcagcgaaatccatttcagaattttgagtgcagagctgtaaggtcatgagtctgtgctgcttaagccactgtgtttgtagtcatttgttgcggtagtaaaggagactaatatgctattttgccaccattctgagcttttgaggcaggctgatggaaaaggtgggacagtggcttcccagtacttttctaagtgatcctgagaacctaatatcccaggcacttcatattctgtaactctccaccctgctgccagcagagtctgcttagtcctcaagacgaggggcttctgctgctckcagaggttgatgatttcattgattatctttaagttactctgcactctcccttccccagagaaaacccagtcaaattcaagtgagcattggggaaaatattcattcattaaactggttcttaacctttttgggggcaccgacctcttgagattctgttgaaaatgggattttagcccccataaaaatacatatcaaaaatttgcataaattttggccaggcacagtggctcatgcctgtaatctcagcactttggaaggccgagacgggcagatcacttgaggtcgggagttcaagaccagcctggcaacatggcgaaatgccgtccctactaaaactacaaaaaatagctgggtatggtggcgcatgcctgtaatcccagctgcttgagtggctgaggtggaagaatagcttgaagccaggaggtggaggttacagtgagctgagattgcaccattgtactccagcctgggcaacacagcgagactgtcaaaaaaaaaattgcatacaattttgagaacaattttgtatacagattcccccaggagctaccccttgaagctccaatggctgccaggggcttcctctgtcaccccaggtgaagagcccttgtacagattaattcacattaaggctgatgaatggctgttttcctagtaagtctcctcgctgtttgccaggtccttaaaccatgttcagtggatcctcattatttgtggattccatatttgtaaattcatctgctctctaaaatttgtttgtcaccccaagatcagaactcatagacaccagcagagtggcaaaaatgtgttacccgatgagccttttcccagctgaaaaggatgctctgccatcttgtttcagcctcttggtgtaaacgagtgtggttttcatgatttgtttagtgccatgttttccatgttttgtgctttttcttcgtggtttcactgtttgaaagtgctgtctagtgtttccaagtgcaagaaggcagtgatgtgccttatggggaaaatatgtgtgtttgataaactgtattcaggtttgtgttctagtgccactggttcagtgttaaccaatcaacactgtacagatgattcctgacttacgatggttccttccagtatgatttttcaacttaacaacggtgtgaaagtgatatgcattcagtagaaaccatctttcaaatacccatgggaccattctgtttttcactttctgttcaatagtctatacatttcataagatattcaacactctttcagaaagtaggctttgtatttcatgatttcgcccagctgtaggctaacatgtgttctggataggtggaaggcaagctgagacatacctctatggtgtttggtaggttaggtgtattgaatgcattgtcaacttaggatattttcaacctatcctgggtttatcaggacatgaccccattgtaagttgaggaccatctgtttattcagtaaggtgtcttttaaatagaaaaacacataaaacaaggttagtattgattgattgacaaaaatgttgcaacctgaggctttcaggaacctaactctgcatttcctttaggagtgctgcttgcttcagtatctgctggtaactctatggaacatagctactgtgaataatgggaattgggtgtattttcaagttgttggcctctccagctacgctggtaatcagtcctgctctttaaatcacatcttaccatcagtcctgcctagagaaatggaggaagggaggtctctggtcttacggtctgtcccgactctctgccccaccagctatgtcccgagaaccagcctggacagagccatctgattggtgggtggtagcaggtcatgttgtgaggccctggtgcctgccttctgtcctcctgtgctcgctagaggagcatgaggcaggagcagccagtccatgctggttcctgagcgaggcagctctagggctgccagcacccactcctggggggctgagggtaggaagagcttcagaggggaggatgggactgtctgactatatttccaatcccagttgggacttgtggtctgatgaggacaagtgcctttgagggggatggggatggttgagaggaaccaggaaatcaaatgtgtcctggaaaacatggcatggtggatcttttgagttggggtgttgggatgtgtgtcagctaaaacaaggttcacctgcttcaaatgttcatccaagctttctacacttgcctctctgagtcaacatctttagagacagcaggaagtgatgaaagtcagttcacagtccatctgctctgagggcttggtatgaggggctgatgttttctgtcattttctcctttctaacatttcactttgggatcttagttcctggttgaaattccttaactgtgggagtcgaggcagcctaagaatccttttcggctgcttaagacaatgaggtagagagggaaccagctgccccttttcttacctccatgatgatgtagaaatggttccatccagcccaagggttcttctggggcccaaagctccttaagggctctgtgcataggatttgaggattagttttcttgggtggggagaaaagtccatctttatttgtataaatcctacctgaaatgcagcatttcctctaattaggaaggcaggcaacaaaaccagtatgttagctatgtctgtgactctgtcaccaatgtgggttagccgtatctctgaccctgtcaccaattgcaattacagatgtctccacatcacattagtgttgtttcagatatcttgaagtagcatttgttcccattactagttttaaattaaggtggttaatagaccccactggattttgcgatttaatatgctgataaggcacrtatattgctatactrtaacattttttaaaaattttgataactagatttcaataagattggtatttgtgatcatatttattttcttgatttttataacagctttattgagatataatttctgtaccatacaactcattaaagtgtacaactccatgtttctaaaatatattttcaggattgtacaaccatcaccaccaccatcaccataatctaattttagaatatttttgtcccccttaaaagaagcttcgtactcattagcaattatctacattccccctttccccactctcagcccctggcaaccacaacatctactttctgtctctagaaatgtgcctgttctggacgtttcatagaaatggaatcttgtttttgagacagagtctcactctgtcacccaggctggagtgcagtggcgtaatytcggctcactgcaacctccacctcctgggttcaagccatccccctgcctcagcctcccgagtagctgggattacaggcgtgtgccaccacgcccagctaatttttgtatttttagtagagatagggttccgccacgttgcccaggctggtctcgaacttctgacctcaggtgatccgcctgccttcgcctcccaaagtgctggggttacaggttacaaagtaagccactrtgcccggccaaaatggaatctttctgaggtcttttgtgactggcttttttcatgtagcataatgttttcaaggttcatctatctttgtattttgttctgtgcacttaaaacattattctgagaaggggtctaaaggcctgccccgtcgtcaccagaagggcctgtggcatcattggagaggttagggctctccctaaccattagggctccctgcgcctaatggttcttccctctgtcagttttgcattaaaactagtacatgccttggcttgagcatggacaatcactgccaaagacccggcaggcaaggcacgcagctttccttgggatgggttggacccaggccctgggcactcagaggtactcaggcacctctgcccagtctccccaagttaccacctccacaggtgccttggagtgagtgggcatctccaggatgtagcctctagtggatgatacccgtggacagggacagcaaggtagagtaatagggccaggccccaggtgcctgcccccagctggacgccagaaccccaggaccccagctcctccagcccccaggaagctgtcagcacttccagagagcaagctgttggtgggaaggtctgaatccttgcagctctgtgattcgcgaatcataaaacctccacacttggtgtttgtgggccgagctattgtctttgtgttttctttttggagtgggtgggaagccagcttggcaagccgggtgtgaatgaacaggaatgagcaggagacgctygctgatgccttctgtgatgtgtttcttccccagctccagaagaaaaggaagtcattaaaggacagtatggcaagctcacggacgcgtayggctgcctgggggagctgaggctgaaatctggtgagtagccgctcgctggaggagcaggcgccaggctccccggtgggcaggagcctctgtgtcggaaggggcctcagtgcrggcattctgtttgaccgctcttctctctctcttcttttttttttttttttttttttctccgagatagagttttgctcttgttgcccaggctgcagtgcaatggcgcgatctcggctcaccacaacctctgcctcctgggttcaagcaattctcctgcctcagcctcctgaatagctgggactacaggcatgcgccaccatgcccaactaattttttgtatttttagtagagayggggtttttccatgttggtcaggctggtctgaaactccgacctcaggtggtccacctgcctcagcctcccaaagtgctgggattacagccatgagccgccgtgcctggccgacctctcttctcttttaagatgtttctttatgcctcgggacctgctcctcctgcaggaacctgcaggtggggaggtcaaggtgagtgttgcctggttgtcacctgcctgtgctggggagcagggtggggttcccggcacccccaccctgtgccagagaagctcgtcttcattgcttgccggcgagrgcctaagtgtttcgaaagtctggtctggggcttctgcccagggcattgtccgcagtactctagaagatgtgccaaggcgggtgggtgaagacaggraccagggcagatgccsgggggcacaggggtgggctgggagttgtcagcaggagaaaaaagccaccgatgtgtgactgtcagtcagtgtggggtgggagggagaggaagggacagtgtgatctgacttgcgaagggagagaacttccaggaagacgtgggcatctctgctcactctgagagactcgggggtgagccggtggtggccggctgtcgygggtggtcacagccaaactcagctgttcctggagctcaggagccctggggctttaggttctaccacctgtttccttccttctctctcaggggcccccttgccatctgtgacctggctgtggacatctcttgtgacttctggggccgagacaagagcccagtcgcattcctgattctcagtcccacctggctgagatgggaatggctgtatgggttgtctgaattcgggctttccctgagccaagcgcacacctcccttccctgctcacarcagctgttttcagagactgaggatgtttaaagctgccagaaaagcacggttacgttggccattccttttctgggtgttttctgtcatggaatgtttttccctgaactgtgacgattacagtgatcatttccaaatagcatttaggaaaaatacacagtacccacatgacaaagtgcatttatgaaatgtctgtttcgtgccaagagctagccgtacattcacttatttaatcctaaaaataggctacygtgataatgcatctttgtccccgtttacagtaacgggaacaggctcagaagcttcaagtaacttgccttaggtcagaaacttagttggggtttgaagcgcctccaaacgcttgctttttctgtgraaatgtgcgggctgccgagggttttctgcaggactttccgctctgcagcratcttcctgaagttgcaggaaatccctgtggcccttgccttccatggtgatgaccgtgaggatggtggcctgcacctgcatgggactcacttaggaacttgttaacacggctcccgaggccacctgtgctgttgtcaccctgccttgcaggtgtggcagggatgccgcgttccatccatgctgatgcccttttttccacatggtrgtatctgggcccccargatgcctcacagtcttggcttccttcagttatagttggcagctgcttttggtccttacatgaatgactcattttgcatccgacagggactgggattcgacgaattacagtaaccggctcaaggtcacgccattctcaagtggtgccctgggttttaaactcatgccttgcggcaccagggactgccttcaaccaccaggctgttctcctttctgaaagggacaggtggctgggctcacaagggggacaggaagtgcagtaccttcccccatcccaggggaaaagtgttttttcccagggctgtgatctaagatcagctgtgggaaattggtcctaaccaggaagggtggcagccccaaagatgtcttattagagcgagccagggtgtctgcgggggtcagcagggtctaatggggcagggagtgctcagagaggagaccacctcccagggctgccctaggcgaggcctcctccctgccttcagccagtccccgccaccccacaccccacagaagggaatgaggcttcttgtggaccatgcgagaccagccctgctccgaggctttgggtgcccccaacccctgcccacctgtgagagtcaccccccggagtgggttggagtttctctgagtgtggtgtgtatgagtttgactttggcgatgtcaggataatttggtctgttttcaacacattctggaaagcaccctgagcatctgaaggatggaaggattgggctttaaatcaagttttttcagtccccattggttatcttaaggggcgtttgactttaacttgattttctttttcccctgtaagtccctgacccagaactgtgatctattttcttttgtgttttcagctgttgagcatgttgggcagcacggagtgtagctacaactgtgtgaccccacctgtgtgactgactccacctgtgtgactccagtcgtgtgaccaactacaactgtgtaactgactccaattgtgtgactaactccacctgtgtgactctgcgtgactccaactgtgactccatctgtatgactccaattgtgtgacccccacctgtgtgactctgactgtgtgacccccacctgcgtgactctgactgtgtgacccccacctgcgtgactctgactgtgtgacccccacctgcgtgactccgactgtgtgacccccacctgtgtgactccaactgtggactgactctaactatgtgactgactccaactgtgtgactaactccacctgtatgactccaactatatgattgacttcaaccgtgtgaccccacctgtgtgactccaattgtatgactgactctaactgtgtgactccaactgtgactccatctgtatgactgacctcaactgtgtgaccccacctgtgtgactccaactgtgtactgactctgtgtgactgactccacctgtatgactccaactatatgactgacttcaaccgtgtgaccccacctgtgtgactccagttgtgtgactgatttcactgcgtggctaactccactgttgcctgactccagctgcgtgacttcagctgtgtgactccatgtatgtgaccctagctgtgtgactccaactttcagttgccacgaagacaaccagctgagtcaggagtgggcctccctttcaatgtttttagctaagcatctctgcgcaaagaaagaggcttccccacaggctcttaatttgggacaagttttcccttagtttgggaaaaatttcaatctacctaaattagccttttacattagaaatcgagaaatatgcacaaaaattcataaaagcctttttccaggttccaaggtttttgtagaaagcccaaagttcccctttccttcctgaaatgccagcaggaaggggttggagctcccgtgattagccagggagtcaggcttcctgaagtttacacaatacaaagcatattaagtgagaatgtagcagaaaaaagaacttatcccaatgattatagcaatttaaattctcttgaacccaagctctcaaggcctacctgttttatagcctcaagggactctactcctatcccagactataatgaattgtgtctcctggagttgtgcagtacgcaacctgtgaagctgtacacgacagccctataaattctctagcagacagccctcctagattctagttcccacttcacagctgaactgcatttaatctctgtaggactgttttcctgtctgtaaacctgggaaaactgcctcatctctatgttgcctagttctcaggaggtccacatgggccatgcacatggtagccatgaagagtgtggagtgctcctccaacaccaggcgggctggccacaggcagtttcttagagtgtggcctggggacgctgccaccactgagaagctctgctgtctctcctctgtccctgggagggctggagggaggagggtgctgagtgagagggacctggcctgcagagggctgaggacgaggtgtgagctggaaggccaggctgtgtggcctcggggtgtggactcctggtggggggctcctctgcacaggctagcagagggctggtttcatgggcagtcacttcagaaggaggattccctggaggggagtttgaacccttagtcttttgggatgcagtgttctctagcaagtcttgaagcgaactggcctttgtcggtcttagattaatttaattcctgtgcccagtggtgggatattaccaagagagttgacacccagctccctgagggggaagctctgagatgatgcagcatttgccagtttccaaggtgtaaattcacgggccagggctgatttcaggttcccagcgtggagctgaggaaggatctgcaccaggggtgctcactgcgggtgttcactgctgcggccgccgctgcctacacctccctcacgttctgcagaagggaggcgggagaaggccctgagaccatgccgcatgggcacacagtgcttagggttctgaacctgcgggtggcgggggaggctcaagggtcatctggccgaagcttcccccttcacaggtgggaaagcctagacatctttagtcctttgtttggagctttaagtctgagggtgtctgtgtgagcagagggacagataggatggctggagggaccccagggttgggattggcacagaccaggctgggaaggtgaactcagagctgagacaacacaaggaaatgccagcccagagccttgtgggaggcctggggtggtcccggtaaacggggccttgggtctgcaagccacgtatcatgactccaacagccagctttcctggcctgataacaaattgcctaggacctgccactggctctygcctccctccacctcactctrgcagctccctctgacccatgcatggctttgctttggccagagccctggaaccaaagccctttacctggaggggacattgagactattggcgcatcctcctgggaggcccagagagggtaagagccttgcctgaggccacacaggccactggaggtgtgcagagcctggagccccactcttctgagttttgtttttccacttgctatgagatccttgatggtttcagggccctggtctctccctcagctgaggactgccaagaaccccgcaagcctagttagcttcttggctgtcagagaattgatcctgcctcacaaaagcaaatcctgtgctctaggtgagcatcgggaggggcctcacacacctggggcaggtggggaccagtggcttgtaccacactgacggtggcccgggagtcagcgaccccccacagcctggtgctaggctcaagccaggacactttccttaaaacccatagtacaggccaggcatrgtggctcatacctgtaatcctagcacctcagggggccraggcaggaggatcacttgagcctagaagttcaagaccagcctgggctatgtagcaagactatgtctctacatagtgatggtatctacagcaccatgccaggagcggtggtgcacgcctgtagtcccagctacttgggaggctgacatgggaggatcgctggaacccagaaaggggaagttgcagtgtactgagatcaagtcactgcactccagcctgggtgacagtgcaagaacctgtctctaaatttaaaaaaaaaaaaaaaagcaaacaaacaaaaaacccatggtatacagagaacacagtcaggcagtcaggctgtcaatgagattaggcaggacacagtgaggctgggattgaaggaggaggaagccatcagtgctgggtcaggtaggcagggcggggccttcccggagaggcagcgctccacacagcggtcctgaggtttgggtaaggctcttccacagaggcctctgtggttacacccgtcccaccaactgtctgggacacacaggcaggggcagttctaaggaaaagtgtccaggtccttggcttttttctatcatggagcacctgtgatggaggacagggttcttattcccctctgaggtctccctgcttccatgttagggtagarggtaggcccttctctcttctggaagctcaccgtgtgccgtgctccaggaagtaactccccctaggattccagacaaagggacagttcaaaagcttgtcaacagcattgcaataaggtcaggactaggtagcaatctgtttgcaagtcaggtgatgtccaattgtttgcttcccccataacggaaggagaatttaattggggtatcagctgacacattagtaaccattttatcagcaggttattgtcatttcttagcgctaactcagaaggactttgaagaatcgagtgacatttctacaatgaagccctttccattcccatctatttattaatgtgaacaggatcttttagtrtttgcgtctacaaaaatgaaaactagaattagaattggtgcagaacctactttcattccttcaataaatatttattcatctcattaagagatgcctttccaacacattatgactttttgtatcaaatgattatttgtcggccaggcacggtggctcatgcctgtaatcccagcactttgggaggccaaggtgggcggaccactagaggtcaggagttctagaccagcccagtcaacatggtgaaaccccatctctactaaaaatacaaaaattagctgggcatgggggytcatgcctgtaatcccggctactcaagaggctgaggcagtaaacctgaaaggcgaaagttgaacccgggagacagaggttgcagtgagcccagattgcgccactgcactctagcctgggcgacagagcaagactgtcacctyccagagaccccacctcctaaaaccawcgccttgggtgttcatacttcagcatattaatttgggggtgcacacattcagccaatagcaggtacactggttgaccacactcttaaagaggacagccaaaaaaaattatttggcagtgttttatttacattgtattgtttacattgtttgaccagttaggtatcactggaacgataaaccagaacgctctctttttaaacacttggagttgaggaacacacggctgcaggggctgatggggtgatcagaacaggacgtagaagcaccagatatgctacattaggatggaattctgaagaggggggactggaaatatgagtgaaagttccatgtggtaagaaagagcatgctcctgcaatcctgtaaataatagatggcaatgagtatcacgttactgtgtagattccatgggatactgacaagaggctcccagagttttagttttacgtgtcaatatttagaatacactgcacaatatattatttacaggcatttcaactaccgatgaaaaccttcaatggcagttttaaaatgggcagggaacgctgtctgagtccagtgtgttgctgtgacaaagttccgtagtagacggggtggcttatcagcaacagacatttatttcgcgcagttctggaggctggaagtccgagaccagcggcccgcagattggccggctgtgaggacctgcttcttgctccatagatgctgccttttctctgcatctgacatggtgggagaggtgcaggagatctctgggcacaaaccccattcatgagggctccactgccataacccagtcacctcccaaatacccccaccacctcaaaccatcaccttgggtgttcgtacttcagcatattaacttgggggtgcacacattcagtcaatagcaggtacactggttgaccacactcttttaaagggtacagcaggccaggtgcagtggttcacrcctgtaatcccagcactttgggaggctgaggcaggtgaatcacctgaggtcaggagttmgagaccagcctggccaacatggtaacaccccatctctaccaaaaatacaaaaaattagccggtataatcccagcaactcgggaggctgaggcaagagaattacttgaacccaggaggcggaggtagcagtgagctgagattgcaccactccactccagcctgggcaacaagagtgaaactccatctcaaaaaaaaatagccgggcgtggtggctcacgcctgtaatcccagcactttgggaggccgaagcaggcagatcacctgaggtcgggagtttgagaccagcctgacctacatggagaaatcccatctctactaaaaatataaaattagctgggcgtggtgacgcatgcttgtaatctcagttactccagagggtgaggcaggagaatcactagaacctgggaggcagaggttgcggtgagccgagatcacaccattgcactccagcttgggcaacaagagtaaaactctgtctcaaaaaataaataaataaataatacatgcatacatacatacatacgtacatacatacatacatacagggtacagcaaactaatccgattggaaactgccggactttggggctagatggagcatgggcttaaagtgaaacctacattttggctccaacacagactagctgtgtgcttgggcgggtgattcagcttccctgggggacagtcatgcgtgtgtgaaatggcagtggtagccctgagacagcagcatgggtaagcaggctggcgacgtcatctgcaaggaggtgtaattaggagcaccagctctggggccagacttggcttgagaaacttgcccaggcactgtagctagaaagtggatttggatccsagctccccgctctgtcaccttgggcaggctgcttaacctctctgtgcgtctgtttccctccctgtgagatggggctggtaagggcgccccttgcggtgggcgggaggatggagtccgcgcctgtacagctcccctgcctccactgcgctcaccagataccggctctcctcactcccctgtaccactcccgaccccctcctccctggacccaggagccccagtgctctgtggcaatgttaagagcctctcctggctgctacagtgctcctctccccagcctcccccaggccgtggtcctgcccaggaaatgcacctgggactgttgccaggcactcaggccccccacacggaggctgttgaggaagtggtgctagaaatcagctcatgactctcacggagtgatgtcatgcaaaattttccatagctctggcagccacaggggccatcctcctgcctctccgagggcacttctgctgaactgtgcttttccctgcactgtgtcagaagaggcaggtgggtgccgggagcgctctgtggccaaggctctgatcacaagctgccaaccccggaaccccacctatcctacttgagaagctgaactctgacccctgtccctgtccccagtgtgataacttcctttgttcttaggtggttttgaggtggtttcctgaggatgtgtctggggagatgtgatgggatcaaccccctgccctgctggcagccccaccccatggcatagcagcaggcccctgggagccctgagygctcattaaaggaacgcactttaatgacagccacacgccaccctgccacaagcagcgctcttctccctatgaagtgtggtgaggaaattggggtgagagggtggtggaaytggttgttttgggggtctcttcctggagtgtggagagatcagaaccatctccagaccatggctgtagacagcggcccttgatcattcacagaagatctcgctgggcggatccttcagacctcagcggggtgggaagagtgtccttgggactagagccctgccagaccccaaaggccggtttctacccgatgatctcttgggccccgtcccgagagtgaggcacggcrccaccaggcacccccgatacgcagcgtgttgtgaagtgcccttgtgagcagcgggggatagggaacagaaaaccagctgtcagcgacagcgaggtggtgcccsagagagggctgcctcattcgcctggctgcagggtccgaggtcgtcttggtagcatttggcaggaatttatttaggaagcattcagcaaaccgagtgtgtgtggtgctgggagatgacgacgaaatggccctgcccccaaggaagcccctcccctgggggcacaggtggggagggaggtcatgagctttgtgtgtgtgacaactgctgatgggaatgctattggcacgtacgaggggtgcctgtccgtgtcttgggagagcaaggaaggcttcccggaggagttgctgccaagttggcccagaaggatgaggaggagttcttctggtgaagtggggagggcagaggcaggatggtccctacggagcatgtggggacgctcgtgttcttycagaggatggaatgctgggcccgaagcctgaagtattgttagggtagagacaggcgggaggtgcgtggagaaggggtcatggaggtcttgttgggcagatggcggtgggacgtcccaggcagggggagcatcttgggcaagagcccagggtgcgaggtcatgcttatggcacattggaccagctggaggacagccagctcaggagagcagccggctggggtgtctgcccacgtgtggggcagggatgggctgcagcggggagggatttgggagcttctgtcgtagtcctgcagggagtgggagctgtgcaagaaggaagggcggagcggctgtgatccaatgactttgggaaggccactcctgtgatggagtgggggaagacagaccccaggccaggggtcctgagtcaaggcagtggctgaggaggcactggggaaggtgatttggagaggctttgggggtaggtcctgggggtctggaagggctctaggccaggaattttcagactcctgggggcatcagaatcacctggagggcttgttaaagcaaagcttgcccccagcctcaggcagctgggcggcaggaatctgcatgtctaacaggctcccaggggatgctgacttgctggccagggtcccacactttgagaagccccgcctgaagcttacaggacagggcaggttcttgagccattgagttgggcaatgccatgggaagttgcaggtgcacagacgttgccttcctggctgcggttgaacctgggctccatttgtccccttggagctccaggcggccgggccgacttcgaccctgagctctcctgtctgatttcctttccaggtggcacrtctctgagcttcctggtgttggtgacaggctgcacatctgtgggcagaattccagatgctgaaatctacaaaatcactgccactgacttttaccctcttcaggaagaggccaaggaggaggaacgcctcatagctttgaagaaaatcctcagctcgggggtgttctatttctcatggccaaacgatgggtctcgctttgacctgactgtccgcacgcagaagcagggggatgacagctctgaatgggggaactccttcttctggtgaggccctgggtcccctgcagagggtgggccctgggtctcctgcagagggtgggccctggttggcatctgaggccttgacctccacttgcaccacccccgggttatggggcacctctggagagttaggacccaggcctgctctcagcacaatgagaggaaaactaaccctgaactccctgccaccccccacccctggcccctggaatgtgttcagtgtagatttggaaaagaaacctgcgccaggcatggtgcctcatgcctgtaatcccagcactttgggaggctgaggcaggtggatcacttgagttaaggagtttgagacaagcctggccaacatggtgaaagcccatctctactaaaaatacaaaaaaaaaaaaaaaaaaaaattagctgggcgtggtggcaggtgcctgtaatcccagctactcgggaggctgaggcaggagaatcgcttaaacccaggaaacggaggttgctgtgagccaagatggtgctactacactccaccctgggtgacagagcaagactctgtctcaaagaaaaagaaagaaagaaaagaaaccctgttccataagtaaaaaacataagagccgacgtctgctgagtgcttcctcagtcccgggtgccgagctcagtgcttctgcctggattcactctttcagtcttctcaatcatggttacctccagtgtgcagccgtttaccgctgatgtttataaagcactgtgttcgggtcaccgtgctaagatctctctgctggtaataactcatcattattataaaaacctttataataattatgcggaggctctgttaccccattttacaggtagagagactgaggcacgaatagtcgagggaattttgccaaactccayacacttactaagtggcagagccaggatttgaacccaggctttctgggtccaggtcccaagctggtaatcacagtgctaaaccagtcccatcaatggggaagctgagtcaccctgcccaaagggacttgtagcaatgcactaagactagtcccggagcccaggcagaggcggctggatttctgtatgtttaagatctcctggtgctttttcactccacagcaggacagagacaagagtggacaaccctgtaaatacataaattatctattgccctttctggacataatgctgtttctgtcagattcgcactgatgcctagagatgccaggtagaagcaaaagtgaggaaagtcctgccatgggagtcgttccaatgaacctcatctaatgtaatgttttagaatccagtgtctgccttttgaagctatatcagttttcccagctctgagacgggactcgtgaggtttatttctgacctgtttgtgcctctctccctttgccagaggcagccacaggttttcatctggccttggtgctttggattccccagaagtgaattcctgatttctgccggaagaaggggaccctccccacatccctgtgtccatcccaacgctccccacccccacatcctctttggttctctggtattgtggatatttggrggcagtaatgtgcccagacttcaaaatgcacgtgaatcaaggctgggcatggtagctcacgcctgcaatcccagcactttgggaggccaaggcaggcggatcacctgaggtcagcagtttgagaccagcctggccaacatggtgaaaccctgtctctactaaagatacaaagaaaattagccaggtgtggtggcgcacacctgtaatcccagctacatgggaggctgaggcagaagaatcgtttgaacccaggaggctgagattgcagtgagccgagatcgcaccattgcactccagcctgggctacagggtgagactctgtctcaaaataaataaataaaataaaataaataaaatcgtgaatctcatgctgatctcattaaaaatgcagattctgggatggcaggtctgggctgggcccaggattctgcatttctaataagctgccagtgctgcttgtctgcagacggcaggttgagtagcagcctctggggatggcatttctgtgaatcgctggttacattttgcagggcccagcatgtgccccgcgagctgttacatgttcccctaaaggcagccaagcttargcacagaggggctgtgtattatgaggtatctttgtgtggagtccgtgaaactattttaaaccagaactgtcaggggagcagaggtgagagctctcagcggcagtgagggtccttggaacccctaggggatccttggggtatctgaattgcaccagcacctttgcaagttctcttccctatgccagctctgtggctggaggtgtgaggggcactaacaaagygaggcaaaggggattcacgaggtggaggctgagaggagcttkggaaggaggagccccatggtgtccctttctgaagggagaggaggaagtaactctggaggtcgccaggctcctcagctgtaacacgccagggcgtggtgtttaggctcagggtggagcccccagaactgaccacaactgagtcaccacgggcagtgtggttctgggcttgatcgcctgaacccccactgttgtggcgcagcgtkaggtctggagacccacagcaggagtcagatggggtcaacgctcagcgtggctggcacataaggcagagtgagcagcagggtgaagtcatctttctgggctggtaattgatcacactgacaattgcctcccagtacaatcaggtcctgggaggaaactctttgggggtcctggatatgagtcatcctcctgccagagggccaggcagtgtcactagaaacagggctgatttaagggttgtccacttggcaaaaggtttcttctcctgagccctggtgatagtggccatagctgtgtagctggcagactctgaaatattctggaggctttgccttgatgccacatgcagatttcatatatgtgtttcggaagctggcttatcatctgaatttgagagagtgatttggaagagggacatgtgtttttgtacagcaatgcttcagcagcatttttcaagcagaggagcgctgtggctgtgcgacctcagatggggtcagacgcgggctgtgctccctgtgggggtgcatgtgactgtgcgacctcagacggggtcagacgcgggctgtgctccctgtgggggtgcatgtggctttggtcacagtcggggaggctggcctgagagcaggaagcttggagaagccccctgggacccatcagagctcacagcacagatttccagcaatgagaaaatgctgctgctgtctttgaggaaggctcaagggcaggaattgtgttgccttttttaaacaagtagggcactgtgatctagattcactcagtgccctgtaagagggcatctcctgatgatgggtcctcctccctgagagtgagtatgggccctcaggatggtaccactcaggtcccctgggtgctaaagcaagggggccaggccagctcagggatgagagaactacgtggtcgttcgcaggtgcacatggaaacgtagggcctcatgaagaaaggctcggcgtgaagagygcgggctccaagctccatgackccactggctggctctgtggcattagacaagcacttcacttctctgtgcctcagctgctttatctgtgaaagggggtcactgatgatacctttcacatagggtcacttcaagggtgaaatgagttaatccaccccaaagtacttagaatggggcttagtgcacaggataaatgttggctgtcaccctgtcgttatcatcatggactctagagcctacagcaatccactaggyatggagagggaatacttgaactttcattacattttattttcctcrgatctttttaaaatttattttggattgctttgtagcgctctcgtcataatcatctcatggtgcatgtgtgtgtatatgtggataatttaaataactgttcccatatttaatatgatttttaatcacttattgatcatgattgtttaataataaaagatgattaattttttaccaatggggcctgcgatgaaaactgtggggcccacagggctaaccagargcccctttgcgattcyccgaaaagtgcacgctggctcactctccagctttgcttccatttagcgacagtgacgacctggtagtggctttgggaaaggactccctggccatcctcctctacgtgacacagtggtcctgctatttgggatctctttgaagcacatgaacttcccagatctgtacagcccaagtgcagagtccactggggagcagcatgcattcgctgaccygaaatgctgcaccgtgcgccccccagttcctcagccacactcgctgtccaggcagcatgtattggaggatgtcaagtgactrgaattggtgtgggactgtgttttgcaggaaccagctgttgcacgtgcccttgaggcagcaccaggtgagctgctgtgactggctgctgaagatcatctgcggggtggtcaccatccgcaccgtgtatgcctcccacaagcaggccaaggcctgcctcgtctctcgcgttagctgtgagcgcacaggcactcgcttccacacccgtggcgtgaacgacgacggccatgtgtccaacttcgtggagacagagcaggtgagtgcccaggcccatctgtggcaccaaatggttccgagtggctgcagctcttgcacacgcgctttccacttggggcagaagaggccctggcatatttgtggtggtctctgatcaggcttcctcctrtaagtggagaacagcacgtgtaattgggctccrcatgaaaatgtgacctctggtttgcatggtgtatcctttctgattcacatctcatgcagggaaaatgctgcttagccgaggtatttttaactaaacggaatcaggaatttttgccttggtcgtgaaaggtgggcagtattccaagggcagctgacagatgaacaaatagggtttgaaaatycttttaggacaaaaataagtagatcaatacaatggggggatgaaagaagaaaccattattttttattctaaatcaactgaagcttctcctggaagccagtattagcaccctagagttgtgaaatctgcgtgttaagcagccgctcccatccgttcccctagaatatagccatctgcttaatttctcctggagttttttctaaattctgttctcatttccagagatgctgtcttacaacttttaaatttttgctctaacttgcaatctgtaagataaggccaccatgtggaatacagtggtgtaagccataagaaaggaaaaccccggaaggcacatgtatggtactcctgccagggcaagctgggtgccctgtgtttactgagtgaaggcgtggctgtgcgtcccccctcgctgccgctgctgggagaggaaygccttatgcggactttggccactttaatccagcagaggtttgagcacctacctttactgtgtgggactttctgcctgctccagtgttcagagggtagatacagagatgaggaggctgctctcagagtccccactcagaggaacatcagagcagggggccctaagatgggcaacagctgcaattacttgcctgtaattctgctcagaatgtctgcactgtggatatcaacgaggctattatgtaaatatctggttaaaaatgagattgcttttggcatcttcgtcatgaagtctttgactgttcctatgtctagaatggtattgcctaggttgtcttccagggtttttatagttttgcgttttacattcaagtctttaacccatcttgagttgatttttgtatatggtgtaaggaaggggtccagtttcagtcttctgcatatggctagccagttatcccagcaccgtttattgaatagagaatccttttcccattgcttgtttttgtcaggttggtcaaagatcasatggttgtaggtgtacggccttatttctgggttgtctattctgtttcattggtctacgtatctgtttttgtaccagtgccatgctgctttggttactatagccctgtagtatagtttgaattcaggtagtgtgatgcctccagctttgttctttttgcttaggattgccttggctattcgggctcttttttggttccatatgaattttaaaatagttttttctagttctatgaagaatgtcaatggtagtttaataggaatagctttgaatccataaattgctttgggcattatgtccattttaatgatattgattcttcttatccatgaggatggaatgtttttccatttgtgtcatctccaatttctttgagcagtgttttgtaattctcattgtagagatctttcacctccctcataaactgtattgctaggtattttattcttctcrcagcagttgtgaatgggattgtgttcctgatttggctctctgcttgactgttgttggtgtattgattttgtattctgagactttgccgaagctgtttatcaggttaaggagattttgggctgagactgtggtgttttctagatatagartcatgttgattgcaaacagggatagtttgattcctctcttcctattgggatgccctttatttctttctcttgcctgattgccctggtcaaaacttctaatactattaatatgttaaataggagtgatgagagagggcatccttgtcctgtgctggttttcagcttttgcccattcagtatggtgttggctgtgggtttgtcataaatggctcttattagtttgaggattgtggatctaaccaaactaaagagcttctgcacagctgaagaaactatcaacagagtgaacagacaacctacagaatgggagaaaatttttgcaaactatgcatctgacaaaggtctaacacccagcatctataaggaacttaaacaaatttccaagaaaaaaaaaaaaaacattaaaaactgggcaaaggacataaacagacacttttcaaaagaaggcatacatgcggccagcaatcatggaaaaaagcttaacatcactgatcattagagaaatgagaatcaaagccacaatgagctaccccctcacacaagtcaaatggctattatttgacttgcgtgaatattatttgacttgtgtgaaatgagatacctcctcacacaataatggctattgttaaaaagtcgaaaaataacagatgctggcaagattgcagagaaaaaggaacgctcatacgctgttggtgggagtgtaaattagttccaccattgtggagaacaatgtggtgattcctcagagacctactcacaatagcaaagacatggaatcaacctgaatgtccatcagtggtagactggataaagaaaatgtggtttgtatacagcatggaatagtatgcagtcatgaaaaggaatgagatcgtgtcctttccagcaacacggatgcagctggaggccattaccctaagcagactaaggcaggagcagaaaaccaaacactgcatgttcttacttacaagtgggagctaaatgatgagaacacatggatacaaagaggggaacaacacacactggggcctatcagagggtggaggatggagggtaggaggagggagaggatcaggaaaaataactagtgggtgctgctaggcttaatactgggtgacaaaataacctgtacaacaaacccacataacatgcgtttacctatgtaacaaacctgcacaagtacccctgaacttaaaataaaagttaaattttgaaaaattttaaaaaggggacagagagagaagctgtggccccagctgggtggttttctcttttctggctgatgtctgcatggggagagtcccttccctgccccacttcattaccacttgccttttattttgaacttttatttaaaatactggttttggatttcaaccagaattttaagacttggggtctcatctattgcatctcatcgagtaagtccctgggaaccactgtcctttagcggcactgtccttcctaaaacaccggacattctaacacggaaaatgaaagcaaaccgcatgcatttcctaggactgcccataataaagtaccccaaactgggtggccgaaaacaacacacttattctctcccagttctggagactggaagtctgcaatccaggtgtcggcaggactgctgtctcttcgaagtccccctggggagaacccttctgagcccacctgaccgccccggctcttggtggcctctggcaagcatctctccatcatctctgcctccgttttcgtgtggccttctctgcctgtgtctctccaggactccagtcgtactggatcagggacccaccctactccagttgtcctcatctttttttttttttttttttttttggagacggagtctcgctctgtcacccaggctggagttcagtggcacaatctcggctcactgcaagctctgcctcccgggttcacaccattctcctgcctcagcctcctgagtagctgggactacaggcgcccgccaccacgcccggctaattttttgtatttttagtagagacagggtttcaccgtgttagccaggatggtctcgatctcctgacctcgtgatctgcccgcctcggcctcccaaagtgctgagattacaggtgtgagccactgagcccggcccagttgtcctcatcttaacccattacttctgcaaagaccctatttccaaacaagttctaaagtactgggagttggtacttcaccatatggtttttggaagggacacagctcaccctgggccgcggatgctggctcctgttagaggactgtgctttacaggcagcgcctgtggccctgtgagaactctcgctgcaatctttgctttctcacttttacagaccaacaagccctaccacagaccaggctgggccttggctctggccacttcgtgtcgcgtgcctgctgactggcgcttgtctcctgtgttgccagcctgcttgttagagctcagaggcagggaccttgcccccacatctcctgaatctcccacctcgggcagcctggcaaggccatagagatatgaacagcctgcccttccagctcctggggtacagcccgatgctgttgacattgcctccacctcccttccttgtctgggctggggagggatttcttggctcccataagcctttgtgggcttcctagtgtgtgtgttttgtcctttttcgtcctctgggctctgggctagacagggctgctctccatgaagtccccacccaaccttactcccaggagcagcagtgattgacagacagctgggcaccaccacctgccrctcacccacagatgcagccgctgcggatgctgcccccgccccacctagagagcataacttaacccatggtgacttcgttaacaagagatgcgtagcggggccccaggaaggtggccctacacccacggtagctcttggttgggtgcctatgtttcaggctgtgctgatgagcctggaggtgcctgggctggcccatccatcggagaccccggacagcctggctacccaggaaggggagctgtcacttcccagcgctgagtccagggctgtccacgtgggccttcagcaaagcctgactgagcctgccaggtcccaggctctgctcccaggtgggtgggcatggggggcagtggtggtgtgatgggggcgcagcaggagtggggcaggtgaagctggtcctgccaggtgctgccgcccttccaggtggtacttccgataggtggtgttcggctggtgacccctgcctggaggtcgaggggaagcacagcagrgccagggcagggagaagcgtgtgctgcgcgcagcccaggaaggaggggcatggagcagaaagaaacacaggtgaactggaagagcagagagggttcatgcttcctgcacacatgggaccagggcatgggcctggtggggggtcagcattcctccaagccaaaaaacacaggtgtgacagccctttttctaaaacattacagaggcagcaggagcagagatggctgcagggaagtgactgttccccaaaagcaagaaactcctgttgcctcacttgtataagccaagggaacccctcgctttctgtctctggagtcactgaatatttttgtttatgtcactttatagcagtactgatgcttaggttgatctaagttcgtttttaaaacacaaaacacgtctttaagtggaatgcacagttagtatgctcctgcgaagcggcagccccgctgccctccctggctctgcggccacctgctgaggatggttcttctaggatgagtcaggagagtggagcaaggctcagcctgcaggtccttgctgagctcagggaagcagccccgtgaggatcgggctgcgtggtctgcaggggaacctgcctgggaccctgtgagatttacctgtttcaggtgccagtgatctgctgggattctggagaggtccctcaggggagcctggcacttcctacccccttgagtttgcaaagtcacaactgagggcctgggttgggacggtgtcatgagctctccataagctttgcttatggtacaggagcagactgtctggcgcttctggagacctttaacgtgctcctgtagacagtcgggtaaactcattctggtagcacagcgtggcctccccctccacctgacatctgaggaagtggcaggctctgcatctcggtggcctcgccccagggtgcagggagcaactttgaggaaattagtgctgagcctccagtaggaaggaggactgtgctggggaggcaggtgagccccttgtggtgccgcccgcaggtcacactggcctggggcccctgcagaggaaacaggatccaccagccaggcccgctgaccatttggaagtggagcgtgcacacaggcggctgtgcggtcatcgtctggcaaacaaatgatgggaccggaccaggagcagactggctccctgtggtggggactcttggcaggcggatcggcttcttaggaattaattcycaggaagccagaaaagggggaccctgtggcaccctctgcttttgctttggtttmacatgtttcctaggaggaataattaatcttctttctctgaggcaggctgtgtgtgtgtgtgcatgggttgtatgtgtacagtgtgtgygtggtatgtgcatttatgtgttgtacatgtgtgkatgtgtcatgtgcattgtgcatttgtgtatacatgtgtgtggtgtgtkccttgtgtttgtttttcatgtgtatgtgtgcagtgtgtgcatttatgtgttgtatacacacatgtgtgggttgtgtatgtgttgtgtgtctgcacgcacagatgttgtgtacatgtgtagatagcatctcagcctccttgggaggaagccttgagtctttttggctctgctgagtcatagctggtgggcttgctctgcagtgctgactcaccacacagaaaaacaagaccaaaaagtcccctcagtctattaaaaaaaaaaaaggatgtaagataaatrtttggctattcaagataaggccactgactcattcagggaggttaggatgactgcgtgtcctcccaggaatgcagacttggagataattggtttgcagacactgtatctggaagcagaaggtcagcagaaagcctttcagatagaaggtatatgtacccctgtgagttttcctgcctcgtcgctctctttttatggccattaggtttctgttcccactgctctggaagcgtcactcagggtcaccctctggctgctcagtctggggtctaggcactggcctggcctcatcacagcactggcacgggcctccgacttttcttcccgtggccccactgctcttcccggtctccctcccacctcttgtctgttccttcttgaatccctccttcttcccacgacccaagctctctccgacgccagcaggtgcccgcatgcatagtcatagcgtcagggcctctggggaagagaaaacagcttcgttttttgagtggctactctgtgctgggactatgcccccctcatttacccctcacagctcatcccttctccgtgcacaaggtgacatgaacttcatgtagagagagggaaactgaggctgaagatggctaagtaatgtgcccagggccaccctgctgggcaaatgggggtttgcaaagtggcagtcggacccagcttgtgctaataccagagcccactttctctcctgcttccactctctgtcctgcctccccaccccaagagccctctgtcaaaatgacatctgtgaggtgagacatcacttcttccactggtattaaaagttgttcgcccagaatggaaatgtatcacttgcatttgatggtcaagttatgcctactgccttgggaacaaagaagacagtcttgatgataggacggggtgcagatgtcacctrcttcccctgtggaggacggggtggagaactttggagctcctttcttcttgctccagtgtgggcagggaggggcatacagagcactgacagccctcagtgttttcagaagctggttctgggcaagtctcagcttgggaggagcctgatgtgatgctggaagtggcattgttagcacttggggcagtcagagtgaagggagacattcctcagcctaaatagatcgtgggcattggtttttgttgttgtttggtgttttttggatttcactctgttgccccagctggagtgtcgtggtgcaatcatagctcactgcagcctcatcctcctgggctcaggtgatcttcttgcctcagcctcccgaatagctgggactacaggcatacgccaccatacccggctaactttttaaaaattgttttggtagagatgggggtctcactttattacccaggctggtctcgaacttttgggctcaagcccgcctcccaccttggcctcccaaagtggtgggaccgtaggcgtgagtcactgcgcccagcctggatattgttaaacattgtctttatatacaaatgttggtttcttttccaggaacctgggcctatgcagggcacacacgccggtcagttgtatgtacctaatttcacggtagccaactatgtctgtagccgttcaagcaacctgctattttattctgttttgtcagtagaagaatggagttcaacagctttgctggtactcaatacctggaaacagacagcatgttcttaacacatgcttttttcctttggagattaagggatagtattccagtttgacaatgtagataccaggctcctgtaattcctgtggcccagggaaacagtggctctaattttcaggtcctccactgcagaatgactcattcctgtgtgatctgagcgtgatctcgcctgcatgggaagctgccctgtaagggagcaggccggtgaggaacggaaaggaccacagcagcgcccaggccgccctgccaggccaggctagagttgcgcagataaaggccccgcatctgataagtgtcgccgcctgcccctgctggcgctcaggatcgtacttcttgtccttttaaaactcccttgcactccagcgtcattggaggcctgcaggcacactctgaaatagctgtacgtgtgggtggggaggagatagatgtcttaaagtgtacggatcatttgtttctctgcaggtgctgtcacactggaagcttgtggaaaccgtgttgtgtgtgttaactgagtggtgtgtttaagaacacagtggggcagggccaggaccaagtacaagatcaggttgagtcttgcattgtcaagtacgagactggctagcacagtcagtgaggtcttttggctatcactggtgcattttatttcattcagtccttttctcatagctctcttctgcttagctatttgccaaggcaaaaatagagggctctaaggaaggttacattccagagcacactgacttctattcatacagggggtggcggaaggctgttcctgggattttcagggtgacgataaggttgtgccctagaagtgtgaattcccggagaccctgggaggccccaacccccagcagaccccctcctcagaggctggtcgacagccagcatgcccgcccagtrcctggcgagaggtcagggcgcattgccggatgggggagcagaggacgccggagtccaccgtccgcccttcattctggctggtgtcgggtcacaggtggccggatcccgttacccagcccaggacgttcggtttcattgaagaatacctttccctttctgtttccttgtgccgcagatgatttacatggacgatggagtgtcatcttttgtccagatcagaggctccgttccgctgttctgggarcagccagggcttcaggtaggtcatgaaaaaacttaaatgtccccttgtgatgttgtccgccctgcccttcccttcaatagctggggaagatttcttttaacacgttcgtttcatggcatagtttccagtctttttcctcagccctgttgtgttgagctgagctatcaaagtgtgcacacgtgtgtgcatatgcatgcgtgcgtgtgtgtagaaaacacagacaccactttgttgtttctggtcgtcaaggatgctgtgtgaaaccgctgactcgggaacggtgctgcggtgcctgctgagtgggtgccgcgaagtgagcttgggtagcactgcctgaggttagaccctgagttcggtgtactgaggacgtttctgagagccgtgactctcayggagggcttcaggaaggctctgtggctgcgtaggtctggcacccggtgctgcctgttgtggggccacgtgagacttccacagctttcccgtgatttctaaaaataccccttgccgtccaaagcagggctctggtcagtgccagagagatttggcattctttctcctgggaagagcacagggtggggacacattccaagaacacatttgtcatcaatggaatgacacgctgcctccttcaccagggtctctaacaaggtgggttatgggccgagtggactggaggggcctccccactaatccccagtcttcctccctgtcccgaggggacgtgggtgccttcagaaagcctctcggccagggcctttgtcgcctctcggctcttcttaccgacagctctcgtgtgactgcatttgggttgccagccagtggctactggggcccagagtgccatctgccaggttccagggggtgtttgacaacgctggactcagggtccccagtcctgggttcagcttcttagcctgctctttgacttgaccctgtgccaggagcaggtgagtcacttgtccccatggctgtcagcacgctgcagtgacagcattggtgaagtactgggtcagcctgggcagtgagatggatgaatggaggtctcgtttaggctccacgctctggtagggagaaaagtcttgattaacattcagtctttccactagaaagagcgcaccacactgcacgagataactgacggcctccggagaaacgctcctgaggacagctgtgacacagaaactcctccggagggctgcccaaaggaggtttttggaaaaatagctttattgcaatataacttacacacccatttaaagcctacaacttggtgcttttactgcatttatggtgttgtgtaaccaccactgtaatctaatcttagaacactttgatcaccactaacaaactttgtccccgttagtggtctctcccatcccctccaagtctccctcatgccaactcgactgttcatctactgtctttatctatagatttcccattccagacgttccaaaagagtttttgaaacctgattttctttaaatatggagttttcctttggaaacttctcgagctctgtattcaggagaatgaaagaattgatcgaatgagtgtggcacaaaaaggagacagggagaccatgttgtgtttcatgtaaagtttgtaagaaatccaaaaattaggggaatggtcatgatggattcttagaatttgggaaggaccctttggaattcatccattccaccctctgactctcagttcaggggtcctccytttttttttttttttttttttttttgagatggagtctcactctgttgcccaggctggagtgcagtggtgcaatctcggctcactgcaacatctgccccccgagttcaagccgttcccctgcctcagcctccagagtagctgggactacaggtgcccactaccacacccagctaattttgttgtatttttagtagagatggagtttcaccatgttagccaggctggtcttgaactcctgacttcaggtgatccacccgcctcagcctcccaaagtgctgggattacaggcgtgagccaccgcacctagccaggccagttcagggatcctcttccaggacctccaaagggctgtcctccaggccacaactggggatggttccgactcttggtgaattcctcctgtattgcactgctgcgtctgtctgactctagagtgttttggggtgcgcgggaatatgtctgattcttctccgtgtgactcaccctcagtccttggagggagtcttctggttccctcttcttcttcttgtcttctctaaggcctcccaactcctttggccaccttccctcctgtttctaagactctcaatgttctcatctccctcatctaaaaaatgacactcctttttgtcgttcccctcttggatttcattttggtcttaccttgaccttcgtgctgcctcagatgtagcctgacccgccatgggatgactgtgccttggtctgtcaggggccaggagcagtggaccacgaggtctcagctttttggcagctgtttcaccctcttaaattcctaacatttgtgctgcaccaaagcctccatggtttcttctttttgtttcttgttttgttttgtttttgagacgaagtcttgctctgtcacccaggctggagtgcaatggcacgacctcggctcactgcaacctccacttcctgggttcaagagattctcctgcctcagcctcacaagtagctggggttacaggcacccaccaccatgcctggctaattttttttgtatttttagtagagacagggtttcatcacgttgaccaggctggttttgaacttctgacctcaagtgatctgcccgcttcrgcctcccaaagtgctaggattacaggcgtgagccatcgcgcccggcctccmtggtttcttcaaaacaagcttcagaaggctttagtgttccttaatcttattaaggatttgctaacctttgggcctaatacctgtgtttagcctctaaacaccactcatcatcaaagagagatgaagtcatcttcacagggggccgggagggcagcgggaagtggtggtctaccgtcaccggcttcaactgtcactatcaagcctaaggctgcttctagttatttttctccactttgaactttttctcttccttcttcacttaggttagatgaaaagtgcaaagattttggggtgagtagcttgcgtattaagctgcaatgctgtccctccttgacagctgccgttggaaacccaggagcccagcaggatggggcagggttgagcagagggtggtggatgaggatttgtctgcatgttttcctgggtaatggtaccttcagtacttcctgactccatttctagcagccgtgtacctttaataaatttcatttttacgtgtaaatgggctgtgcagtttataaatagccacattgaaattttacccttaaagcaaattgctccctggtctagctagttcgagaatctatttatgatctgtgtctgtggttgacaacgttgctcccctggtcattgtagaagcttccccccmccatatgctgtatagacacgtgccttgccaaggtgagttcagtctgtcttttgaagttycctgcaactgaaccaaacggaggaggatgccgagtagagcagacccctcttgccctgccttcacctctttcctgccagaaaccattcgccaagtttgtggagtcgtggcgctggatgggcttgtgtgtttgtaccttccttttttccaaaaaggacatgagatggcttgtagtataacagtttcaaaaataagtgaagaggtctggatgaagggcaagagtcgaattggtgcccacgatgcatgccgtgggtcttgtgtgcgtgggaaggaacctgacgcttgttccaagcttccccgcagccaccacagaaagaaccacagtcacagccagtttatgacagtgactcagagcacgagctttgaagygacgcagacctgggctcaaattcaaactctggctcccctgctttgtaaccatgtgtgtttgagaggctcttatctgtgccaagccttagtttacttttctgtaaaatggggctaacartatctaccttatagggttctagagaggattaaagagcgtaatataagaatttggctgggcatgggggctcatgcctgtaattccagcaatttgggaggccaaggtggacagatcacttgaggtcaggagtttaagacaagcctggccaacatggtgaaatcccatccccactaaaaatgcaaaaattagctaggcatggtgtcaggttcctgtaatcccagttattcaggaggctgaggcaggagaatcacttgaacctgggaggcggagtttgcagtgagccaagattgtgccacyacactctagcctggtcaacagagtgcgactctgtcaaaaaaaaaaaaaaaaaaaaaaaaaaaacacacagtatctagaatctaaaaagtactcaaaatggcagctgctattgatactaatagaaacaaatgataacacccaggagataaaaccaatggtggcatccggagaagcatggctcttggtgccctgagcactgaatgagagtttcctcctgtctttgtgggaacagggacaccgtgagatgtagtaacatgaagacagcttcctggtcagtcttatctctcatccctcatagactcatcgtaaatcagtaaccccagatgaagccatttattcatcccaaacattcactgagcgtctgccaggtgtagggggcaccagggatcagatacagtccctaccttcagggagcagggggcaggacagggcagtgttgtgtggacagagccgtgttggaggaagggagaggccccgggggcagctctcccaggctgagggtgtggggtgggctgcccaagggtccagactggggaggggtgaggaagaagcactcaggcaaggaaggcagcccttgcagagggaacaatgggtgcaggtgttgtaacccttgggttcacagtgatcagggagcatcactgggtagcttcttgaagtcctgggcatgaagggaatgggaggagagataggagaggtgagcagggctgggtcaagggcctgtggatgctacactgaggagtttgcatcccataccagcagctactcaagcagtactccccaaccttgctgcacagaagactctgctggggagcttgaaaaatcctgatacccaggttgataccatacacattaagtcacaatatctggggccgggagccaggcagctgtcctttttgaagacccatgggtgactccagcatgcagaaaagtatgggaaccactcggtgctgtgctggcaagccagttttattggggtcagactgggtgcagggagctttggtttgtagcatttgtccattgctgtggtgtaaattctcccatcgtggccactttcaacctacggctccacatcactgagctcagagttgggaccagctgggtgcaccgtcggcttgcaagcctgcaggagctggctccagcacacactggacactgctaaagggctgcaagaggtagagacacaattagacagaagtctaggcagtgttagtttggaggggaaagacaccagatgggaggccgttgagctgagatttttgggtaaccttaagtctggtaggagtggtggggtgcaggggagaggtgtggaggtgctgtctgcgatccttgggcctcttgagtgctgatcgagactctgctgtgacttccacagccaggagttctccagaccccgactatcctcatggctgtctacctaacctcagtctctggtctataggattgaactaatgactttaggggccagataagagtagctggccctttgcccagaggggaggaggacggggtggaggagaagggaagctacaaaatgcagtgacagtggtggaccctgccctcagctgcagctcgtgcctgtggcttctgacacccagtgacctcaggactaggtgacaccagagaaggtggatgctggtcagtgttggagcaggacagaggggaggaaggatatgaggcccaaggaacccagacaaaagggatgcacggggtgacggaggaagggtgagctccggagagaacatgaggcccagctcccctccacttttgcccaaggcctcactgtgttgcctttccacctgcytaaaagaagcagcttagggtcatgactcagggagaggcggttagacaagtccaataatacaacttgtttaggggatggagggacccagcctgaggccctgagcccagggaagcagctgtggcaagctgagcctggtcatggtgtccctgaggctctgcaggtatggacatgcctctgctggtatgcatgcagctctgcaggtggggacacggctctgcaggtggggacatggctctgcaggtatgcacgtggctctgcaggtggggacacggctctgcaggtgtcgacatgcctctgctggtatgcacgcagctctgcaggtggrgacatggctctgcaggtatgcctgcggctctgcaggtatgcatgtggctctgcaggtatgcatgcagctctgcaggtggggacatgcctctaccagtatgcacgtggctctgcaggtgtgcacccggctctgcaggtatggacacagctctgcaggtgtggacagggctctgcaggtgtgcatgcagctctacaggtgtggatgcacctctgcaggtatgcacatggcccctggagctgtcttccctgctgtaccttctaccccttcatgggcatttgtaacctaagccaaaagggaacataacaagtccagaaataagtcaaaaccagaaccactcaaacttcagcgtgtgtgcataggaatctcctggagggcttgttaaaacacagattcctggccccacccctggagagtctggctcagcagatctggggtaggcccaggacttcgcatttctaacaagcacccagaggaggtccaacgaccacactttgagaatcactggtctagacttaacagatcccttctgcccattccctgctctggtcattcacccgggggtggtgctcccgactgacttcttagttctctgaggtagaaaggtttgttgtcagcagtgatactggactagccactgcaggggatattgaccatgcctgtgacagttgggcccagccctgtccacacggaatgcttgtctaagtccaggataaaagacaagcctgaggcctcagaaaagatgtgctgcagcccctgtccgggctgtgccttctgctgtgggcagctgattccagggcatgccgtctgcttgccacattccctgagtcctcactgatgtggttgaggggaccccatcaaaggcaggtgcctcatttcactctgctttgctgcctgttccctggactcaagggcatagtttctgtcaaattaatttgcgcttgtgcaggtttgttagaaactttgaagtgcttctgggtctttccatgggggttctggttaggtgtcatcacccaggccaggggattcagcgtctcccatccctttcccacctttccatgayacccaatggcatgttgactcggagggcgctcagtaactgaggaatggactgctgactgatagtgcagtttatatgttaacgggggagctatagagcctggggattggagcctgctaggtccagtcatctgtgcaacagtttctacctaattaaaagaagaggctttgggttatgactcagggagagacagttagacatgtccagtaatagaacttgtcacgacggagagccaggctcctcagccctggcctgccaagcttgtattctcttcttactgtgctcccatggggaatgatcctataaacagctgctgctcattgctgaagccaggggagacttcttgtgatgactgacagaccacacagagcagstagcccctctcttgggttttagccctggtgacctctcatagggtggctgaggggtacacagacccgctgacttccctcagggtgcaggatggagcaggcctctcggtagtgcgrccatgaaagttttcaaattttctgagatttcctcagccaggtgttgatggccatggggataaaggacagaggtaacacaggcagcaaaaaaataaaaaaaaaccccacaggtttggggtgagcctttcttaggagctccattagccaacagccaagatacctcattttgcactcacttcacttgtgaccaaagtgtcttaggaccaaaagggatttgggactttgttgaactgtttatataaaaaaaacctggctgggcacaatggctcaagcctgtaatctcagtactttgagaggccgaggtgggtggatcacttgagcccgggagttcaagaccaacstgggcagcatggcgaaaccccatctctacaaaaaatacaaaaaaaaaaaaaaatagccaggtgttgtagtgtacacttgtagtcccggcaacttgggaggctgaggtgggaggatcatttgaacctgggaggttgaggctgcagtgagccgtgattgcacctctgcactccagcctrggcaacagagtaagaccctgtctcaaagaaaaaaaaaaraagaagaagaakaagaagaaaagaaaaggaaaccttctccaaggaatctctaaatctattgctgagaaaccagttctctagatgggtgcttttcttgagtctgagatggggcagttgtatcacctgcagtgttgagttatacaatgatacatgaagcatgataatagctgcatctcataacatagataaatctgctgacactacttttacaacactcaaacagaagcaaaactaaagagtgcatttttaactacttattcttgaaataatttcagacctacagaaaaaatttaagaacaagagggarctcccatatgtccttcacccagattcactaaattttaaccttttgccacacacgttattattttttgaaccgtttgaragtaggttgcatatatcacattggtgttagtccatttgccttgctgtaaaggaatacctgaggctgggtaatttataaaggaaagaggtttatttggctcatggtaatgcaggctatacaggaagcatggtgccagcatctgcttctggggagggtctcaggaagcttacagtcatggtggaagaggaaggggagccagtgtgtcatatgaygagggagggagcaaggagagggaggttgcaggttcctttaaacaactagctctcctgtgaaccagcaagaactcattcattaccatggggttgtcaccaagctattaatgagggatctgtccatatgatccaaayacctcccaccaggccccacctccaacactggaggtcacgttttaacgtgagatttggaagggacacacatccaaaccatgtcagtgtctctttacttaagtgcaaaatatactctcctacatatagtataggtacacatttgggaaatttaacattgacaaagtacttcaatctcatctgcaggcaatattccaaattgatcacttgtctcagtgatgtcctttgaagcaccttttcccgccttgagtccagcatcacatactgcattttgtggtcatgtctctagtctttaatctgcatctgttcctcggctttctgtctttcaaaacattgatgtttttggagaatgcaagccttcttttccgttaagtcgagggtccctacmtttacattttcctagtgtttcattataatcacattcagtgtatggatcmctgaccagaatgctacctacatgatgctgtatccttctcagggtaccagatctggaggcacacggtgtccatctgccactcattagtgatgttaattttggtcacccagtcaaggtgctattcagtttctccacttacggttaatatgttttcccttccaactaatcagcaatctatgggagacactttgagaccatgctggtatcctgccttttactaaactttcccttaagatttatcatcaacagataatttttgctgaacaattatttactrtgacagttgtaaaatgatgatttttaaatgatttcctccaaatttattacttggtattctactatagagccctctcttgttccccattcacccacctacacacccacccacctgcacactgattcacccatctgtcacccattaacccatccattcatccactcattcacccacccacctgcttatccactcatcgtccacctatctacccacccatccacctatccacctacttgtctacccaccatccacccatccctctatccagccagtcatccatccatccatccagtcatccacccatccagccatccagccatcaatccacccagccatccacccatccatgcacccacccatccacccacccactcacccacttacctatccatccatctttcatctacccattcacccacccatccatccatcctcacattcacctgtccatccatccacccacctatccatctactgatgcatccactgatccatccatccacccacccattctcttatccacctttctatccatccactgatccatccatccacccacccatccatccatccccattcacccatccatctatccattcagtcgcccatctattcacccatccatccatccccccattcatccatccacccattatccatccattcagccatccacccatccattcacccattcatctatccatccactcacccacccacctacccatccacccatctatccatccactcagctatccatccatccatccatccatccatccactcagctattcatccatccacccacccatccatccactcagctattcattcatccatccatccacccacctacccatccacccagctattcaaccatccatccatccatccatctattcacccatctagttatcatcagtatagattcatgaatttctattttattcatcaggttaaaatccattactgtcctcatacagtttgatgttcagattgtcccagatttggccagcaaaagcccctttaagctgactccagcaacaatatgtattttaaatgtattttctaaaactaagttgagtattaaataaatagttctattaataataaggcaaatttgatcattaggatgactcagattttagggggaaattagtgtccctgaaggcataaaggagactgagaagcagtttctgtctccacagttggcttcactgacctctgtgctatcagagagcttaggatctgacatctgcctcatcatcttaccctggatctgctttctgtggaagaattgcagcagacatggtcatgttgcagttaggactgggcagcagcaaagccagactcgaggcacctagacctgagtttggagcactgttagctgaatccagagagctcagccttcctgagccctgaagagaccacagaggtggcctagtgggtgccacatgcagcctggctgggagtaagaaggagaatgggaaaaaccayggcctccttggtttgcagagaaggaagaatcactgttgttacttctctttgctttaggttggctcccatcatctgagactccacagaggcctggaagccaatgcccctgctttcgacaggtagggattgtctgacaccatccaagcctgtcattgtcatccttagacatcgtcctcccatcagacacaagggagagggtgcgacgggaaagggaggaccctgaaccctgaatctaaagctgctttccctttggtcctttatgcaagaagggagatgacaaaatgggatttttactttgttctcaggtttcctgaaggtaaattaatgaatgttcaggtagcactttataattattttatcttaccagtttcttgcaatgaggcttcatctctatgccctggttaataagggatcatctaaattatagggtatttgaagctgtttgttttttgttttaaaatagtatagaataaataagtatagaaaagtataaagtgaaaaataaaagtaccctaactcccagttaccactctcagagattttactattagtagttttttacatgtcattctagaaaacaattttggcattttatgtgtgtgtgtgtgtgtgtgtgtgtgtgtgtgtatttaaatacacaaattggatcataacacatttactgttttgcagcttgcttaagaaaagcagagctatttgtaatatgtatttgaaataataacttcttaaaagatttgcttatttaatctaaatactcaatattttaaaattgtcttagtgaatatagtaaaaattctcgaaagtaatgtgttaagtgtttgagtccttctacctgaagctttattgagactttaagtttgctttcatactcttgttaaacataacacttgtcatatgagcccagatgtgaccccctgattagtgtgtgacatgtaatgcgcttttctttaaagagatatttaatcaagtatagacaagaccattgccttttccaaagcattattagtatgtcctgagcattctacatgcggagttctttcagttgacattcatctatactaaattgtcttaggaaatagtgaacatgaaaccaaaaatgaaattctacctggctgagcttggtggctcagattttagggagtcgcctgggtgacagagcgagactccatctcaaaacaaaacaaacaaaaaacaaaaatattctacccgaagctgacccaaaacaagagggaagggtcatgctgggttcgcttcaggaaccctcctatgtttaggagctttcttaaaaaatacatacatctagttgaagcacatttgcatagactgcagatttttcagaatcctggtaatgcatggtgtgtgagatgcacgtaccacagagaatgagacctctctctcctcacaagcaccccagaggctgccttgccccttggaaagcattcctaaatctaggggtacacttagatctcttctgcaaatcacaggacaagctgctgaaagggtgagtctttctacaggcagctactgtgtccaggaagtctcttctgtaatgcttcttacccacgacactgggctggaggcaggagccctcccgttcccttgcaggtgctgctgctctcatgttcattgctgactatgttcccctcattcgagataacgtttggaaataaggtgacatgtctgcctagtggccgcagtggggcaccatgagggtccccctgaaagcaggctgcccaggtcctcgatggtgtccctggactggcatgtgcattgtcctgggtgcttcccaattctcttctctgggacatcactgcgctctcaagagtcgtgcggttctctgatggatttggttgagagtaaatcctttctttcccccgcaaaaccttcacacagatagtttttcttcccagaggatgcttgttttcctttgcctgagctgcatgggtgcccctgttagccgaggcggtctcttgtcactttgctgtatgtgctccatatctgaggagggctgtttgcagcaggactttggctgcagctgcttgagtggggtcttgtcatctctgtgtggtgatgagtctcggtggaagggctaacctttcacagggcggtgcctcagtctctcctcacaggacagtgaaccccttctccttccccgccccgctctgcgkgcggctgctgtgcacatcagggtgtgctgaactcttggtccctccctgaagatgagaaggatgcttccaaatagaaatctgattcctcagtatcccgaaaaactcctgttttccaagtagcttcctatgacagtaacccgtaggcaggggaagtgaaaaaaaggcctcaatgctcagggtgacccaggaagaagcccgtatgatgccgaccttgctgctggtgccagcgtccccttacaccctgggtgccagcgctcccttacgccctgggtgccagcgtccccttacctgggtcggcagggcctctcagctcaccaataacgagcattttacaataaagggaaagaaagaggaaccacgtcccacacaccaagcactgtccttgtcactttcactcgtctttttagtcctcctcgccattctccgcaggaggggaagtagccctgctttatagatgaaggagccagctcagaagggatgaatcatttgatcaggggagtttggggttgggacagcatagagtaatgatgaggaatagtgagtaataatgagtaataacagtttccttctggccctgggctttggaaccagttgagaagaaggggcaggaatgagacaggaagagatcagaaatgggccttgtttccgatgagccacattgtgggatgtrgcttggatgtgtggccacggtgggctccctcaccaggggcagagcctgcacgtgtcagagccaggcctgggatgcaccttctctgggcagaccgacccaaaagaaagcccacaagggctgaagccacacacagcccsccccagggctgcctggagctgcacgtggagacgggagcccgggagggtgctcacccttaacttaggccagggagtcagcaggcaagcctaacttcaaactacccacttcaaaatccatagtctttctactactgtcccttaaagttagtaagagaatgttttctcttactgcataagaaaaaaaatgatttttttcatgatcattattagctctttaaaaaattccgctcataaacgtgtcattacagaaatttggaaaagagaaagatgtttaaagaagaaaagaacttgaatcatataaaattctaccacttttgacatcatgtgtttttttccagtgttttttctatatttaggcataaagattgcaccattaaaygataatttgacatctgctttttgcattgtatcatttccctatgttttgtttaaggcactacatttcaacatgtttaaatttgaaatgtaaggttacttttaaaaagctggtgatcaagaataaatattggaatctctccctaatatttcaacatacatatttagaaagtagcttccaatacaaggaatgttttccaaagcctgcaagttttgttgtatctccttgttgtggtttagcataatgcaatatagcacttagattgaaaacaggatgctgagttgagagctctcctgccagttgttctagttttgagaagggtgggtaccaagcaaaataagagattcatttcacacatgtgcacattgcatgtgtaagactctagcccaggcacggtggcttatgcctgtaatcccaacactttgggacgctgaggtgggaagattgcttgaagccaggagttcgagaccagcctggacaacatagcaagaccctgtctctatgaaaaataaataagtaaaaattagccagatgtggtggcatgtacctgtagtccctattacttgagaggctgagttgggaggattgcttgagcccaggagtttgaggcagcagtgagctatgatcgtgccactgcactctagcctggacaacagactgagatcctgtctcaaaaacaaaattctcttgatgaaagttcaggttaggtgttctagatataatgggaggtgctttatagaaagtgcagcatatcctttgtctgattccaaacaaatgtagaagtctacgctagctagtagtaatggcagctgggaggtgcaggttctctccacccaggctcattttccacgmtttgggtcatgggggacagctggtcctggactgtggcactaagaaagcatgactcctgccccgtcttcccttgaggggcagaacagggcagagtctgcacctgtgcccgtgcccagcatcacgcccaccccgctgcctttgcaggcacatggtgcttctgaaggagcagtacgggcagcaggtggtcgtgaaccttctgggaagcagaggcggagaggaggtgctcaacagagccttcaaggtaaggccaggctgycctctccacagctgggctgggcggcaggtggccatggtggagcgttgagcctggaggtggctcctgcagggactggagctgacagcccagccctccttcgtttcctgaggcttccccagcattccgaccagtgaacacggcagtgctcagtgactcgggccctgatacagtgagtgtaatttcttttctttttttttttttttaagacagagtttggctcttgtcgctcaggctggagtgcagtggtgcaatctcagctcactgcaacctctgcctcccaggtacaagcgattctcctccctcagcctcccaagtagctgggattacaggcacttgccaccacgcctggctaatttttgtatttttagtagagacggggtttcaccatgttgttcaggttggtcaagaactcctgacctcaggtgatccacccrcctcggcctcccaaagtgctgggattgcaggcgtgagccaccgcgcccggcctagtgagtgtaatttctgtgagctgatggttgggagaatttgctcaaagtcaaaacagagcatctcctgtccccagccatgtgtcccttaccctccctccccatggggctttgagggcttctgacctctcaaggtacccctctcagtccagcccaggagcaggcaggcctccctttctgccctggctggtcctgggtgagttcccccagccccacagggcacccggcctcagggctcaggagcaggaacttcggtggctttcccctgcttgccggctggccttcaaatttccccctcttcctcgggctttcatggcagctcctggacctgctgctgctgggctcctgtgggctccttcagacttccttggggggcttttcctggcgatcctggacagatcctgggcagggtcacagagccatgggagcaagagactccgcccacctggccaggktccatccctgtgcatggatcccaggcctccagcccccgccccctgctccccaggcgcaagacgttccagaatgagccaagggggctcctggttcctttaccagcctccatgtcccctgcctaatagagaaaaactctctcgttgtttaaagctcaaagatatcccttacagagagagctcgaagtcgcctcactgggggttagggcgatctctgagcctttccctctgcttagaaatgccacatgctcatgctcagagcaggcacttcctggttgccaattttatttggccagacctgcttttcctgtttggtttgttgctattagcaacgagctccagaagtgtctcccttcccacccatcttggcagtgatgctggctgctaatttgaaggaagaagggaaaaagctaaaaaataagaataataataagaaccccaagtccttttcccctatgccttgagttgtggcccctcccatcagtgggtgaagtgcccggcactggtgagggcgggagatggcagccacctcatgcggagaagggtgggctcctggccaggtagggaggggcactctagctgaagacctgggtcatggccctgcctggggtggccctcagccacctcagcttggcccagaccaaggttggtggcccrgcagcctgcccagggcccaatggccatcagtcctgctggatgaagcactggctgtggaatgcatggcactgagccaccaggcactgttgggctcctccagcttcttgctcacagcaagacttgcttgatgatggcagcactgcattgatttacactcagacctatcacaggcagtcacgttgagtcagatcagatgacccccaagtccttctagtccttccaagtcactaggacctctggctgggcagaggctggactggcctgacctgaagccacaagggcatgagtgcagggtgagaggcctggaagccgggtggcctgggtaggcggacagtttgtccttcatcacggggctctctggggagaaagccagggagctgccaggccagggaagcctcatatggaagggagggctcttaagggcatcctggtgccatcagcagccccttgacctgcttcccatctctccccaccttcactctggctccctgaccatcctgaagtagcatcgggatgtgggacccacctgggccacttcagctggagacttggtctcttcagagcataaccaccagaggctggtgcgcggcaggatggggccggttactagggcaayggggagctggattatgagctctgcagcctgccacagcactgctatctctgagggcctggggcacctgggccacctgaagaacagagcagtccttcctcacctgtgccctccagagagccctgcaggagtatgatctctccaggaagccacacctgctctggcttcttttgctcaagggggaccttctgccctttcgcaggcaagacgctctttgtgggttttgtccccccagggcctttgtcctgtgcttcccttttggggtcaactgcctggtccactgtgagcttccagctaaagcacgtcctgcggcgagtcaccttggttagccgcacgggtcaagctctgcaaggagcttgccctcctcgtcctcccttccctctgctcccctcaccgccctcccctcctcttttcagaagctgctctgggcttcttgccacgcgggcgacacgcctatgatcaattttgacttccatcagtttgccaaaggtgggaagctagagaaattggagaccytcttgaggccacagttaaagctgcactgggaagacttcgatgtgttcacaaagggggagaacgtcagtccacggtgaggctcgctgcgcactgtgccgcgtcttctgctggggggaagcrtcagtccacggtgaggctcgctgcgtgctgtgccttctgctgggtgaggcggcagaggggccgtgcagtctaggacatgtgccctatgaggggcagcttccttccctccccactcagttacccttgtggtttcctgggtcataagcttggcgacgccgggaatcttgggttccagcttctcatctcccttcccacagtaggagacaggcttttgaatttctcaaggagatgttgagtcatggttttctggcaaaagaaatgaactaataaaggggactgcattaaaacatggagctccacgctgtgacgcaggcctgtgagagtgagggccacagtcgcggtgggatggctggcatagacttagattgctagaggagaccagggtatggacttccctgttcagagcagaggagaaaaacgaagtccagttccctcaggtcacatgcagggggtcctcattatttgcagattccatattggcttatttacctattccttaaaactgatttgtaaccccaaaatcagtatgcaaagcatttttgctggacagagtatttaaatactctggcctcgtatttaaacaagtttcctttttaagatttagtaccatgtttttcacatttgtggggtctttgttaggggcccccctttgttcggggatctcatggtttagaatggccccaagcagtgtgccgaagagctgtctagtacttctgagcacaagaaggtggtgatgtgctttatggagaaaatgcacgttaagataagctttgtccctatatgagctacagtgctgtcggccatggttcagtgttaattaagcaaatatatatattcaataaggtgtctttatatggaaacatacataaaacaaggttgtatattgatcagttgataaaaatgtgaccagaggtttgcaggaacctaaccctatatttcccctaggagcgatggttctgtgttcatgtccaattcagtgttcctacaactttatagaacataattgctataaataacaaggrccagctaaacgtaaaaygacccagctgtgcaggctactgagtgtgtgtcctggggtctgcctgcctttccagaagtgctggggatccactgggatggacactggggtttctggggggctattgatgargaggtgaggggttccctcttagaacatgtttcctcacacctgtaatcccagcactttggaaggctgaggtgggcggatcacaargtcaggagttcgagactagcctggccaatgtggtgaaacaccgtctgtactaaaaatacaaaaattagccgggtgtgatggcacgcacctgtagtcccagctacttggaaggctgagacaggagaatcgcttgaacctgggaggcggaggttgcagtgagccgagatcatgccattgcactccagcttgggtgacaraggtgagactctgtctcaaaaaaaaaaaaaaaaaaaaaaaaaaaaccatgtttccttgggagtcaaaagtcagacatgggcctctgtgctatggccactgcttctttgaaaacaacatataaccgtttacatttcttcttgtcctaagttttcagaaaggcactttgcggatgaactgtcttgactgcctggaccgaaccaacactgtgcagagcttcatcgcgctcgaggtgcgtccctgccacagscttttcggccatctgtgccaggtcctgtgacttcagctggacaggctgggctgagcacctttagyggcaagatgagggtggcatcaccaagacaaccttctgactatggggaaggtggacagggagacactgggacatccagagaggggttccccaggaggctgctttctctgtcrtaggcacactttctcacaccctcttgtgaaaygcatcccagacatggtggcccaaaggctcctcgggaacagcggttgtgtgtaatgattatcgtggatgcaccattggccaaaggcagtgtgaggctggccggatgaggctggatttgaagctggggagggagacctctgtctgcatggccccagctgcctggttgacctctcctggctggggggtcgggggtagggtcagcaccccctgctgtccaccactgtttgctcttcagcctctggcattgggtggggcggggcggggtgcaggggcgttcaagtgtcagggggtgagaggagggcttgggtggaccctatagataaagttggggtgagatgtgggaagtcactctctgctgtgggaactcctcatcctctggaggggcacagagtcttccaggcacagcgtaatccacaggctgccgaataaggaacctcctgggacagtggctgcagggcctctgtgggagaagccagtgacagccatcccttattcctccccaggtcctgcatctgcagctcaagaccctggggctgagttcaaaacccatcgttgaccgctttgtggagtccttcaaagccatgtggtctctgaatggccacagcctgagcaaggtgttcacaggcagcagagccctggaagggaaggccaaggtagggccccgccgagggggcagggtgggggccccagggacccccctcacggcctgcggtctgggctctcggcaggtggggaagctgaaggatggagcccggtccatgtctcgaaccatccagtccaacttcttcgacggggtgaagcaggaggccatcaagctgctgctggttggggacgtctacggcgaggaggtggcagacaaagggggcatgctgctggacagcacggcgctcctgggtagggcctgccgcagacagggcgaggcagggaggtagggtgctccccagccccactttcccaccgcctctgtgctatccagagagcgggtggcagaggtgcctgggatctgagcagtggaccatgcaccttgcagctgtcactgcctctcccgggagcctgcgctttcctgctgggcctgggagctcacgcttcctctgtctcggcttggactgtgtttccatcctgagaagcgagagacaccaggcgggctcagggagaggccgtgcactctcctaaacgcatcggtgcctttgaatgctaacctactccagaaacttcctcagctgcctgggctcttgggcccttagcaggtgatgttggctttgggagcttcccatgaagttggcctccagtttctctyttggcccctgaggaccctgtggaaacagagaaggaggatgctgtcatcccctggggatgagggcaccttctggtctcagcggcaagacatcgtgattccatcaatataggaggttcctttgggagcattttaatggcatcttcttacctgagcctgtaaacatattaggtctcatggaaaagtaggggaaacccagcatttttccttataagaatgtacaagtgtcgctttagaaatgtcaggtgtttttgaaaaatgaactagcccatgcttaaaatgggttcacggccctttccactgtcaccgtcactgggggagctctaatttggcttccgataggcacggtgatatttagtttctactctggaaacagtgccagctctgtaaaaggtgaacaaagctccatgttgtacagtgagtcttatttaatagcaaggcagacatgagttagatttggtttacatcacaagtttaaaaggtggaatatattttggctatctagaggatggagatggttctgtgtagtgactttttaaagccttaagtctggggcaaaacaaaacatatcagacatgcaggctggaaggcagaggatgcaaaggtggctgtctgggttggtaagacacttaaagttatagtgtatatggatgcatacacaatgaaatatggtcagttacagcatgcccttgcttaaattcctatgccttgttcttctayggagtggacagtgaggacacggcttttccctgtcgtgtctgagatccctatggtctgatgtcccatggcttctggcttcagttgggggtaggggtatagacggtgagtttccagtcttatgttttcacgcctttattgtagaaatgccataagggaagcmccgtggtgaccgtggttttaagccttttgtcgtcttcgtaaggagcataccctggtttatctctagaggctcatgaaccatctgtctctgccaggcagcctcwtctgtctttttggaggatgcctgagctttggaactgcaaagaaatgtgcctttttatgcctcctgacagtgactcccaggatcctgaaagctatgactgagcgtcagtccgaattcacaratttcaagcggatccggattgctatggggacctggaacgtgaacggaggaaagcagttccggagcaacgtgctcaggacggcggagctgacagactggctgctcgactcgccccagctctcgggagctaccgactcccagggtgagggcagtgactttgggggagacaaaatccaattgcacctaacctgacatgtcacgcttgaccctttagtggccatcgtcttgtggaatttcatctttggtgtcttccctcctcacaatgtctaaatagcaccatggcctgactctcaagaatgctgcctcgcaagtaactgacctttttcctttcccagatgtttagaagagttagcagatggtgaatctctcttttctctttgcatacagtgatggtgaagtcttaggctttcatcagtagaatcttttcrtcaccagtcggaaggtgtggcttctagggccatgtaactgtgaggttgggagccaagcctgtcttcggtgttttgtttttgttttttgttttgttttgttgttgtttgtttttttgagacaagtttcactcttgtcacccaggctagagtgtagtgacgcaatctcggctcactgcaacctccatctccaaggttcaagcagttatcctgcctcagcctctcgagtagctgggattacaggcgcccaccaccacgcccagctaatttttgtatttttagtagagatggggttttgccatgttggccaggctggtctcgaactcctgacctcaggggatccctctgccacagcctcccaaagtgctgggattacaggcatgcgccaccgcgcctggccctgccttcagtgttgatattgaccaagaacagctcatccctgcctctccccaaaccaactctattaatctgctttaagtagtcacaaaataattcatgtgctatttaggaataaaataattccaaatgttgacacctcaccttttatcttrtaagatacactattgaatggccccagaacttaggatctgaagaataaatgattcttgtccagtcatcgttgactcgggccttggtttttttgtttgtttgttttttgttttgcttccttggactcaggaacttgtggttcaggtttttgcctgttggtgagtgacctgtggtctagctgacatgcagtggcccatgtgtacattcatgccccacagctgcctgggtagtacccagagccccatcccttcctgtgcacacgccatctgtgccctcctttctgcctccaagggcaggtggcagagtccaccattcagagccactggggctctctgtgtcggtggtagcctgggttgctgcttgtggtgcctccagaagccattcaggatgccctccggagcaggcccatcaacgcggagagtgcttagcacagccgtggctcaagagccgtccctccagtccccacgaaagtgactcctcttcttttccctgcaggaaggtgtgcatgtttttagcaagctggctggtattttgcaggggatttttttggggtagacactagcaggctccccagcagtcccactagagatacaccaggttccagagaaggaaaggagtgctgtggttactattgccaagcagatcagacagagggacggggattgttttatttaaaaaaaaaaaaaaaaagctttaagtcagggaaactagaggttccaggttgcccattgtggtcaayagagaaggaagtggacagcctgcctggcctctcgctgacagaggccatgtcctcctagctggaccctggggaggtgggcctctcactttctgcagcagctggagccatgactgggcttggtggctcaggagcctgggtgtcagaggtcgtgactggacagattcagtcaatggctacaaggttatattaaattctgacctcccctgttcaaagggaacagaatggacggagggcccctctgggctcactgctgcatttaagccaggcatttctgaagcagattccactggggcagttcccagcagcaatggtagccacctggagttggactcaggcagtggacagcatgactcgggagagggcactggggagccccatgaactcgtaatgcgggacttggcggttctgacttctgtcatctcttgccttgctccccagatgacagcagcccagctgacatatttgctgtgggrtttgaagagatggtggaattgagcgcagggaatattgtcaatgccaggtaaggggccaggtgtgnggggccaggcagggacttcctgagtcaggtgcctggctgggagcagagcctctgaggctctccgggagccagcctgcttctgagncagctaagctgtggccctggctgtgtggggatctctcacctggctccttctctatgctcacacatgcaccaccccgttctttccctgccacttaggaagtaaaaggaagggctgatgattgctgtgttttctttgcagtgctctggcctcggccacttgttgaggctaatttatgctgccagagggagctggcatgtgtggacctggggtgcaggggaagggcggggctgggactgggagagtagttgactcatgtttcctggggagaggtgagaaagtgtgagtgccgggaagaggtactttcttcctgcacaccagggcaaaggaaaaaatcaaaaccactggatttttatttgatatgaagtcaactgggcgctccccccaccccctgctraactggcctggctttattttaaggaactttctgaacaaataaataagactgactctgtggggctgctatgagaaggtcctgggttgggtttcaggggtcaagggagggctgctgtgatgtgtgaggcatagccaaaaacrcgcagatcctccagtagaagaaggaaagcatgacactaatattggggtgcgggcagcgtgaaatcagttctgcaaacagaataggcttgggctggagcatttggtaggtgggagatagatgtacttccagctacctgtaaacagcatcctttccttttctcttccagtactaccaacaagaagatgtggggtgaacagcttcagaaagccatctcacgctctcatagatacattctgttgacttcggcacagctggtgggcgtctgtctttatatctttgtacgtccataccatgtcccgttcatcaggtaagaacattctgtttacacacatctggggaacaaggggttgttagtctttgtgttttgttctttgacttccycctcctcccccatccccttctgtaacaggaatcgggacttaccattattttagataaatgtagcaaaaccccctaggaaaaactgggctgaatagaatattgtctagcgattaaaaagccaccatgggaaatgtctaactcaggaagctgaactcttagaaagggtgttacatgattgtcatcgcccaagctcaattccgtgcaaggaaaagggttccttgttggaatcttatagacaggaaacctctgaccaagagctgagtaactcactgggaaatgccaactcttttgtccctttttaaaagaattctaagtagaacgtgtgggcctctacaactgtgacctcattgtcatttctccaaggtgcatgctttgtgagcatcagaaagggggcgagcttaggggcggcattcctcttggggtgtgggtgtgggtgtttggatgctggaggaactcatcttttccccagcttgtggttggcctcatcttaccacctgggcctacccatggcttttgaatttccaccagcctttcggcgagctggcagcaggcgttgaactgacctccccactgagcccctgggtcccgggaagggcctgtgcctgccaagagcaccacgggtacacccctgcagcacctggagactaagactatgctgcccataatcctcttctctgactttcagaagatgtttakgtccctgtccctctgcttgtgttatttgggcagcttggcagtgtcctaggttagyaggtgaaggttagtaaaggttaaaggcaagggcggggtgagggtgagaggtaaagcatttgagaaagggctcagagctgaggagagccaggtttcccaggctcggtgtcctcggcttcacgtgcctttagccctgagctgcttccgcctacaccccttccatcagtcatccccccaaccttgtctgccagcgagcagatgcaccagcaggcctcagtctgtggcatggctgtggaaatgttaacaaatgtgcttgcagcccatgtttctatggactcgtatgcgtcataagtgggcatttgaatgcaagcaggctctggcattgcataaaagtccttttgagaccatctacccagcccagcataaacagctgcccgtttcctagctcttaaagtgcattgattgctgggcacggtgtctcacgcctgtaatcccagcactttgggaggccaaggcaggcagatcacttgaggtgaggagtttgagaccagcctggccaacatggtgaaaccctgyctctactaaaaatacaaaaattagccgggcgtgatggtgggtacctgtaatcccagctactcaggaggctgaggcaggagaattgcttgaacctgggaggccacagttgcagtgagctgagatcacgctgctgcactccagccagggtgacagagcgagactctgtctcaaaataacaataataatttaaaaatgtgttgattgcccagatgacacctcccatgcatggcgtgatggctgcacaggagtggggtgggctggtgggtggtgatgtttgcgccgctcctggtggcagtgagaacctgggcrgatgcaggcattgccctgtcttcggcttcatggggtgctcaagtgagcacttcccagttggggtgtgggggagatgtccaggcagcggtgggcagcaggagggaggcggcctcctgaccaggagtcgatgacggccacggtggccactgtgttgagctgatgattttggagcactcagagcagcaggtcccgagctgctgctgggcccttctctgtggcaaagcagggtcacacttctccttcaggagccracggcatgcgcgtatccttctgttccagggacgtagccatcgacacagtgaagacgggcatggggggcaaggcggggaacaagggcgccgtcggcatccgcttccagttccacagcaccagcttctgcttcatatgtagtcacctgacggccgggcagtcccaggtgaaggagcggaatgaagactacaaggagatcacccagaaactctgcttcccaatggtgagcggcgccgtggggacagccagcacctccctgctcagctcagtcccaaatgtgactgttgataggagccaggcactggggacacaaccacagggagggccccttcctggagggctcagcgctgggggagggggagagggctatgtccctccatggaattgacctggggcagggttagccacgtgcctggagggggccagctttgcagcatttcccgttgctgtacaattcctgagtgtctgcatggccactggatttgtatgtgtgcattttctgattttctaattcaagtgatggtttagggaagaaaaccatgtccgtggtctgtcctgtccaagtggtgaagagcatttgaatccacacagcctaagactccaccttcctgagattcacagtcttcacatgtactttctgtggtggctcagataagcacacccttttgaccaatggaccctttttgactgggaacacggttcttgaccaaggagcccagatcctgcctgtcctcgaagctgcaatagcgaaccgcacactgccctctcgtggcggtccrgagggtttcattctgaaactggaggattttcttttcaaatctagacgttaatgttctccttcctgtgcaaagatgctacccgggcacagcttcagcgtgtggtgcacacgaggccacctcttycccgaagtgaggatagacttcagctgttcttgctgcaaaatcttccactgtctgagaggtggygggttgggtcacagagctcttccctgtgagaacagatccttaaaactgacgtcccattttactgggctgcacgagcactcaaggcaaaatttccttagttttcattaagaagtgccataattcctgttggtgktgtttatttcttatgttaaaaaagaaacaaacgagttgggaaattttcaattgtgtgtaatgcagtttaaaaaaaaaaaaaagtctaacccttctcacttaaaaakagctactttggggccaggcacagtggctcacacctgtaatcccagcactttgggaggccgaggcgggcagatcacctgaggtcaggagttcgagaccagcctggccaacgtggtgaaaccccacctctactgaaaatacaaaaaaaattagccaggcgtggtggcgtgcacctgtaatcccagctactcaggaggctgagacaggagaatcgcaacccaggaggcagaggttgcagtgagctgagatcgcaccactacactccagcctcggcaacagagcgagactctgtctaaaaaaaaaaaaaaagtgctactttgacatagtaaacttgggatacataataagtaattaaaggatttataatgtagttcttttctacmataaaaatattgagggacctattaacattctrcacttcttttttgtttttgttttttgagacagtctcactctgccacccaggctggagtgcagtgacatgatcttggctcactgcaaactccacctcccaggttcaagcaattctcctggctcagcctcctgagtaattgggattacaggcgtgcaccaccaggcccaactagtttttgtatttttagtagagatggggtttcgccatgttggcccagctggtctcgaactcctgacatcaagtgatccgcctgcctcagcctcccaaagtgctgggattacaggtgtgagccatggtgcctggccaacattctacactggtattgtctgataccgtagtcactggccataagtagctatttaaattcaaattaattaaaattaaataacatttaaaattccttgctttccctggccacagtgagaatgatcagtatccatgtggccagtggctcctgcatcagatggcacagagaacatttcggtgctgcagaaagttctgtctgacagtgttatctagacgctcattttatttggttgggacctgtttaatcttctgtccagattattgtcatggggggagtggaaatgcctcatattataggagaagagaagctgattttggagctaggcagatgggagctgaaatcccatctgtatcatgcactagctgtgtaaccttcagcaagtgcctttgtttctgaactttgttttttttttttttaatctaagagagagctggtggtatctgctttgtgcacctggaacagagcccagcccttgcggacagttgatccacagcagctgctgtcattgtcttccccattcctggggaagagacagggaaggcaaggaccccaggagctctccggggctgagctggggccgtgggctcctaggactgggcaggatgggaaggaggagckagagagagatggagaagggtcacctgaaaaagctcaggaagttacatgaaggtgcacatcctgagcatttctgctgctcttttgaaacctcattctcctaacgctgaatgctgggtgctgcttcctaggagtagacactccaaagtaagggtgcatctgatcttcaggacggggatccatggaggaaatgctggccatgttgctctcctccgtttagggtaggagctttcttcaaaccactcagaaacactattatttaaaattaaaaagtaagccatgtaaaaattcctccatagttttatgggatgagtgaaaaacaagatgctctagtagaaaactttcttttttctaagtagcattttgagaaaaatactcctgcttgccccagtgagcttgtttttctcctctctcccaccttccttgcaagatgggctgaatgattatgattttcttttcaacttaggggagaaatgttttttctcatgattatgtattttggtgtggcgatttcaactaccgcattgatcttacttatgaagaagtcttctattttgttaaacgccaagactggaagaaacttctggaatttgatcaactacagctacagaaatcaagtggaaaagtaagttgtgctttaaaaacattttttagcagctgctccaagatggaatgacatctgtgagatgtagaggctggtgcagcaaattcagttccatgagtggatttcactgtttccaacattgtagaaaataggtgggcttgtgaggttacagtacaggagtggctgttcatacacacttcctgtcctyttttttttttttttttttttcctgaggcagagtcttgttcagtcacccaggttggagtgcagtggcactatcttggctcactgcaacctccaccttcctgggttcaagcaattcttgtgcctcagcctcccgagtagctgcgattacaggcgtgtgccgccacacctggctaatttttgtatttttagtagagacgggttttcaccatgttggccaggctggtctcgaactcctggcctcaggtgatctgtgcgcctcagcctcccaaagtgctgggattacaggcatgagccaccatgcccggtcaaccttctcctccttctaatactgttattttagtgcctgtttgcttcctagcaggatgagctgagatgaggggagtacatttaaattccatttagctgtggagaaagaagctggttaaatgtgtgagggccaggtgcggtggctcttgcctgtaatcccaacactttgggaggccgaggcgtgcggatcacctgaggtcaggagttcaagaccagcctggccaacwtggtgaaaccccatctctactaaaaatccaaaaattacctgggtatggtggcaggcgcctgtaatcccagctactcaggagactgaggcaggagaatcrcttgaacctgggaggcrgaagttgcagtgagccgagatcgcaccactgcactccagcttgggcaacgagcaaaactccgtctcaaaaaaaaaaaaagtgtgaggacagggcagataaggtctctcctgaagcaagatttggacgttcttcgaggtttactgtgtcttcccacttgagccccttccagtgtgtggagtgctaaagggttgccacatggacgagtgaccataccaacctcctaaagcaggttttcctgtcttcctactaycaacattctcacatcctctcagtgatgcccaagagaatgagggtgtgtttgtcccttggtcttcccatggaagcaaggccaatccaaagttaaacaaagaaaagaaggatgtgcatgggggctcacrwctgtaaggcgggaggattgcctaagcccaggagtttgagaccagcctgggaaacatagggagactttgtctctacaaaaactaaaattagccaggcatgatggtgcgtgcctgtagtcccagctacttgggaggctgaggcaggaggatcacatgagccccagaggttgaagctgtagggagccgtgattgcaccactgtattccagcctgagcaaaagagcgagaccccagggggagagagagaggagagctgactttcactctgcgcttctatgtacttagctcatttagtcaacaaacatagatgaaggcctcggggttgtgggccagacatggcaccaggcatgggactgtaaagatgagcacccctgacccgtgcctcggaccctgcactgtctcctggggggcaacaagaagacagtggatagatcagacactggagtgggtggggagatagatacgagggcggtgtgtccctcagtgggatgagctgaggatcacttttttgctaattaaaagacacatatgtccagtttcagatagattttcaaatgtaatggagcttctgttactttttaagaatagggacttgccttttcagttttcgtttttgtatataacattcaggatcgaaaactacggtggcctgatgacttctttttctcccaatagatttttaaggactttcacgaaggagccattaactttggacccacctacaagtatgacgtyggctcagccgcctacgayacaagcgacaaatgccgcacccccgcctggacagacagggtgctgtggtggaggaagaaacatccctttgataaaacaggtgagggggccgtgcccgttcgagagtcggcagagggtgaataagaaatgcgacggagggagagtcacgtttacccaaccccaggcgctgctacataaatcagtttcttcataaccccagatgacacaaaagtcatcccagaccttaacccctaagctttggaagttgtgctttcagggagcctctgcttctggcctctttttttcccttttcttttcttttttttttttgagacagagtttcactcttgttgcctaggctggagtgcaatggcgtgatcttggctcaccacaacctccacctcctgggttcaagccattctcctgcctcagcctcctgagtgctgggattacaggcatgcaccaccatgcccagctaattttgtatttttagtagagacggggtttctccatgttggtcaggctggtcttgaactcccaacctcaggtgatctgcccacctcggcctcccaaagtgctgggattacaggcataagccactgcgcctggcctcctctggtctctttctagagacagtgacctgcaaataggtctgctcctggctgcccctgcatcacagctccccsccacacccccacctcttttttctgggtggggaaagcggggagcatgaggttgcctccctccctgccccccatgctccccctcatgttctttatccagcctattttgttcagctacactyttacctgcttaaagccctaattccaaattggacacragcaagacacagtaaaaataagttagtttttaaaaatcattagttgtcaagtatgttttgaacaactgttgatgcccagctaggaagtgaagtttatttaaagttagaatatctgtaactagtacataaaaaaaaaaaaaaaaaaaaaaacctaattacacattttgggagagcatagccaggaaattgcatctgtgaaaagaaaatacaaattttcctctagatgagtttgtgaacgcctgtgtggccccagcgctctgagaggtggggcctagaatgagtccgagtgttctcagctcctgcagctcttaccataccaattgctgccaaccttctgggattcctgggtcctggaaacccggcagcaacactgtgtctcaagcctacagtgggcatgctggcgaggactgcaggcatggtcatgactgttttgaataattayatgcgaggaatgtttttaaccaaaggccccaaagcatccgaagcctggcttcaaggtggaggagtaaggaggatgagtctgggacgtggggtggttcgtggcgcagacctctattgtggaagtgtcatgatcgcattcttggatattgactcgattctatatgggtctctcgaatggaacccctgcgagtagctggagaactcaaccttctagacagtgatctagatgttgacaccaaagtcagacacacctggtctcctggtgccctgcagtattatggtcgtgcggagctacaagcktctgatcacaggtgaggtcctgacttccatggcgttttctcctgtgctgggcaaggcagcgtctccctctccgcaggaaaatgcatgctgtccccataaggatgtgtgtgcgcatgggggtgcattttgtgtgcatacaatacaccaaagaacaaagaatgatggaacaaatatctgtggacccaccaccaagaactaattaatcttagcattttgtcattgctccatatcataaatgacatcattgatgaaaatttcaaagatgcaacctacgtattttgcggcttttatattttcttaaatgatgtcgttgtgcaacttgcttttttgttactatttttgagatacagtcgtgttgatgttatagctctggtgcattcatttgtaactgctgtctagtatcccactaaatatatccatggaacttacaacttatccattcacctcttgatgaatattttctccaggattttatgattacaaacaccatagggtttttaaatctgggatgcacaaccttttttttttttttttttttgagagagagtcttgctctattgcccaggctggatggagtacagtggtgtgatctcagctcactgcaacctccgcttcccagattcaagcaattctcctgcctcagcctcccaagtagctgggattacaggtgcacaccaccatgcctggctaatttttgtgtttttagtagagacggggtttcaccatgttggccaggctggtyccaaactcctgacctcaggtgatccacccaccttggcctctcaaagtgttgggattacaggcgtgagccaccgcacctggccctaggatgcagggctttttaaatgctctgtgcatcatgcattgaggatagagtggaggcagcagagggagcaccgtgggcaccagcacctgtgccctgggattgctgcagaggaagactcaccctgcagaatgtctttaaagacagaggagaggatggcatttgagggtgtgaagaaggaagagtttgatcttcccaaggctgctgcctaaactctcatgtcagtttcaacttttacaaggaaagaaattaagaaaaagaaggtaagaacagttggtcaacgaaaaaaccttttttttttttttttgagacagagtcctccaggctggagtgcagtggcacaatcttggctcattgcaacctccacccccagggtwyaagtgattttcatgtctcagcctcccaagtagctgggattacaggcgtgcatcaccatgcccggctgatttttgtatttttagtagaaacggttttgccatgttagccaggctggtctccaactcctggcctccagtgatgtgcccgcctcagcctcccaaagtactgggattacagccaccatgcccagactctttagataattctaaattctttagatacctgttgttgcaaatacatacctagaagtgaatcttgaggaatcttcagatatgtgacatcaaggtttgctagctcaatgtattttgaaaccttaatttaaccaatatttcttgaggggcccttacatgccaggccctgttgctggcctggagaaaagcagtgaacaaaacagatgagaccatgttatcatggaattttctggacaggacaaacagacaataaacaaacatrtgtgctatgaaagaaaaaaagtagtggcaggagtcaggccagagtcgagctattttcaatcaggctgtgtaattttcgtaatataggattttctggaaatttatagagtaataaccatccctrtgtcagaattactataaggattgcattatttcctgctggactgttttcctgtttacatcattgatttttacattattcctaatgattgcgtagggtattatatgaaggtatcataactgtttccccattaagaaacagagcattttggcctggcgcagtggctcacrcctttatcccagcactttgggaggctgaggcaggcggatcacctaaagtcaggagttcaagaccagcctagccaacacagcaaaaccccatctctaccaaaaatacaaaaattagctggtcatggtggcatgcgcctgtaatcccagctacttgggaagctgaggcaggagaatcacttgagcccgggaggcggaggttgcagtgggctgagatcgcgccactgcactccagcctggacaacagagggagactctgactcaaaataaaaaaaaaaaaaaaaacgagcatttcccttttttttttyccctcccatcaacaatgctgtaaatgatcaacctcatgcattaaatctttgtctgaatccctggtcatttccttagaataaagtccragaagtgagattactaggtgaaaagagatgaacaattttggaactctatgtaaagtgccaagtaaccctytgaaaagcttgcacccctggcagagtgcagatgtctgcttccccacctccttggtggtactgaggattaccatgtcaaaaatctttgctgatggctggttattttccaagtactgggatacatctttaaggtgcyacactttattttccccctcaaatcatctttagataaaaatgccaaggtgatactaaggttaaggaaagatgaagactaaaacgccagagcagggcagctagcctgcaratccacctgctggtggccacattcgcaggttgttggtgttgactgtttacaaagagccctgggggacagcagctggggactgggggctggagatgtggacatctgtcccaggctaactggggactggaggccgggggtgtggacatctgtcccaggctaactgtcatccctcttttgttcctaacncagacctgtgctggcgatcgtggaggtggaagttcaggaagtcgatgtgggtgctcgggagagggttttccaggaagtgtcctccttccagggccccctggatgccactgttgtagtaaaccttcaatcaccgaccttagaagagaaaaacgagtttccagaggacctgcgtactgagctcatgcagaccttggggagttatgggacaattgttcttgtcaggtaactgctcccctggctgatgtgggttccaggggatgtcgatgaggatccgtgagagctgccaggtcgttcttggcattgacttggagtatyatttattccaggatcaaccaagggcagatgctggtaacttttgcagacagtcactcggctctcagtgtcctggaygtggacggtatgaaggtacgctgtacttggccacactgtggagtggggtctgatcaatccctntttttatgtgggcatgtcttcttcctcctcttgccctgacctgtgcctttwttttttttttttttttttttttyytctgagacaaagtcttgctctgtcattcaggctggagtacagkgatgcaatcacagctcgctgcagccttgaactgccaggcttaagcaatcctcccatctcagcctctcaagtagctgggaccgcaggcacgtgccaccacacccagctaattttttttwaattttgtagagagaggatctcactctgtagccccggctggagtgcattgggacagttatggctcactataacctcagcctcctgggctccagtcatcctcccgcctcgatctcccaatgtgttgagattacaggcatgagctttcatgcctggccaccaatctgtctttatgtatagacgccatatgcgggagggagtttggattcttcactctggttctaaggtgtctcatgtccggctctagctacttgcaaaatagggcrgaagggtgggcgcagtggcttatgcttgtaatcccagcactttgtcaggccaaggtgggtagatcacccaaggtcaggagatcgagaccagcctggccaacatggcgaaatcctgtctctagtaaaaatacaaaaattagccaggcgctgggtgyggtggcttacgcctgtaatctcagcactttgggaggctgaggcgggcaaatcwtgaggtmaggakttcgagaccagcctggccaacatagtgaaaccccgtctccactaaaaatacaaaaattagccaggcatagtggcaggtgcctgtaatcccagctacttgggaggctgaggcaggagaatcacttgaacccaggaggcrgaggttgcagtgagccgagatcgcaccattgcactccagcccaggcaacagtgtgagactctgtctccaaaaaaaaraaaaaaaaaaaaaaaagtagccagacatggtggcgcgtgcctctagtcccagctactcaggaggctgaggcaggagaatcgcttgaacctgggaggcagaggttacagtgagctgagatcgtgccactgcactccagcctgggtgacagcgagaccctgtctcaaaaaaccaaacaaacagaatggggaagaagaatgtcagtcactgtgtctcacgttggaaggcagctctaccagcagctgcagaagcttagccattttagagtgtagttctcgccgagttacttgatctgtctatgctcgcactgccatgtgggagactattccagtctttctctttagagtatgtattttggaatatgcagctcatagatagtttccgtttttatagtatcttggctttaaatctgtaccaaatgggaagctggagatgagagttcaacttttttttttgagatggagtcttgctctgtcacccaggctagagtgcagtggtgcaatctcggctcaccgcagcttccgcctcccrggttcaagcgattctcctgcctcagcctccygagtagctgggactacaggcactcaccaccacgcccagctaatttttgtatttttagtacagatcgggtttcaccgtgttggtcaggctggtctcaaactcctgacctcaagggatctacctgcttcggcctctcagagtgctgggattacaggtgtgagccaccgcacccagcccagttcaacttttttttcaaccagatgtatgagagctatgctgmgcctgcgtgaggtctggacccttggtttttcagggccaaatgtgaagattggcctcrttgagggtgtgtgggttttggtgagaagcattgtgtgatcaacaggaggggtcatgatttttatttattcctgggtggccgctctgccctcccaggtgaaaggcagagcagtgaagattagaccgaagaccaaggactggctgaaaggtttgcgagaggagatcattcggaaacgagacagcatggcccccgtgtctcccactgccaactcctgtttgctggaggaaaactttgacttcacaagtttggactatgagtcagaaggttagtgaccctgcagggagggacaggcaagccgttcttctagcaacaggcctgagcttttaaggacaccttctaaagcctcccttgcagaagtgacrgaggacacccgcagggcaagccctctgtcccatgtgatgagcatgtttgtatgtgtggacgatgcatgccatgctacctgggaccsgaggcatctaaacttaggctacaaacagtggctrtgaggatatcagggctgtgggtgtaccaatggaactggggtaccgtccctgctggcgcctgggccctgagctgcagggcagggtgcacstgtcctgacaggagctgaaccagtcccactgatggaagactgagyctttccccctcattgttttcacccgaattgtgattcatttccttctcccaggggatattcttgaagacgatgaagactacttggtggatgaattcaatcagcctggrgtctcggacagtgaactcrggggagacgacctctctgatgtccccggccccayagcactggctcctcccagcaagtcacctgctctcamcaaaaagaagcagcatccaacgtacaaaggtagcctgacccttcttttctcaggagcctcagcsatggagtcagctcaggacagactttcctttttctcttggcgattgggcactgtgtgatatcaagtatgcaggtcccaggagagacctcaaccaggcaggccaagcgaggggtagggactgagccctgtggaggtagccagctccaacaccctgatttcctctagttagtttatttttttacaataacttgtacccccataacacaccagattcaagataattcttgtttcctctggatattcaaatggccacggttctgaactggttttatatttgtgattatttcccgcccccaacaaaactcttctgattcagccrggcgcagtggctcacacctgtaatcccagcactttgggaggccgagacaggtggatcgcttgaggtcaggagttcaagaccagcctggccaacatggtgaaaccctgtctctactaaaaatrttttttaaaaattagcagggcatggtggtgcacatgcctgtaatcccagctactcaggcagctgaagcaggagaatcgcttgagctggggaggcagaggctgcaatgagccgagatcgccccactgcactccagcttgggtgacaaagtgagattccgtctcaaaacaacaacaacaaaaaaacttctgattcaatcccagtagagacataatccatatctatgtcctgagttgctggcgtatggtcacactcatataatatcatattattatacagtcatgtcatacggtcacatcattgtatcattttagacttcagagggcctgaaaggtcacattgattgaaccacacacccctagattaaataawacaactttttttttttttttgagacagggtctcactgtctcccaggctggagtgcagtgatacaatctcagctcactacaacctccacctcccaggctcaagcgatcctcccacctcagcctcccaagtagctgggactacagggttgcaccagcatgcccagataattttttgcattttttgtagagacggggtctcactatgttgtccaagctggtctcaaactcctgggctcaagtgaccctcctayctgggccttccaaagtgctggaattacaggtgtgagccactgcacctggccagtaactgttctgagtaacttttaaagcccactaatgttacgtggctggcaggtcgggtagttcatatttcagtgtcagctacattgatgctgttccattcatagccaggcatgcctctagctrtcaatcactgagccccgagttggaggacagctctaaccagcaggtgcaggagcttagccaygcattgggcccattgagctggggctgagagcagagaacagggctgaaagtggattaaggtacctctcagggagggtactttgccaggagaggtgcgaagacctccagcccctttgaccgtacgctggtccccacactgaccaataacttgcctataccgaaccatcaggagcttttaaacttatggatttttgagccctaccagagagatctggatttggtaggagtggggtgggaccctggaagcctggcgtttcaccaagctttccaggtggtttggacgcacagctaggtttggggacttctgcccaagactgaagcagcagccttcgccggagcatcgcggtggttctgcacgttgctcctgccaggggcttctgcccgggagttgaagtggctggagggatgtgctcttcccataagaaggacctttctctcgggggtggccgtcatgcaggcagcctctggagccagtgcaggtgtgagcacagatagtcctttgcatgaagaaactaatagcgcaacacgggacacgtgggtggctttgctacctggtgggcattgagagggtcttcccttgatgctgtggggtgttcagccattcccatttgtaggagaaatcctgcctttccccagttccagtctcyaggacacatggggtggagctgctggatacagggagtggggtgtccgagtcaaagtgaaatggagaggcccatgctttgggggagccctagggctgctgatttgatctgtaaggaagcaggagctgtgcctcctgaaaacccctcagcctcttggaaggtgtgtgcagggcaggtcaagatggcagacccttgggagtggccagccatgggcccacagggtttgggatttgatgagtaagcaggacccctggtcctaggcactggccactgcatgccaggctgctctgctgccagagcagggagaacaccctcagcttcctcagccggtgtgttctagagtgaggaattgaaaacatctgcctgtggttggttgactcttcaggggttgtggtttgcaactgtctcctccactctgcccaagtcttgttatttcacaagaaaacacactttgaaatagctcagtgtctctcaagtctgagaaatacccattatccatggttcactgaatgttccaagcaggcactgggtgccctccccgcccccgcccctcgccggcagacagaggtgcccgtttctggacagagccttcagctgtcctacagcaggtccccctgccacagtcggcctcctgtgctcagatccgtgtctgacacgctnacgtgtggaacagaccattgtactcatgccccgccatgtcctccagatgacgcggacctgrtggagctcaagcrggagctggaagccgtcggggagttccgccaccgttctccgagcaggtctctgtcggtccccaaccgrcctcggccacctcaacccccgcagagacccccccctccaagtaagactctgcttgctttcagctccctggatgcctgccaggaataaccgcgcgttccctgctactgaaaacacggctccgaatccacttctmcccggccttccggtccccacagggcttcctcctccttgggctccgttttgttgtaaatccaggacacgtttgacgtcagggctggttgtgtttctcatggcaaatgaaacngctcctttccaaagctgctgttcaccctggagctgtgctattgcttcaaactgctctcccttggcagcattagaggatgcagaatgggggccgcagccatgggagggacgtgagcttcgcagtcagaagtctctcctcagctgctgcgcagtcctccctctacttatgaggaatctggtaaacccaggtccccgcctggaggtgaccyggtcacccctctgcgctccgaggcctcctgttccccgggctcagaacaagttcccccttatcctgggtctaggagcattttcttctggttgttcgaacaatgctttgcccgtccagccctccctgataacctgaaagcaaagctgtgatgtgcttttgatccacttgcattttcccaccactgtttacttctccctccccaaaaatgtgatgatcagacttagatcttcctaagccattacttcagaattgggctcattgtggctgacgtcacggtagtaaccaatggcaagccacaagcccagatataaaaataacccaaaaataaaatgcataagtcatgtattattgtggaaattttagagataactacaaagaagaacaaaattttaaaattcacttgatgacctacgggtcgtagttgttgaaaaaagtcttctttttccagtttcatgtatctgcagcaacatacttctttttttttttttttttttttaacaaaattaatacccattttctctggtcrgttgtcttttatttaatgggttatattttctgtgtcattgaatgttctaaaacatgatttgttaatggctgcaagtatattttaacagtttattcccctgctttggaattttttttttttttttttttttttttttttttttttttttttttgagatgggctcattctgtcccccgggctggagtgcagtggygcgatctcacagctcactgaagccttgacctccccggctcaagcaatcctcctacctcagcctgccaagtagctaggactgcaggcgcataccatcaggcttggctatttttattcatttatttatttattttgtagagacagtttcaccatgttgcccaggctggggtttttgaaatattttttccccacaaaatattttaaaaatctggtcctagcaatagtrtttggaaccatttcaaaatcaattggtttttatatcagatctgaatcccccaagatgttaaagtttgcattctagtaatgcttctccagatcatctacatcaataggcacacactggtagaatcaagtgagaaactccatagagagtcaaggaaggcctggctctgtgggtgccctaagtgccgagtgagtattcggacctcaccgtgtctgtggtctgctgggacatccgcctcgtctagtcgggctcctggcagctggctgggaagttgtgccttcactgagattgagactctgccctcgttggtttttacagccggtttaatggtgaaaaagtcggcttcagatgcgtccatctcctccggcacccatggrcagtattcaattttgcagacggcaagacttctaccaggagcacctcagcaacctgtgagttcttctgcatacatttcaatcccaagggttttgcccccgggatagtgtgggatctctcttctcagtgaatatatagatttatgtgtctttaaccctctacctgctcaccatctcatctccaaaccccataacccttcctcgcaggttctccatagggcttttaaatggttgtatggagtgttctagaaaaaatcacttttgatgaaaaatcccaaatatccctggtttccatactcatccatttctctctcttcccattcttgcctctgaccttggtgtatgggcagagcattgcttggtagaagggaaaatgggagaaattcaggtcgttatcctgggaaaatgatgatcattctggagtgaagttggttgagagaagaggctaaaaagagatgtaaataatgaagttggggaacacactaggaagactaacagccatagaggattgtggaggtgcctggttccagagggtaccatgagctgctggggaagagagcaggtgaaggcagggaagtagaggggagagaggggaagctgggtgctagggggaaactgctatgaccgggatgcctctggggtgctgggcctggttaagtgcttgtgcggccccagcaggtggaggggtgactggaggccagtgttttacagtagtgaaaataggtcataaaggcaacccacatgctggatgaagaagtagaaaaagcacttttaaggaaggtattttaacaactcagtgggaccatggaaagagtggcctcttattttgctttctggctttcacctggttattgaaaaaaagatagaagatggtctgtccatatgcaaaaatctgtaatcacccggctttgaagaccagggtcatcaggtctaagtagtatggcactcttggaaagagagtgctccaggaaagagaggattgcagggtgtggtggaggctggagtttgtatggtcagcatcgtctggtggagccctgcacagacccacgggtagcagatacgtcccacgaggctgtcctcctgcctctgctgatactctgctcttcctcattctgtcctcaagcccaaggctcggactggaataagtaaaccttataatgtcaagcagatcaaaaccaccaatgcccaggaggcagaagcagcaatccggtgtctcctggaagccagaggaggtaggtgctttcctgggggcaggggaaaaaccaattctccttttctttttatctccctgctaaaagtggtctagaaacgaaaataactctttttattcttctggaggcaatattaaatgaaaacatcctttagcaacattttatataaatctatactaagattgattgtccatttaaaattgtattttcaaaattctgtgtgtatataaaaatcatcccagggctattaagcggcgtctaaaggagagaccgaaaaaaaccaaaatgagtttttaaaaaaggtgaatgctgccggcatgaagtcattctgccagctttataaaacagagacagttatagtgtttgtcctaatttcaggcacaaaatctaccttttaaatcactggcaagtggaaataaagtttttagtgtcaggcagggacctctttcccaccacattattttttgttgctgttacttaaaccatgttagttaccttgggctctcccccacttcattcataatcactggtaatttacacttttagttttggccttggctttgttccagaatctcctagagaggagagtgtgcccttttcttcgtttttttttttgttttttktttttttttttttgagactgagtttcactctgtcakctggactggagtgcagtggctcaatcccaggtcactgcaacctccgcctcccaggttcgagcaaatatcctgcctcagccacctgagtagctgggactacaggcgcgcasccccatgatgagccaatttttgtattttcagtagaaatgtgatttcaccttgttggccaggctggtcttgaactcccaacctcaggtgattcatccaccttggcctcctaaagtgctgggattacaggtgtgagccaccacacctggccgagtgtgccctttaaaaaggtgtaagcaatcaccattgcttaatttgcttttagtcagcatgtttaacttctttggaattctcaaataatatttaagggggcatgagttaaaaggtcgagaactactgttgtagaatgatactgctacaaatgctttctttttttttattttagaaaaataactawaactaggccgggcgcggtggctcacgcctgtaatcccagcactttgggaggccgaggcgggtggatcacgaggacaggaratcgagaccatsctggctaacacggtgaaaccccgtctctactaaaaattcaaaaaattagccgggcgtgatggtgggtgmctgtagtcccagctactcaggaggctgaggcaggagaatggctgagcccgggaggtggagctygcagtgagccaagattgcaccactgcactccagcctgggtgacagagcaagactccgtctcaaaaaaagaaaaaagaaagaaagaaaaataactaaaactatggatataacaacccaagtgtccatcagctgataaatggataaacaaaatgtggtccatcaatacaatggaatattgttcagccattaaaaaaaaaaagaatggggctgggtgctgggtgcagtggctcacgcctgtaatcccagcgctttgggaggccgaggcaggcggatcacgaggttaggagatcgagaccatcctggctaacacagtgaaactccatctctactaaaaatacaaaaaaattagccgggcgtggtggcacgtgcctgttagtcccagttactcgggaggctgaggcagaagaatcatttgaactggggaggcagaggttgcagtgagccaagataacgccactgcactccagcctgggtgacagagctagactctgtctcataaaaaaaaaaaaaaaaaagaatgaagtgctgatacatactacttcatgggtggaccttgaagacattatactatgtgaaagaaagaaaaaaaggccacatagtgtaccatcccctttttatgaaatggccacagcaggcaaattcatggggtcagaaagttcttcttgctttccagggactggaaggaggcctgggtggggagtggctgctgtggggcttcttttttgtgtgatgaaaatgttctggagttagatcgtatgatggttgcacaactttgtggatacactaaaaaccaatgaatggtacacttagaaagggtgaatttcacggtatgtgaattatgtcacaataaagctgttaaaaaaaaaaaaactctagagatgtagatgttagtagaggtgtgaaatctacctacagtcccggcttaacactttcttggtcatggccccattgagattttgatgtctttggatcatctaccctgagaaatgtaagtacacatgagactttgcatatgatctcagggtctcactggtccccatccaaactatccacagaccccagatcaccacccctgctaggaaggtgagcatgaaaacctgggactgctgggtgcggtggctcacgcctrtaatcccagcactttgagaggctggggtgggaggactgcttgaatccaggagttcgagacaagtctgggcaacacaatgagaccctctctctacaaaaattttaaaattagctgggcgtggtggttcacaccagtagtcccagctacttgggaggctgaggtaagaagackgcatgagcccaggagttccagcaacatagtgagacctcatctctactaaaaattttaaaaattggctgggcgtggcagtgctcacccgtaatcccagctactcaggaggctgaaatgggagaattgctcgagcctgggaggttgagactgcagtgagccgtgatcatgccgctgcactcmggcctgggtggcagagcgagagcccatcttaaaaaagaaaaaagaaaaaaagctgggactgaatctagctgattactcctgaaatacactgaattagtaaatgacacttaggatgtagactgtctaaggacgaaatcatgcagtgaattgccttgtcctttacacttcagccatgtggttttatgtttcaggtgcctccgaagaagccctaagtgccgtggccccaagggaccttgaagcatcctctgaaccagagcccacaccgggggcagccaaaccagagaccccacaggcgcccccactccttccccgtcggcccccacccagagttcctgccatcaagaagccaaccttgagaaggacaggaaaggtaaaagcctggtaacataaaacctcttactcctaagttgctcacatgtctcgatagataagaattgtggcctgtaatcccagcacattgggaagccgaggcaagcggattacgaggtcaggagttcaagaccagcctgaccaacatggtgtgaaaccccgtctctactaaaaatagaaaaattagccgggcgtggtggcgcacgcctgtaatcccagctactcaggaggctgaggcaggagaatcacttgaacccaggaggcagaggttgcagtgagccgaaatcgtgccactgcattccagcctgagcagcagagtgagactccacctcaaaaaaaamaaaaacaaaaaaaaaaaaacagatttgcgtctcacagataaaaatctagttccctatggacatcctcacgttcatgagtcccagacacaggtgtgtctttggggaaagttttgacaactgcttcttccctcatatcctactgtgtcttggctctggctgagaagaacgaggagtccactgtctggcacattgtcagtgtgacaagaacagcttggaggtattatgcttcctaagtgttttgagtccccaaagggaaccatagtgggatgcttttccccacatgttctggtaccgcccatttgcgtgtggtctgtgttgtgtgcacatggtttcaaggcattaggaaaacagtaaccgattcccagattcgccatgttcacatgctctcgtgcggcctcagcctacgagaggttccacagcttttcttgccacttttcttgcagattgttttttgctctcgctctcaagcttctcagccttgcttactgcttcaaagacatgagtttgtaaggacagtagcagcccaaagactggcatctgtagacacatctggatcttccgtttgatctcagtgttctagtaacggaccctcggtaatcccttcctggtcatcacagcaygatgctgcttcccccctagagagtgtgaggggggcttcggcttcactcttgacagcgcttgctttgtatttcctgggttgctcttctgtcccacattggctcattgccatctgtcccttgtccatgcttccttacaaagtggacctttttcctccgcctcttccctgttcagatgctcctcgacttaaaatggggttacatcccaataaacccatcgtaagttgaaaaatagcgtgtcaaaactgcatctcatacacctaacctagcaaacgtcatggtctcgctgaccttgaacacactcagaacacatacattagcctacggctgggcaaaaaaaaaaaaaaaaaaaaaaaacacccatccaacacagcctattttataataataaaaataaaagatcaaacttcaaaattcaaagtatgctttctacggaacattagcgcttgtgcactagggtgaagtggaaaatcctcagtggaaccattgtaagtcggggaccacctgctttgtcttttcttgtaaaagccaggagcagaaatagattcattttcccaacctgctgcacaggagttaaagttaaaaggctgttggaaaagagactttcttttttcttagtttgttttctaaagaaccaaagaaacactgaaacgccaatgtttaactagtctactgatcaccttttctgaacaaaagcttcattttgcctgtgcagttgttttctttgtgatagatttgaaccagaaccaaggcagtgtcaaggtttccattctttaccaatatttaagtataaaagattcaaggagctgggcgcggtggctcacgcgtgtaatcccagcactttgggaggctgaggcgggtggatcacctgaggtcaggagttcaagaccagcctgaccaacatggtgaaaccccgtctctactamaaaatacaaaaattagccaggcatggtggcaggcgcctgcaatcccagctactcgggaggctgaagcaggagaatcgcttgaacctgggaggcggaggttacagtgagctgagattgcgccattgcactccagcctgggggacagggcgagactccttctcaaaaaaaaaaaaaaaattcaaggagaaagtatatccattagtccttcagttagcttatgttgtaacacaagttacttcaccctagcatgatacagaccatgaatcagcccaggttgcaacttcaaagagtgttttcagagaggtttgctttcaataaaggaagagcatcaccccatttcctaaaggacaaagaaaagtttgtctgattatttactgtggccctggttttaaattttccactcgttttcattggacctgctggtgtgacctgataaatgtgtgtttctcctgtgctttttctttttcttacctggtcacatttctggcaccccacacattctcaaatctcgaatttgctagaatgtcagcttggtctcatctctgttctctgctggccactctgttctctgatcctcagctgcctagttattggcttcttatttacactctttgtcccaccttttctcagcccctgtcaccggaagaacagtttgagcaacagactgtccattttacaatcgggcccccggagacaagcgttgaggcccctcctgtcgtgacagcccctcgagtccctcctgttcccaaaccaagaacatttcagcctgggaaagctgcagagaggccaagccacaggaagccagcatcagacgaagcccctcctggggcaggagcctctgtgccaccacctctggaggcgccgcctcttgtgcccaaggtaccccckaggaggaagaagtcagcccccgcagccttccacctgcaggtcctgcagagcaacagccagcttctccagggcctcacttacaatagcagtgacagcccctctgggcacccacctgccgcgggcaccrtcttcccacaaggggactttctcagcacttcatctgctacaagccccgacagcgatggcaccaaagcgatgaagccagaggcagccccacttcttggtgattatcaggaccccttctggaaccttcttcaccaccctaaactgttgaataacacttggctttctaagagctcagaccctttggactcaggaaccaggagccccaaaagagatcccatagacccagtgtcagctggcgcttcagctgccaaggcagagctgccaccagatcatgracacaaaaccttaggtcactgggtgacaatcagtgaccaagaaaagaggacagcactgcaggtgtttgacccactggcaaaaacatgactgagcagctttgaaggctgcagtcctatagaatgcataccttcctccctctagrcatccctccaccagaagagacatctatttaaaggcacactggccaaaacgtttgtgcatctgtcactctcgtgtagtttacaaaaatcgtgtctcttattcagtaagatggttactcagccaccaaaatatatttcactcaaggcttgtacatctgaagtttgctcttcaaggaatgggaaccttcctgttaaattcggtgtatggattttaagaaaggaatctagccaatgaggtccaagaagttctcacccattgaatttttaaatggctgttcagttcatgttgtacgtgatggagatttgtcttttgttttatttgcattttacagatttggtataacattttggggagccacctgaaggttgatgtataaagtaaggattagagaaagaggtcgttgtgaccattagtagctgtcctggcccacttaaacaaggttacaaaaaatcagagtcggaagcagccaaataggtcaacctaatgactagactgtacattcccatgagccttcatgtttaagtgtgtacatgtgcgttaaccttgatgatgcgtgaatcccgagggagccggtggcatacaccgttagcttaaccttagcttaaactagctgaaggctcctgtgccatgtcttagacattgcatgccctatcaattactataatcctgagccatggtgtgctactgaaaccaatttttatccaccatctagtccttattaaatgaaacctcacggatcctttgttccgcttatattccatgcataccacataaaagcacacagtgcgaaaactcttgctgatacgcgatattgattctcattgttagaatatggagagtgtttcagcctcgtctgtccggctggagcttcgggatggaaagtgctatgtgtccctgcatataagaatcaccaggccagtgtttctgggtttgcttgtctatatgtttgtctatattttttgcctatacatttttcccacgtttccaacagcacttctcacctattcaataactgaaaaagacattaccatagtgctttacatttttaaagtaatgytacaaggtctggaatccatttggagcagataccgtgttttcgctatttaataagaagttcagtagtgaaatcttactgtaccgcctgttgtatctgggagcctcgtacagaggctcgcacagcagtgatcaagtgtcatcccttacgtgactgggggatgtctgtcctaaaagctgactgctaggatagtaaggatcatcttgcctgggctatgccactgtcttgttaccaattagacatctggaatttcataattagttttcattgtcactgtcaagatatattgcagattacttaaatatggccatcaaaacaaaagttacaacacgtatctcttttcatctgaaaactaatacctggaaaaggataaaaaaaaaaaaggaatccgtgacccacagagctagacagataagatgcatagttgaccagtcataaaaggcggtgtttaggtgatcaggatgccgttggtggcatttacgtgctttatatgatttttacctcygtaacaaacacaagaaataaacagaatggtccttaacagagtttgggggagagagcaagatgggttccttggagaagctgatttgccaagatgcacatcgctattaacagccagagtcataaatgaaatgaaattgaagaattcatycaaatgctcttttccctataacctcttttctcascaaaaaggagataaatttgaaaacagataaatgtaacaaccagtcaaagaagcaggggaaaagtaagctcctccaaagttgcttgcagtgctggaaatagatctcatttttaggttttctcttcgttccagataccaaataaatgggacagagaataaaatttttgttaaaatatgtgctcatctcctaagtagctcttcagagtctgaccgtaagtaaaaacacacagaattgtgttgactgggggaggtgaatcacaaaaaagttacgaggagtttaagagttaaatattatttgatcgtggctgtcaaatttagtgaacaacatagattggatttggagttggtagtaggtatggttctcataccagaattctcttaaaaaaaaaaaaaaggacaattggaattgccttatttatttttaaaatcaatgcttactagttggtaggattcccaggtcagcagcagggttgattaaataatcttgacaatgagcagctgccatcttgggggatttcattctgtggttttttaaatgtttcgtctttgatgctaccatccagggcttcttattgtgaccttgtagcctattttgttcctgctgttctctaacatggtgcagttcacrcagactggtttaggtacttcacaactcaccattgtctctctgaccccaagcctagtcccttttacatcaccatcttctcagacttcttgcctattcttaaaatatgttttggttaatgattgaattaggacatcagcttaagcaattcctgtaacggtttaacgttgttgaagttcaaggcacataataaaattctccctgatgtgtgtgtaagtataaacaaagtaatgtatcaaagcgttcactttataatgaagtcatttcattgggaaggaaagctgcaaagattattgggggactagtgattaataaaatcctgtaatatttttgaagtgaaaatttgtactgaaattgtacatgatacctattaaatgtttttgtctttttttaaattgggtttatttcttttcagatatgaagagaaccttagaatatctttggctaccttctgttctggatcaaatgtaattactggttatttagtaattcctcttgagtttcgggttttggttttttgttttttttgtttttgtttttgttttttttggagacagtctcactctgtcgcccagggtggagtgcagtggtgcgatcttgctcactgcaacctgcagtgagcaacccgggttcaagcaattctcctgcctcagtctcctgaatagctgggcttacaggcatgtcccaccatgcctggctaatttttttgtatttttagtagagacggggtttcaccatattggccaagctggtctcaaactcctgaccttgtgatccgcctgcctaggcctctcaaagtgctgagattacaggtgtgagccactgcgcccaaccggttcgtttttttaactattaaattaagttcaaaaaccagaaaagtaatcatctggttaagaatttatgacttgaatgctgctagcagggaatactgccataacatataataactttatgctacttagagatgctagaattcattttctgtacgattttatagcaaacttataaaaactgaactgctagcttgagtccattacagcatagaagcaggagacggaagtaaacacttcaagttctgtctaggtttgctctaagctaattaatacaatatagatcataaatgttctctgatgattttcaggaataagaataaatctctaataaatatggctagtccttcctgaccagtaaggaggcatattgaatttactaaatctgacagccggttgcagaaacttccttttcaagggactgggggagataggtttaaaacgcactctcatccaaggcaaattgtttgcatttatctcaatgaggtaataagagtacaaatgaggccaggcacggtggctcacgcctgtaatctcaacattttgggaggccaaggcgggtggatcacctgaggccgggtgtttgagaccagcctggccaacatggtgaaaccctgtctctactaaaaatatgaaaattagctgggagaggtggcacacacctgtaatcctcaggaggctgaggcaggagaatccctttaagcccaggaggcagaggttgcagcgagccgagattgcaccactgcactccagccagagtgtgactctgtctcaaataaataaataaatgagtataaatgagagagtaattgtgaacagacagggaagatttgggagaagagtattaagaattttgggccaggcacggtggctcatgcctgtaatcccagcactttgggaggccgaggcaggcggatcacgaggtcaggagatcgagaccatcctagctaacacggtgaaaccccgtctctactaaaaatacaaaaaattagccgggcatggtggtgggcgcctgtagtcccagctactcgggaggctgaggcaggagaatggcgtgaacccaggaggcggagcttgcagtgagctgagatcgtgcgactgcactccatcctgggcgacagagtgagactccgtctcaaaaaggaattttgaactatttttttaattaattatattttcagagctgttttatgttcacggcaaaattgcccaaaaagtagagtttccatatcctccctaccccaacacgtgcacagcctcctccactattgacttccccccaccagactggtacatttgtttcaatcaattgactacattggtacatcatcctcccaagtccatagtttagggttcacttttggtgttgcacattctatgggcttggacaagtgtataatgacatggatccaccattgcattatcatgcagaggagtttaccgtaaaaatcctctgggccccacctattcatccctccttcctctcaatccctggcaaccacttaccttttactgtctccatggtttttccctttcctgaatgtcatagagttggaatcacacagtatgtagtcttttcatgagtggatagctcttttttttcagtgctgaatataatccattgtctggacgtaccagtttatccattctcctactgaaagacaccttagttgccttcaagttttggcaattatgaataaagctgctatcaacatctgtgtgcatgtttttgtgtggacataagttttcaattcatttgggtaaataggaaggagtgtaattgctggatcatatggtaagagtatgtctgtaagaaactgccaaactgtcttccaaagtggcagtaccattttgcattccccccagcagtgaatgagagttcctgttgctccacatcctcaccagcatccggtgctgacagcattttgggattttggccattctaacaggtatgttgtgatgtcttaatttgcaatttcctaatgacatgatattgaacatctcgtatgtttgccatctgtgtgtcttctttggtgaggtatctgttcatatatttggcccagtttttaaatggataaagttcattttcttactgttgagttttaagcgttcttcatacattttggataacagtcctttatcagatacatcttttgtaagtattttctctgagtctgtggcttgtcttttgattctcttgacattgtctttttgcagagcagaaagaggattaagaatttgaaaagtaacagagtcgattaatagaaaggatgttagtcaatggtaaagataatttcagaggacctatagtttaggattttattctgtgtataacagaagaagttgtttgtagaaatatctgaataaatctgtgtggtagaatggttaaggttataggctttgcctgggataatagcagctcttcaaagcatctggaatatagtttagaaatggtatgaagtggacccaacagcttcttcctgagggacgcctatacaatgaccatttgttaagtaataaaccattgctcttgcttcccgaattaggtttctcaaggggttattcaattttattgacattttcaaagaacacctttgggatttatatatcctttctattgttttcttttctttttagagacaggatctcactctgtcacccaggctggagtgcagtggcatgatcatagctcactgtagccttgacctcctgggctcaagcaatactcccacctcaggtcccaagtagctgaaactataggggcttgccaccatgcctggctagttttttgtattttttgtagagacagggtttcaccatgttgcccaggctggtctcgaactcctggcctcgagcaatcctccccccttggcctcccaaagtgctgggactacagtgcagtggttcagacctgtaatcttagtactttgggaggccgaggcaggcagatcacttgaggtcaggagttcaagatcagcctggccaaatatgggaaaaaccattctctactacaaatacaaaaattagccaggcatggtggtgcatgcctgtaatcccagctacttgggaggctgaggtacaagaatcgcttgaacccaggaggtggaggctgcagtgagccaagattgtgccactgcactccatcctgggtgacagagtgagactgtctaaaaatatattttttctttgtatttttaaacatctttcattaatttttaactttaacttggatctgttttgtacttttacttttgttcttttcctaatcttaatagtagaactgggttttcatttttggtctttcatagttaataataaagatatttaattaaagttatacattttcccttgattttagctttaactgcaccctatacattttggaatgaaatttcctccttgtcattaattgctagattgtaatttgtcgttgcgttctctttgatccattggttatttaggagactgtataatttccaaatagttaagggttttttgtttttatttttgattttgggttttttgttttttttttttttggcattttaaattacttagccctaattttattggcctgtgacctgagactatgacctagaaaaccatctacttttaaaaatgtgttaacgttcgatgtggccatgtggaggattgatttgcaaagtggtttcatcaatataattttttttttttagtcatagggtacaaaattgtgtgtgtgtgtgtgagagagagagagagagaaattgatttgctgtcaattacactctacctgctggaacaggtctttgtgcaaggcagatctgtgggggatggtgaaggctctagttctagttccaaagtgatgccttcgccttgctcctaccaagattccttagatcttgctgaataaatgtttcacgatttgttgtcagccttttggtcaatctctagagacattgaatgatggcttttgctaattttgaccagtttaatagatgtctttctgtgggagaggtttccctgagcagctcatacagctgttccagaatgtagaccttctgggctctccgtgttctgtagcattggcctgcttgtctatccgtgtgccaatacaacgttgccttatttcatttaactttgttatctgataagcactctcaccatattctttttctttaagagtatcttggctatttttgagtctttgtatttttagatcaattttaaaatcaattgaagtttcattttttaaaaacctgttgcaatttttgggattgcatggaatagaatagacagctttacggtattgagtcttcagtccaagaacccatcacatctcttcatttaaggttttccttgatgtttcttagtttttaacttgtaaaaagtttcagacatacattaaatcagagggaatagcctggaccctcgcatatctgtcacctgggatttaacagtaataaccctttgctatatttgctttatatatttttcctttgctgaaatatttcaaagcaattctgctatcatacttgattcctcggtactttcaacgtgtatctccaacattttctttcataaccttaatgtcattattatatctaacagacaatacttattttaaaattcatttgctattttttactagtatacttacagactttttatattgaatgcatcagcaaccttgccaaactctcaaaattctaacaatttactgtattttgatacacctagtataccatcaattatcagacacaccatttatgtaccatcattcttaagacggcttccaactaagactcagtagctattgtgagatgcagcccaattacagagatgttcaaatattgtgaaatgtgtcttggaattgataaaacatggtatctgtggtttttttggattttctatgtaaataatcatattagcaaacaatgaattttgtttattcctttctcatccttgtatctttgtgtctttttcttgccttacagagttggctaggacatttaggacgatgtttaaaatgctgctggtaggcattcttgtgttattcctgttctcagagggaagatgttaatatttttaccactaagtatgatgtttactgttgttgtttttttcttttaatatcctttattgacaaaattctcttcctggcttgctaagtttatcttttgcatgaatagtggttgaattttatcagatattttgtgtgtattgcaatgattatgatttttccttttgtttaatttggggaattacattgatcaatttttcagtgctaagcaaaccttgcattcattcattgcgtaactccaacttggggagattattttacccccttaaatattgctggctttaatttgtcaatatttttgcttgggatttttgcagcta

SEQ ID NO: 94155 - DNA, 232925 bp, Homo sapiens
  misc_feature (1)...(232925): n = A,T,C or G
tttccctggaatggttgctctgaaagccttcgagctcccggtaagcactttgactgtcctgaggctgccatgctgtgaagaactcaaactggcccataataaaagatcatatatgtagagagcctgagactacttgagagatagaaatagagatgagggtggagataagagagagagagagagacagagagagcatgcatggccacccctcacccccttttaccagccactgtttaactgcaacgacatgagaaaccctgggccagaactaacaatctaagaccttctcaaattccaaatgcacagaaaccatgagagataatgtaatgattgttactgttttaagctattaaatgttgcagtaatgtgttacatactgataaatagctgaaatatcccataagcttttcctaatttgggagtgacataatttcctttcttcttgtagaatctgaacagctctaccattttcaacctagagaacaggtttggactggcacaggcactagtggcaagctttagcatgacatacatagatagctgacccctgacctagatagagaaatgatgttttgtagaaggtatactgtggtgatagctgggaaaacatgaaaattagaaacaagcagtttcagaaaatttttactttgttatatgagagtaaaaaacacaaacagaaaaatccaatacaatattaattaattctacaagattaatacttaaccttgtctagtcacttaattctactttctaaagccaaaacctgtaattgctaaaattgtaagtaaaatttatattcttagaatattttaatttctttctttattttcttttttcttttttttctttttttttgagatggtgtcttgctctgttgcctaggctggagtgcagcggtgcaatcctggctcactgcaatctctgcctaccaggttcagcgattctcctgcctcagcttcccgagtagctgtgattacaggagagtgccatcatgcccagctaatttttgtatttttagtagaaacagggtttctccatgttgatcaggctggtcttgaactcctgacatgaggtgatctgccacctcggcctcccaaagtgctgggattacaggcatgagccaccgtgcctggtcaatatttgaatttcttttagtgattgatagcgttttctttttaaaagatgtaagtaagtatacagagaaatgcacctgatttatttttgtctttgttttcatttgacaaatacccatgtagggcttactatgatgaggataaatcattggaggagacaaagggaggtaagtaacttgacaaagttggcaaaattggaacaggagcccaggaactcttagtccaaagtctatattctagattactaactttaatgccttgttgacaagtacaccagctattatctgtctaaatgagtattttcccccttcaaaattgaagtatttctgggaatatccccagtgggggcaaatttattatgaacatagaagcgaagtgttactgaagctatcttttatttacatttgaaagaatacttctaccattcagagagattttcaagtacttaaacacaagacatcccaaataccaataaaaatacaatttaaaacattatgaatattcaaaaatatcagtcttcatgttgctaattgctgaagtgcacactcatttcttttacagttcggatttcataattacctacttctttacttgtgtattggctgtttctccccataagcttatgtttgcataccagtgcctagtctaaggcttggcatagaggaagtgttcaagaaacattttgaataaattaagggggaaataatgtgagggaatggggaatggcttcataagatgaaccagatctggaaggaaaggaataacatttgttgaatgcttactatgggacaggcactgttctaagtgctttacatgtctatctgtattatatgatatgacatagtatagcttgtttattatctcagtaggatgtaatttctagatgacagagaatttgtattattcactataaatcttccagggcgtatatcaggggctgacacatagtaggttaatctgtaaatatttattgaataaatacacaaaaatcacctcttttaatccccataacaactttaaaaggcaggtacttttaatatcctcatttttctgatgaggaagctgaggccccgaggtaataagattttcaaagacacagggctggaaagattcaaacccagtcagtctgattctagacttcattcttgttatggattgaactgtgtcccctgaaaagatattttgaagttctaatccctggtacctgtggacgtaaaactaatataatcttttttttttttttttgagacagagccttgctctgttgcttaggctggagtacagtggcacaatcgtggctcactgtaggcttgacctcctgggctcaagcaattcttctgcttcagcctcctgaatagctgggactataggtgcatgccaccgcaccgggataatttttttttttttcaagttttttgtagagacagggtctcactttgttgcccaggctggtcttgaactcctggcttcaagtgatcctcctgccttgacctccccgaatgctgagattacaggtgtgagccacaatgcctggcctgaaactaataaaatgctcttaaaagaatgtggtatagtgtttacccagagtaaataagaaataattccaaaagaggaactgagaaacatttcaaataatggcagctggccagatgctgtggctcacgcctgtaatcccagcactttgggaggctgaggcgggcagatcacttgaggtcagaaatttgagatcagccttgccaacatggtgaaaccctgtctctactaaaaatacaaaaattagccagatgtgtggtgcattcctgtaaccccagctactagggaggctgaggcaggggaatcacttgaacctaggaggcggaggtcgcagtgagccaagattacgccactgcactccagcctgggcaacagcgtgagactctgttggggggaaaataatggcagcaatgttgagagtatgtgcaaaatttctccagcagtttgctgtcttgaagtacaatagttatgtggacatctgaatttcagaaggtttatttaaatgcagttttactaatttagaattttattccatatgccatgttatcaactgggatgtgaacttttaacaaaatggtttgaggaatgaaacaactgggttgactatctgagaagaaggaaaagaatcagtgctttgtaaagaaaatcagtatgttgcatgcatttacggttataaatagctatatatgtgaaactaataaggtagtataacttgagttactctgcgattcatgtaacaacatctgtatgaacattacaataacacaggtatgtatatttgatctttatttatttaaaacatttaattaagggcccaaatgcattggattagacttgtgctctctaattcgatggtcactggcatgttactaagcatttgaaatgtggccagtgcaaatgagatactcagtttaaattgtatttgattttaatttaaatataaaacagatactcaatttagtcattggaaaactttaaggtatatttgcaacaagttaggtatgagagtctactattgcaaatgtaagttttataaaattgaaatacagatcaaatttctgataaaaatttggtgtctaaattgagatgtgttataaaatgcacactagattttgaagacatagtagtagtgtgctttttgtgtgaagaaatacagaatcatttagttaatattataaatcctcacctagatatgtattttttctattaatcttttttatctcatgaaagtaaaatattagaattgctgtatgtactaagagttatttcctgaattttctatacttgcaatctcaactgacattacatcagagtatctattacaatcatattttatgttgtaaaagctctttgtgtgctaaactataacttgggaaagaaaaatctgattttgactgatggcattctcacctgtgtataacagaaatctatgttttagtctcttaatttgtgaatgatacccattcttaacattaccaattgctttcagagtgacagtgcaaccacagtttgttacaaggcaaattaaagcagtttttttctctgcatctgttttcctacgtttttggaaataaaacctaaccttatgagattattatttaaaaaagactgaaaattttgatattctagctaacatttatgtagaaaaataggttctttctagtattcttggaactacatatgaatgtactaaatggcttcttcagctaggccttatcctgtttcattcaagatgacggcggttattttaataattaaaataaacatacagatgaaagatgtgaactttacctactactggcaggatattgtaatccccttgtaatgttgcctttgagggagaggccatatactctttgtgggttactccctgtacttataacacttttcctatctgtagatattaaatctcagaaacaggaacaggtaggtagtatatctaaattcatgtaataagtactttattataataagggtctgttgtactaacatttttgtttcttcttaagcagcttgaattggctcccatgccagctgttaaactgtttcctctcacataaaacaccctaactgtaatgtgtctcagttaattcaggagagtgagttgtgtaaagtacacctttttcttagatgttgtaggattgagtatttatggagtatagaattaacaatgaaaggtgtcatttaacttcaaggatttttttcaaaaagaactttgtgatgcctagaaaatattctctataaaaacaacgaattctagataattcaggcgaggtcaaagaagcttctaaatgtaaatacggacaaaatacaattactgtaagaaatctttctgataaggcaaagttaacataactagaaatgaaaacactgtgattggatgtgtgtctagtatatggagatataaaatcagcaaataatctcaaacactatcctttgtaatatcagtatgcagagacaaatgggacagaaactagcaatcctatttaactgaaaaggaaactggggcacagaaggctttagtgtctgttgctattaatttatttttatcagacaggcactccttttggctatgatctgactattcctccagtccatgaacctccaagcataaatatcaataaaacaataaaaaaatggcccggcgcggtggctcacacctataatcccagcactttggaaggcggaggcgggcggatcacctgaggttgggaggaaggcctgaaagactgcttactcatcattattcagagagagcagtggttcttgaacatcaggtttctagaactcccagagaaataatatacaagataaacaggactgttcattgggcctttgcaccctaacaccttgactcttatcttattgacattcaaatacaattccggtggaaaatctgtagaaactgacaggtgtggcgcctgagctctcctctctgggcttcctcccagttcccttgggcctcggcattctgggtcaaggttggttccctccggcctcagggccccgggcatggccggcatcctggatggcacggcgaaggttgtggatctgtagaaagagggcttccaagacgctaacaagacaggagagacgagtctgattctcctcagcctgtcgaggtgttctgtcaacagttctggggacccctcacgagtccttccgtcctgtaatccccctcggtgtctgagcgaccgccggctctgcctgaaccgctcaggttcgcaccttctggcatcttctcgcactttctccagccttcccgggcagggggatcctggcctgacgctccccgctccctgcccccgccctgggtctctggggtcagcagagccacccagtgcactgcgtttaggcatgcccacatggagagaggcgaccacagcggtgatcataagcccatggtgggcagaggccctatggagccaagggctccggccgccacccccgctccgccaccagcagcgctgccaggactcgctcttcctcctcctcctcacacgccggctcggatgatctcctgccatgactcagcgcttctcgcaggctgccctgctggggacaccggcttcgctcgggcccctcccgacgcgtccaccccctctcgccacccacgcccgcccccagccgctgggcctttcccagtgcggccgccgccgccacagctgcagtcagcaccgtcaccccagcagcatccgccgcctgcaycgcgcgtgcggcccgccccggcctgaccccgccgccgaacccggcgccagccatggagcccgaagccccccgtcgccgccacacccatcagcgcggctacctgctgacacggaaccctcacctcaacaaggtaaacccgcaggcccacctggccgcccatcggcccctctctatcagggtcagggccctcttgcaggtccccgcaccatggcctcgcccctccgccgctcccctgggaaggttcccggtgagcggccgcggcctggggggccttggtgtgggcagaaggaagaaggacgcctaatcgggtccgtatccactagagtgatggcagggcagtgctggtgcctctgcacctcggcatcccatgttagggatagaggtaaaggtaaaggttagtgatagaggaaaaggtgatacttttcggcagctcttctccaaaaacaagagcccagacaatgaaagtagtatcagacaaagtgtgtgaatggagtgccaggtcagactccatgtgccactcacttactggttgcacacacagtgtggcaattattggaagttgataaggcgagaagtggctcaactggtcctgyccagacagaaacgtgtactgagtgccttcagatcacgttagcaatctggaaatccaagtcctctcggtttctggagtgacacggttaagagtctrggaatgcgtggtgggtggcctctgtcttggacactttgcatggcttggtagaagaactctgtcccagacatgggactgtgggtaaagccatttcttttctttctttcttttgttttgttttgttttgttttgtttttaatttggctttctggaagttaaaaaaaaawtttgtttagagctgctctctttttattaaaggggaattcagtgtacaccctgttcagagactccttttcggatcctggtaacatttcattttccttcactggtgatgcaatataagcactcgggatgtctctcaaataaaaaatacctccgaatttatcattttgcttccacacttattttacagccaggtttgtctcgggattgttccttttgtgtgtgtgtgtgcgtgcgctttggacatttcctatttattcaggagtctgaaaatgccatcagtcagcacagaggtttgtttagttattttggttgtctctttggtggactgcatttcacattaagaacagaagctcagctttttccttgtcgtgttcctgatgatttgttgatcatattaatgacttaaagacatgatttatttaacaagttatagtcagtgtgattttttttgtgtgtgtggtgacaggcaccttttacaaatctatgactgtgtgctatctgccgtcatgtagcattattaaattgtaaataattccaacttatttctttctttaaaataaatttaattgctagtttgattgttttttcttttcttttattattctgcaggtttgccacctattttcagtagaacaaaagtaaaatttgatgtgacaaaactatttgtgacttgtatgtgtcacctgcctactgtaatttatgaccaagttgtgggttgacacttaagaaggaccacatgagttgtataacctgtttgattttcctcaagttgggggcaagagtgtctattaagagtatgtagatggcatgagcaatccctgagcaagagtaattattgmctttactatgcttacatcaagaatttattattattattattattatttgagacggagtctcgctctgtcgcccaggttggagtgcagtggcgcgatctccgctcactgcaagctccacctcctgggttcacgccattctcctgcctcagcctcccgagtagctgagactacaagcgcccgccaccatgcccggcaaattttttgtacttttagtacagactgggtttcaccgtgttagtcaggattgtctcgatctcctggcttcgtgatccacccgcctcagcctcccaaagtgctgggattacaggcatgagccaccgcgcccagccaagaatttatgatataacaatccttgtgactcctgttcacaaggttactaggaattaaggattaattcctacttcagaataatagtatcacaaagatcttctatcaaagataagatgtaacattaatatgttaaaagcacattttcaaatttgtaatacttgaactttttatctgcattatgtcaaattggatccacaatccagtgtaccaacttkgaggcaatcgatggaataatcttttactcagttctaggatggttatctggtaccttatgggagtaacagagtttcctatgtaccattgaaactacagctatgggactttcttcatctgtcatacattcaagacctctaggcctttaattttgctagtagctcaggaatgttttggcttatttttattcttattattttgtaataaccttggctcyaaagagacaagagtagattttacttccctcaacaacccagcctgtcacatgtcttcttcaaccacactaacacagaacttcatcatttacctttgggtagctgcaacaacagttttgctggttttatttccattgatatagttcattctacatatatatatgaaagagacaccttcattaattaacattttcttcacttttctattatccaagcatttatagtatgttattatttcctattatgtttaatgtaaaatcagtctgtcaattgggtttacagtcttctccaaatttatcttattcgttccccaatgtaggcttccacttaaaatatatttgctgaatctcttaattctttcctttttgtgtgtaatttctactatgaaaatgtcttagttgatttaataatgatctttctagggaagcatttcttagttatgttagtcttattatttaacacctctgtttttatgtattcagttgtactatataattttgtatttactaacttgtctttttattttcctttttttttttttgagacagagccttgttctgttgcccaggctggagtgcagtggtgtgatctaggttcactgcaaactctacctcctgggttcaagtgactcttgtgcctcagcctcctgagtagctgagattacaggcatgtgccactatgcccagctaatttctatattttaatagagacagggtttggtcatgttggccacgctggtctcaaactcctgaccttaagtgatctgcccgcctcggcctcccaaaagtgttgggattacaggcgtgagctactgcacccggccataagttgtatttttttttcttatttctttgattgtcatagggcaggagtcacaatatttagtacagtattttgctcagtagacattaaataaatgtttacttaatgaatgagccatgtctttatttttgtctttaaacagaactcagcttttaaagtgatagtttaggcattgtcctctttaaagtaattttgtgaaaataaattcacattgaagtctaaagtttagttcacttcctatgccattrtatagtatgctgaaatgtagtcagaaaagttgaaatgtggtttaagcttgataatctcatgaaattttaattacttgctggataacctaagggaggtgcttcatcttggtaaaatcaaagttaacagtagatatggtatgaattcaaaaattttcaaaaaacttaagagaattaggatcttcatttgttatgattcatgtatgagtctaagccttactatttgtttgtattaaaatatgcatcattcaaggtaggatttcatcaaaacaattggggaagtaaatctgcctcatgtttatgagatttaatatttttctgtgcatagccctaactatttttgagatgcttatctttgccggttttatataaatgtgtctaatttaatgtttaatgttttttattttcagggatatggtctaatatagatgagttgtgttttaaatttttttctcaataattttcatgtgactaataatatttcataaattgcccttcaaaattaaaattctacacataataaaataatcatgcctattttttattctcaattagtttatttccctttgcaatggtagaaaacactaattgatagttctrtcataattgtgcttacatggtttctatatcttaagagtaaataataacatgacccataagtaaatctccaaacaacaccactcttccatattttaggcagtttggttcagtataagtcatgtttaagagttacgttccagtagaagatagtgttttatcgaagttaatttgggtcatcattactaacttttacatctaaaaaatcagcttttgtagctgtttgtttcctggcatgacaagacctagttgggtgtgttgtaagaaagagagagaaataagattcatggcaatgaaggaaaagtaccctaaacctctttttcttcaatgtaaactagacctgaatgaattattcagaaaatttcatccaaccacattctctagagttgcctctgcaacgtgagaaactgatttattatttaacatagaatcccacttatgtgaaagtcatatacagccaggtacctctgtatatgtttgttaccttgctgcagtkgaaacaacagtagtagtatagaatatcacaataacaaaatgtgtgctgtaataagaaaggtgagtttgatatggtaactcttgagacaggtgatatggagtataaaaaatattgaagaaaggaatggatttgagattttgcctttttcagctctgatttccctctaacttttggacaggtaggggagaatgtgatgtaaaggaatggacattctaaaactttgtgcctagaagaaatgagcccaagtcccaagcctcccaattagctgtgtgatatagcatctgggaaggtcctccttgctacatcatcccatggcggaaggcaagatggtagagggtgagaaggagcaagagagggctgaacttgcttttataaaggaacccactcttgcttgcaataacgaacccactcctgcattaacaatactagtcacctcataaaaatcccacctcttaacacagttgcattggggattaacaacacatggacttttggggacagattgaaaccatagtaggaagtcaggtaatataataatgaataatgttctctaaaaacatgagaatataactrctagagcttttctactaatatacagaccctggatttaaaaacactggtattattttttcaataatcaggtaatggttgagtaagaacatcggcaaaaatacttgtgtgtttgatatggtttgtctgtgttcctacccaaatctcatcttgaattgtagttcccataatccccatgtgttgtgggagggacccagtgggaggtaattgaatgatgggggtggttacccccatgctgctgttctcctggtagtgagtgagttctcacgagatctgatggttttataaggggctttccccccttttgctcattctttttcctgccgccatgtgaagaaggatgtgtttgtttcccctcccgccatgattgtatgtttcctgaggcctacccagccatgctgaactgtgagtcaattaagcatctttctttataaatttcccagtcttggatatgtctttattagtagcatgagaacagactaatacagtattcataccaatgttagtaattatgttatsaggctagttgtgatggctcacacmtgtaatgccagatgtgagccacctgggaggccgaggtaggaggatcacttgagcccaggagttcaagaccagactgggaaacatagcaaaatcccatctttacaaaaaagaaaaaaaaatacaaaaagctgggcatggtggtgtgcacctgtagtctcagctacttgagtggctgaggtgggaggccacagtgagccatgatcacacccactgcactccagcctgtatgacagattgagaccttgtctcagaaaaacaaaacaaagcaaaacaaaacaaaagaataaaaccttagagatccagaggctgaaggagttctaagacttccattgtactattaggcattggccctttaagcttagaatatatttaaatacatttaaattgtctattcagagtcttaagatggccatctagtaagtccaggagagaagccatagaataaaatcagccctccagacaccttgattttggacttctatccttcagaactttgataaaataaatttatgtttaagccacccagtgtgtgacactttgttgtggcagccctagcaaactaatgatatacttctgtaattgaagcaaaatttcataatacagcactttcccttgctttgtttagtagacattttctggactttgacaggaacatgtaggtgagaagcagtaatgatctaatcagtcaggtttgcttgtagccattgccaatttttgacaatctctgtcttttgatttttgtgtttaggccatttacatttaatgtaattgttgatacacagagagataaacagatttctatcatatcataggtgtctgttcccttatttttcattcctctatttctcctttccaacctaatttttaattacttaaatatttttattattccattttgatttattctgtgagtttttgacaatatttctttgtatagcttgtttttagtacttggtctggtgattatgatacacataccgaacttttcacagtcaacttaaagttaaaatttcaccacttcaattgaaatatagagatcttaccattatatagatctcattaccttcctctatttatgttgtagttatatgtattatatcctcttatatctctatatatgtattacacaaatatttttaaaatagtaatttaatgtaatgtttataccttttttttttttttgagacagggtcttgctctgttatccaggctggagtgcaatggcgtgatcacagctcactgcagccttgacctcccagactcagtccgtcctcttgagtagctggaacttcaggtgcacaccatcatgcctagctaatttttgtatttttttgtagagatggcattttgccatgttccccagactggtctgaaactcctgggctcaagaaatcctcccactgtggccttccaaagtgctggtattataggtgtggcctgtaacttttatttatttttattttatttatttttcatttttttttgagacagaatcttgctttgtcatccaggcaggagggcagtggtaacatggctcactgcagccttgacctcaaggctcaagcaatcctcccaccttagcttcctgagcatctgggactacaggcatgtgctaccactcctggctaattttcatattttttgtagaaacacaatttcrtcatgttaccccatctagtgtcaaactcctgagctcaaggtgtctgcctacctcagcctcccaaagtgctgggattacagayttgagccactgtgcctggccctaacttttgtttttaactgtcacacatattttaaagagtttaagagggaaaggataatctattagagttatccaggtagatactatttctgttactctgtttcattccccatgttctgtgtttgttttggggtatcatttctcttccatttaaagaatgtcctctaacatttttttaaagcaggtttgctggaaactaattgtcttagtttttcttcctctgagaatgtctattttatcttcatttgtgaaggatattttcaatagttatakaataatgagttgacagttctttccctttaagacctaaaaaaaaaaaagccatttctcttcctcccgccctttctttttcctgatgagaaatctgcagtcattcaagttgatatatgtttgtaatacatcagttttctctggatgttttaatggtattttatttttcactttcagaatcttaaatataatgtttctgggtttggaggttttggggtttatcttcttggggttttctgagcttcctgattctgtaagtatatgtcttttatcaaatttgatatgttttcagccattattttctccaaatatttttttctttctcctctctttctgggactctgatgatacaaatgttaggccttttgatattgtcctgaggctctgagcctcaggtgactatatgatagtatcaaaaggcctacttttttaaggacttgttttctctttattttccaaactgatttgtttctaatgattcagctttaagttcactgatgctttctactctcatctcaattctgttcttcagcccatccaatgaatattttattataattattgtatttttaagttctaaaatttccatttggtatagcttttatttcttgtccaatactttctttccatttatttagaaagactttgcccttatgttcttaggcatggttataataactgattgtaagtctttgtacattgtacagaaatttcaaggtctgacacctcaggattggtgtttgcttattagtcttttattttccaagttaacgttttcctgtttctatgttgagtgattttttaatctattctggacatttgcatattatgagattctagctgtcagttgtatcttaaggggaatactgttcttctttgctttagtggtcactcaacctggttaggtgattttgcaagttggacccacctgtggcctgcggttccgatatcaatttggttttcaaagtctactcagtagtactgtttgtatttgtccattatgtgtaccgcccagtggatagtgtgggatctgtgcagtagtctatgctatagtttacttctcaaagcctttggtatgctgtttaaggtcaratctatgcacgtttagctcaaaagtgagtgtagaagttaatatacaactttatgggattgctctcatgagttcccttctttctgtgatctctgatattttttgtttccatgaggaccccctttccagtcctcatggccggaaaactgggcttttgttttcctgccctgctgtgtacttcctccagatttatttgcatctgatgccatacgattggaagacagagagaaagttgcaacaggcatttgacctacgatcttgagaccagctctatatcctctggtaaaaagaatgattcccttaccttagaattttaggcatctgtcgtggttattgcttctgccatcccygtgggattacctgggagttgggactagagaggtggaaaagaatattggatgttcttccttctctgacctttaagcaccccctttctgattcttggaccagaaagataaggcttctcttggcagtctttgtacacaatcaattgcacttccagcttttctgctgcttttgagtcaaggccagttgattacagcagagagaaaaaaaagccaggccatattggaggataaaatgccaggaaacttaatctggttttgtcgtactttagattctaatcttcttccttagttcttctgctatcatgtatttttcagtcttcaaatagctgctcaaygcattctatacaaggattattgttggatttagtgggagagacaaggtatactatagctaccactttgcacagaaccagaccctcaggttgttatttttaaggtatgaatgtgtgaaactcagtctaacttgattttaagttcggagaagaaaaataccaggcaattggttcccaaatgtacactcaacattttttccctttttactgggtayatagttgctataccaatcaatattaataataaagattattgtgtggaaatggttcatgtaagacaaaarctctatacataatttataaaatgtctgtgttctaaggatttagaaagaagttttgcctttttgatatctacatacttcatttgtgcccctttttgtgctgtgaaggagaagagcaagttcgacgttcagaatttctttggggttccctctcttggctttgggccccccctccctgtctscatacagggaagcttctttctttctttccccttcttttgtgcctattaaactgtccactacttaaaaccaaaaaaacaaaaaactaaaaacaaaaaaacaaaaaacaaaaacaaaaacaacaacaacaaaaaaacccaacaacaacaacaaaaatttctctgtggatgtgggaaggagtgttatactgttttgcatcatagatttatctttcaacatagttgctcttagggcctggaatgtagtaggtattctgtaataatttgttgaatgaatgaatcagggattattcttgaagtaacactgttttaccttgcagatattgctataacctctcagsagttcacatcctaccttgtgggataaatgcacaataacctcttttatatgctgttgaatgtgtgttggagaatctcttttccttaatgggtataaggatgaccactatatcatttaggattaggttttgctacatataacaaaaaagcaaaataaaagtgagttaactaagatacagcttaattaagataaactgttctgtgggtccacaaagtcatcaggaacgtaggcttctcttttgctgctctgtcatcttcaggatcacttcatggtcctaactgagtatgtaggtctaaagataccacctacagactgggcgcagtggcttatgcctgtaatccaagcactttgggaggctgaggcaggcggatcacttcaggtcaggagttcgaggccagcctggccaacatggtgaaattccatctctactaaaaatataaaaattagctgggcatggcggtgggcgcctgtagtcccagctacttgggaggctgagacaggagaatcacttgaacccaggaggtgaaggttgcagtgaaccaagatcgcaccactgcactccagcctcggtgacagtgcaaggctccgtctcaaaagaaaaaaaaaagataccacctacacattccaagatggctgctggaagaaatgagagaattacaagaaggcctgcttttcagtgaagtcccctcttttaaagtagccttccccacatttcacatgatacttccacttaggactcattgttcagtactctgtcatatggtcacatataactacaggggagtcaggaaatgtcttttatttaatgcattgccaccccaaataatattaggattctgttcctggaaaggaagagggaaatagatgttgtcgtaggcaattagcagtctctaccatagccagagctgccagaagcaaaaggaatgagatttaataaatgaaaatattaaatatgaatgtaatattcttgaaaattgaggtgaatggttcttaatattttaaaaatagtcttatagattcgctttataaaaataagatataataatgtgaaaagtatgtctgccacttctgtgtctgggctagctggttcccctccctaaaggcaaccactgttgccagtgaccagtgttttcattatatactagagatattgtatgaagtattttttaaagttaattttcataagttaaaatgttattgatacaggacatgaatcagatatgcccttagtgtggtagataggagataatgttataaagaaaaatgtttcaggtgggagtatgtatgtgaattttatagagacaccgaaaacagattaagaatcatgatatcaggttgagccatctatgatttgcctggtagtctgaaactagttctgaagcattgttctacccaccaccttttgtttttttaaaatctgagctagccttagtatgtggattccttaatacggtgagtgataaacatgcgggttggctattgctaaactcacaacatttttatgaaatggaataactagtcaggaaaggtactggggcttcccatayttaggataatgtttgaaacttcttacctggttaactaggacttgcccactcaggttcgtacctttctttctagtgctcatcttttatcatttctcacagttggtgcagtttccttccctacgctttccctgagaagccaagcttttctgcattaggggttatatacatgctgtttcttctctacctacccccaacttttcacctggtcaactgctactctttctagtcatccttcagattgcattttgacattactcctcagtgaactatttctctaactgtctaaattaagttcttccttttcttttccctgtacttatcacaattgttatagttatttgtgtagcttttcatataatatcctgttaagctctttatattgtaagcctaatgagactatggatcatacctgacaagccactgtttcgttggggtagttcctgtatgcattgtaagcattcactcaatgatatctgtgagtgtgatgattaattttatctgtcaacttgcttaagccacagggtgcacagacatttgttcaaacattactcttgtaactcttgtagtgtcagtgagagtgtttctggataagatgaacatttgaactgagtaaagcagattgccctccctaatgtgggtgggcctcatccaatcagttaaaggacgaaaaagctgagtaagagggaacttctcctgcctgactgtcctgaagctgggacatcaaatttttcctgcccttggactcaaactaaaatgtgggctcttcctgggtcttgaacctcctggctttcagactggatctacaccattaccattggctctcttgggtctctagcttgctggcagcaggtctttggacttgtcagcctccataatcatgtgagccaattatactatttctctcataataaatctcttcatatatataaaggttcagtttcttaggaaaactgaccaatacagcgagcttcacaaccgcccataaagtaactgtaaaagcagagagaaaacatttctgcaaatctccacagtggatctgaagcaagaaagccatcttgtggtgtttctgggaatatcatgtctgaggtatatatcccttaagaaactgaaacagtcctctgcaacagttttcaacatattttgtgccaaaggcacaaaagttggaaagttgatgaagtctgtggtctccttaaatcaatgattttaaataaacagtatacatagtattacaaaggaaaccacttgtaattaaatatagatatcaaaatattaacaaatatatttacaagtgtgtattgtaagatatattcctctttattgaagactcatatagcaagataatatatttaaatatgggcaatttaaagtaaagttttattttttaaagagatcaatatcaaggttgtctgcatgactggcctgtgtgcctgttcatgttattaaaaaaagttgggcctggcgttgtagctcatgcctgtaatcccagtactttgggaggccaaggcgggtggatcacaaggtcaagagatcgagaccatcctggccaacatggtgaaaccccgtctctactaaaaatacaaaaattagctgtgcatggtggcacgcgcctgtagtcccacctgcttgggaggctgaggcaggagaatggcttgaacctgggtggcggaggttgcaatgatccgagatcacgccacttcactctagcctgggcgacaaagtgagactccgtctcaaaacaacaacaacaacaacaacaacaacaaaaaacaacaaaaaaaacatgttagttaggcacagtggctcctgtaatcccagcactttgggaggccaagggaggaagactgcttgaggacaaaggacaggaatttgagatcaatcagggcaacatagtgagaccctgtctcaaaaaaaaattttttttccagatgtggtggtgtatgcgtatagttccagctactcaagaagctaaggcaagaggattgcttgagcccaggaattcgaggctgcagtgagctatgattatactactgcactctatcctgggcaacagactgtctctaaacaaagcaaaacaaaacaaaacaaaaccttattgcagatctaaagctacagtaatttcaaagtaatgaagaacatgaatgttatttccagatacatgccacagatgtaacatggcataaaaataattgttatttctattatgacaaagacacagaaactacttttttttttttttttttagacaaatctcactctgtcacccagcctggagtgcagtggcatgatcttgactcactgcagctttgacttcccgggccaaagacatcctaccacctctgcctcccaagtagctgggactacaggtgcatgccaccacacccagctaatttttttctactttttttttgtagagatggggatctcactatgttkcccaggctggtctcgcactcctgagctcaagcgatcctccygccttggcctcccaaactgctgggattagaggcgtgagtcactgtgcctggccaggaactactattatgtctcttgtttatttcatttaaaatggaaggaaatactaaatctcatagagtttgtgaaaaagatgtccaagttcaggcctccttaattactcatccataccttgaggatctgtgattaggtctgtgaattttaagttaaaagcctctgatagggggctaaattggttcttcaccagaagcactgaccttggtctctgaaaactgattcttaaactcagaggctttcagacaatactgaaatgtgaagaataaaagtcaatattcatgtagcatgtgcatattagtgactttattttaaaactttgtaccataagcatttatataacactttataatttacgtaggatgcaaaaacacctggtctcatttttttcttcccaacaacccagtgaaacacacataacatgtactatgtgttcagtaaatagttgattagtcttatttagcagatgcaataattgaggcaaatctccatttaacccttaacaccttaaatatttgctcaaaatcaagtgttaaataatatctacttgtgactcaaacttgacaaatggtataccctttagtcttatgttgctattcagtcatatttgttggtgaagtgtgcatctaaatttctagtgtatggcttattacaatctattaaataccaaaaatgtactgaatagctgcctacaacaaataattgtctgtcctaaaatgtcactagtaccaagattgagaaacctggtcaagatgaaagtactttaaaaaatccccataaactctggcacttatgctgatatgtagatatatattttggtcaaaccaaagttgatcttgaatgcctggtttaaagtcaatgaaaaaacttgttaatagtggattagtttaattaaatgatttcctaaggtatatgtggaaagcttaattattatttgggagatttttaaatcatgagcactctttgtactattgcataaataaatctttgtttgaaatttgaattcggtgatttggttattcaaaatagaactacacagaaccgaactacagagtactgaaaatttgtttcacattaatgtatttatacatccatttgcttatttaaaatttattaaggccctgctccatcccgacattgtactaggtgctgtcatacaaatatgaatagtatagtgcctgtcttccagacctgggtaaaatggcaggtaagcagaaacaatgaactatgggacattctatgatagaattatcccttgaaggagatcattattcaggaataggcaaaggacacaggaagaaacagacatttgcaacttcgtgtgtaaattaattggtaattaaatgtgttggaattgctgtctaatgttcatagtctgcagattcttctattagcttgaagagttaagaaatcaagacacaatagaggattattttataattctgatctttctggttcattatatgagtaatcactatacacactatcataggcatagaggattttgtcacatatataagattttaaaaaatagtataaaggtacgtatgataactaggaagtctattggcaaccagtggtttatttggattattcatacacgtttcaattgaagatcttaaattttgatttttcatcatttgtgtccattgctagtttcaggtatttactgagaagtctcaatctgcttatttaacagatacttttctctattggtttagtgacagtgaaatttgccttacaacttgttatgataaaatagtgctccatcttgctgaaaagcttttgaaatttttcaaatgatttcaatgatttcaagagatatatttgggaaaatttagtgttgacattgttggctaacaatttttcagccttacaaagaatctataacgatcagtaataagacttttaagtgagaaatacttaaacctctcatccaatgttttaaaaacccatttgctctcttaggtagaggtgttctttctttttttaaaaaaaaatttaagcaaacatgtcatttaaatcacaaaattgttacacttgcttatatcctatattcatacctcaatgaaataattttggggtactataaagtgatattttgctgtaaattttagggtatcaaaggccaagacttagctgaatatattttagatatattgttataatcattaacaggttaaaattactttatatcagatatgagtaaaaattaattactatggaatgaaagcaaatgatcttttgtgtaaagaagctgtgtttaatatattgttggccttaaataattggttttctgtcctttaaaggagactaataaagaatttgtttgtatagttaaatgcattcaaagtaattatttttatatgattattttctgatgtaaactttaccgtgtaaatacatatgtcatctggctgattttttttgggggggaaatgaggttggataccaccataaaaataaatttttttagttttttttttttttttttttcaagatggggtcttgctctgtcacccaggctggagtgcaatggtgtgatctcagctcattgcaaccttaacctcccaggatcaaatgatcttcccacctcagcctcttgagtagctgggaccacaggcatgcaccaccatacctggctaatttattttcaatttttgtggaggtagtatctccctgtgtttcccaggttggtgttgcactcctgggctcaagccatccttctgctttaccctcccaatgtgctgggattacaggtgtgaggcatcatgcccaaccaattctagaaattgttatctatattatcaattagaatttaaaaataatcatttccaaagaacaatttttggcactatagaagccttggaggaaggaacccttcagtagaatgtgttcagggcaaattagtatcaattctcttaatgtagatgtaaaatatgcacataaactatgttaataaattgaaaatatgacwcttaaaacaagctcaattttatctctttcagaataataaataataaaaatataaagggtcctctttctgtactctttatatataaataattttctcccccaaattagcattaaaattaattctaaaacttttttgatatgaagaaataattttaagatagatctactatattatttgcaaggtcacattaataaaatatatataattcatttgaaataaaaaattaagaaaaaattttcataaaggattcaaagacaatcatattagataaagaatattttaggctggatgtgcgagccactgtgcctggcctaaaatattctttgtttaatttgattgtgtartaatcctaggactttgggaggccaaggcaggcagatcgcttgagctcaggagttcaagcctagtctggagcaacatggtgaaacccagtctctaccaaaaaatacaaacacaattagctgagcatggtggcatgtgcctgttgtcttagctacttgggagactgaggcaggaggatcacttgagcctaggaggtggaatatgaaatatatcaataatttgctaaacaaatttttagtcattgtaattatatttctttttaagtaaagagaatattagttactgaattgactctatagagtctaataaaattcaatataatgaaatttacttttggatgtacagttctattagttttgacaaatatgcaatgttgtgtaatcaacaccacaataaggaatggttctatcactgaaaaacattttctttttgctccctctttgaagtcaaacccttttttccactcccagtccctggcaactactgatctttttctattcatataactttgctttttcagaatgtcatataaatggaatcatacagtatgtagccttttgagtctggcttctttcacttaacatgattcatctatgttttgtgtatcaatagtttgtttttttactgttgggtaatatttcagtgtatggatataccttagttttatccatttactagttgaaggacttttgttgtttcaaattatttgcaattattactttccatttgcctttctaccatttttaaccttccttattctcttttctgctttgtcttctccaaaatgtactataacaagtataattaattaatcattagttagttaatccgacacatttttttgattgcctatgaagtgccacacaagtattattctagacactagagattacactagttaaacagaacacacaaaccatctctgccgtaatataatcatagcctcaaatatttaaattataagttctgttaccataatgaattttcatacatgtatagattaattgtcttaaagatctttatgaataagataaatgtttcctttttttttgcaattcagcttgatttagtaatttttcagggaaaaaaagtcattcattggaaatattaaggattgttagtgcggaatacagaatatatttgttctgtttttatggcaatagtttctgataaattactcaggacaaagtttctttctcagttatgcttgctccctgcaaatatcatttctaatataagtccttcgtcatgtcaggaattttcttttcatttctgcttgacagtctcagttttstcaagaagatatacataggttaattagcacagtccagaagaatagttgccctgtttgctgcccttagcagtgaaacaaygtaccattctgctgtctagggatctagtccaaaggttttataaggaatagggaaagcaaagaaaagacaaaaaaggagaaaaaccaggatcaaacttagcatatatgaggatgtctttagakaattagatgtacaggtggtctggaaacctaatatatctatatagacgtctgatatcttcaactacatgaaagacttggtagaaatcaaatgacagttagaacctgcatgtataatttgggttaattatcctttgttggataggccctgcaggataatgctaaggtaaaaattctttgaactattttacttcaaactttacacataactgacctgtttataaatttctacaaaatatatctctaatgaatatgtctctgttagtatgaaaaatagaaactgtggctttaaagaaataatacaatatccattttaaattttttcagggattttaagatttaagtttacttatttgttgatgttcttttaacttgtaaagggtggtaatagaatgtaaacccagtcatgggactagtttttttttttttcttgagacggagtcttgctctgtcacctaggctggagtgcagtggcgcaatctcggctcactgcaacctccgcctcccaggttcaagcgattcttctgcctcagcctcccaagtagctgggagtacaggtacatgccaccacgcccggctaacttttgtatttttagtagagatggggtttcaccatattggccaggctggtctcaaactcccgcctgccctggcctcccaaagtgctgggattacaggcgtgagccaccacgcctggcccataggagtatttttctccacaatcctaggattttaacttggcccagttccctagatttctaagccctaggttttgttgctgttgtttttaaaaggattgaattggcactttagtgtgttttggaaaatttggctaatggtatatgggagtttgtagttgctaaacatcaaagaatataaaaagatttccagatggcattatcatttacatggcataagatatggagaatcgttagatttaggaatcagtttcagaacatgccattggaaaatttatgttaaaagactggctaactataacaataaatgttgttaagtgccattattaagggaatgaaagggcatatgttagtacatctcacaagacttatcaaaatattgatattttgattattatgtttttgggcagattttcaaggcataacactcagaagtttactgcttcttcacatatatttatatatttttgagactttagccagctttcctttccccttttcattttctagttagataaaaatctattgagttttctcttctttctttttcaaatatattactgtccataattttgtttcattccaaggagttatttcatgacattttggtttaaatgttgtcttcccagttatatcttcaacaagtgaagtttgtcttccattttataaattactttttcatacaaatatctcttgttgctttgaattttaaaagtaatttgatcagaatgaatatgctaatcaggtttttgagcagcaatttaatagattttataaattttaatatctctaaaattgaatgtttgaaaatttctatgaattctaaattttctcataataaattctaatgaattataaatattctattgactatgttaaaattttattgcaacaaatttctgagttctatttatgtcaggcactgttgtaagcactagggagaaagcagtgaagaaaacaaaattctgtggccccgtggagttttcattctgttgtgggggtgcaaaccaaaagtaaaaaaagtaaatggcaagcaaagacttcaggcgataccacggatgtctcctggtgccagctggaactgctgggtaaaggactgacagattgtaccatctgccatttaggtccaggagaggatgattggtccagacacaattgaacatactggattatcctcttggaaagagaccattctgctgctgtccacacaaattgaacttcagaggacgcccaactgtaacaatgggggcttttgcagctatgagaatggctgctaatgaaaaatatcttgcaactagacaccagctgtggtgatagcacttagagaccttatgagaattgaaggttgtgcactgcttcttgcgctgaagattctgaaaccattggtcccagcccgctcttgcagttatctcagagagctctatcatggcgtcattcagtggaccaatttgtctctyttcagtctggccctcaacccaggaggctaattaaacacaaacctttccatcagtgacatgaattaatgggtatatctatatgaaaaattagaagaaagasaggattgttcattcattgacctctttcacaaacttcctgggtttggacgtgtttattcctaaccaatcagggtttgtcacctccctgtgggatgaaccgaattgtctctcctttccctctagtaatacactttataagtactcaagagccactattctgtcattgcaagaagctttcagggacagaggaatgattgtagaatcactcagtgcaaagttaatgaacacattcttacctatccaggttgattagagatagcagtagtgacaatgagcaaaactaactatcttagtcccttcaggctgccataacggaataccatgtactggctggcttataagcaaaataaatttatttcttacagctctggaggctgggaagtccaacatcaaggtactgcaaatttggtgtttggtgaggggtctgcttccttatttgtagacagtggtcttcttgctgtgtcctcacatggcagaaggggtgaaaagctctctgaggtaccttttataagggtaataatcctatacatgaggggtctgctctcatgacctaatcacctcccaaaggcccttcttcctatgccatcgccttgggggtgaggatttcaatgtgaattttgggggactcaaatgttcagaccataacaccaactatcatatcatattggtgtacttatcctggacccagaggaacagcagtcatagtctagataaagaagtctcttgggcttcagtgtctccaatcagatgcctctccagagggactccttatcccaatctaccacatcattttcttaatgactacgggagctgctctgatattactttgtcttgtattaatgccagcaaatatcttaggtccattatggtttatgcatcaatgcataatttctatttagttttcatgtttttgagcttcatagcttgttattatcatttgttttatacaatcaatgttcatgtaaacaggtaacataggtataataatagggttgtaatggatatactgaggctttagacaggaggaagcatttgaggtaagacataaagggcagagaaacagggaagaatatcttgaccatgtgccatggaagaataaaagggtgtggtatgtatggacaatggtgagaagttttgtatgcctaggagtacataagaatcaaaggctacaacttgggagaggaatgttgaaacaggtaactcagaatcatataaggcatttcctgacctattttaaaggtggaatcacagcaggtcacaggtgacttactcacattcataattttaaaatctcttctaataatgactttttatttttatatgtactgacattgataataatgattatatcttctttcatttttgtgtctttaagtagtttccttccattcatcatctgattttatcctaattatctctgagtggcacagctctgaaatattatagtattctaatttctacagatagggaaactgagatatggagagcttacatggtttactcacagccacatggccatgcttccagtgaygcagacttcggatttttaattgcatatacttgtcagattttatatgtatgctttttgtctattttcctctcaaatactgttgtgtgtgtgtgtgtgttttttctctataggacttggcctttaccctggaagagagacagcaattgaacattcatggattgttgccaccttccttcaacagtcaggagatccaggttcttagagtagtaaaaaatttcgagcatctgaactctgactttgacaggtaacacattgctgaaggtggtttttatatttctcttatgcagttgtctagtttattttttattgggtgagmaaatgaaaacatttaatgatttggaaagggtagccaactttgagaagaattttcctgtaaacacaatgatgtttttaaaaaatttactctctttaggaacatttgaatgaaataaaattttkctttctaaactgcgtgctcagacagaccatgtttatcatatgatactgcaaaagcaaatgatcaggaaatgccatcctgaacagaataaaacaggttagagtggcttttagtcacactttaagtatattgtagttgaaagcacacttttctagcctccagtctctgttccaacacagttgcaagtttaggtcacttactttggatagtgtattcagtttctgtatttgcacaaagataaatataatatttttccctacctttgggtttagataaccttagattgaaattcaggctctatctcactagcagtagatccttgagcaaccactacaggccctgccatggcgactgtaactgctttgctgtctgtttttgactccactctttcttactaaggtactaagcctttgtagaccttagtttttttcatccatggattagagagaacaacagctatttgaaaagattgttgtgagggttaaaagaggtagccaactcaatatcaaataagtgttggtgttaatcagggtgttactcagggttctccgaagaagcagagctgataggatgtgtgtgtgtgtgtgtgtgtgtgtgtgtgtgtatgaatgaaaatataaatataaatggatagagggagaaagaaggagagggagaaggcttgttaaatccaaaatcttcaggtaggttgtcaggctgaagactgaaggaagagttgcagttgagtccaaaggcagtgygctggcaaaatttatttttgctagacaggaggtctgtctgtgctattaaggccttcagccatttggaggaggcccacycatattttggagggtaatctgatttatttaagtccaccaatttagatgttaatctcatccaaaaacacctgtgcagaaacatccagaatagtgtttgaccaaatgttgatacaccatgtttgctatggattgaatgtttgtgtccccctgcaaattcgtacgttgaaatctaatccccagtgtgatgttatttggaggtgaggactttgggtgatgattaggtcrtaaaaatggcaccctcatgaaatgggattagtactctaaaaagaagaggccagagtaccaacgaaaaaaacccaggatcagatggattcacagctgaattctaccagaaatataaagaggagctggtaccattccttctgaaactattccaaacaatcgaaaaggagggactcctccctaactcattttatgaagccagcatcatcctgatagcaaaattgggaagagacacaacaaaaaaagaaaacatcaggctaatatccctgatgaacatcgatgtgaaaatcctcaataaaatacttgcaaaccgaatccagcagcacatcaaaaaacttatccaccgcaatcaagttggcttcatccctgggatgcaaggctggttcgacatatgcaaatcaataaacgtaatccatcacataaaaagaaccaatgacaaaactcacatgattatttcaatagatgcagaaaaggcctttgacaaaattaaacatcgcttcatgttaaaaactcttggccgggtgcggtggctcacgcctgtaatcccagcactttgggaggccgaggtgggcggatcacgagttcaggagattgagaccatcccggctaaaatggtgaaaccccgtctctactaaaaatacaaaaaattagccgggcatagtggcgggcgcctgtagtcccagctacttgggaggctgaggcaggagaatggcgtgaacccgggaggcggagcttgcagtgagccgagatcccgccactgcactccagcctgggcgacagagcgagactccgtctcaaaaaaaaaaaaaaaaaaaacaacaacaacaaaaaaaactctcaataaactaggtactgatgggacatatctcaaaatagtaagagctgtttatgacaaacccacagccaatatcatactgagtgggcgaaagctggaagcactccctttgaaaaccggtacaagacaaggatgccctctctcactactcctattcagcatrgtattggaagttctggctaggtcaatcaggcaagagaaagaaataaagcatattcaaataggaagagaggaagtcaaatagtctgtttgcagatgacatgattttatatttagaaaaccccatcctctcatccccaaaactccttgaactgataagcaacttcagcaaagtctcaggatatcaaatcaatgtgcaaaagtcacaagtattccttcacaccaaagatagacaagcagagagccaaatcatgaatgaactcgcattcacaattgctacaaagagaataaaatacccgggaatacaactaacaagggatgtgaaggacctcttcaaggagaactacaaaccattgctcaaggaaataagagaggacacaaacaaatggaagaacatttcatgctcatggataggaagaatcaatattgtgaaaatggccatactgcccaaagtaatttataattcaatgttatacccatcaagctaccattgacttttttcacagaattagaaaaaactactttaaatttcatatggaaccaaagaagagcctgcatagccaagaaaattgtaagcaaaaagaacaaagctggaagcatcatgctacctgacttcaaactatactacaaggcaacagtaagcaaaacaacatggtactggtaccaaaacaggtatatagaccaatggaacagaacagaggcctcagaaataacaccacacatctacaaccatctgatctttgataaacctgacaaaaacaagcaatggagaaaggattccctatttaatatatggtgttgggaaaactggctagtcatatgcagaaaactgaaactggaccccttccttacagcttatacaaaaattaactcaagatggattaacgatttaaacgtaagacctaaaaccataaaaaccctggaagaaaacctaggcaatacattcaggacataggcatgggcaaagacttcatgactaaaacaccaaaagcartggcaacaaaagccaaaattcacaaatgggatctaattgaaccaaagagcttagagcttctgcacagcaaaagaaactatcatcggagtgaacaggcaccctatagaattggagaaaatttttgcaatctgtcaatctgacaaaaggctaatatccagaatctacaaagaacttaaacaaatttacaagaaaaaaacaactccatcaaaaagtgggcaaaggatatgaacggacacttctcaaaagaagacatttatgcggccaaaaatcatgaaaaaaaactcatcatcactggtcattagagaaatgcaaatcaaaaccgcaatgaaataccatctgacaccacttagaatggcgatcattaaaaaaatcaggaaacaacagatgctggtgaggctgtagagaaataggaatgcttttacattgttggtgggagtgtaaattagttcaaccattgtggaagacagtgtggcgattcctcaaggatctagaaccagaaacaccatttgaccccacaataccattactggttatatacccaaagaattatagatcattctactataaagacacatgcacacgtatgtttactgcggcactattcacaatagcaaagacatggaaccaacccaaatgcccatcaatgatagactgactggatgaaggaaatgtggcacatatacaccatagaatgctatgcagccattaaaaagaatgagttaatgtcctttgcagggacatcgataagctggaaaccatcatcctcagcaaactgacataggaacagaaaactaaacaccacatgttctcactcataagtgggaattgaacaatgagaacacatggacacggggaggggaacatcacacaccagggcctgtcgtggggtggaggaaaggagagggagagcattcggataaatacctaatgcatgcagggcttaaaacctagatgacagtctataggtgcagcaaaccaccatggcacatgtatacctatgtaacaaacctcacattctgcacatgtatcccagaacttaaagtaaaataaaaaataaaaaaataaaagaggcctaagaaagctgcctttccctttccctcatgtgaggatgcagcgagaatgtgctgtctatgtggaatgtgtccttatcaggctcagaatctgctggcagcttgaccttgaacttcctggcctacaaaactatgagaaatcaatttctgttgttcataagctacctagtctatggtatttttgtcatagcaaactgaatggactatgacaccacccatatgaatctcctcaaatcatacttaatctttgaataaaggcaataacaagatccatacttccacctaacacaataaactatcttgcatacaaccaaaaatgcaccaaccctatcctcaaaagaagatgccaaatccttgggtgatgtttactctcgtcgatattccttaacttaaacactatgatgtaatgttagcagtacttaaatactatgatgcagagtsagtatatcttatgttatcagataaggtgataagagaaggaagaaaatgatattttctgaaatttgcatatggattgttgcttttatatgtatacacacatattaatagcaaaacaaggaagaaatacttatggcaattacagtcttctttttctttaattgatcacatggtcatagctggtgtttataactacctttttccatgacccaatccatatcccctttgccctcagcaagtatctcagctgattgtggttctttacctggtgagggtgactcaaaccttcartcctcaatggtctgggccactagtaatcctgcttgaattggattgttgttttcattagctttaatcacagggcatggtaatactaagagctaccctaaggggtctcctgtatttcagacatactctttcccgcctccactgtagtgtaacagtttagtttcctcttggtagtcaggatcaatttttcccagtcagcacagtaactcctttcttggcctgttaattcagaggcatgtggtgctcaaagtggtcaggtggcagtcttaatttcctgttcaatgggtttattattgtgtttcttgatggaaacattcttccgtttggaatgaagacctctagaccagcagagcataaagtcacaggggtagaaaggagaaattttgctagtgtgacactagggttgttagtgagaggtgccatttccatttccacccyttgattcctagacstatgaatcctggctatgagaaaaacagcaccatttttttggacactgattgagagcacatacagcctcctggagaaccttgcctcagctttgcaaggtattggcactttgctggtaactgagtcttcaaaagtacattccactgttctgtcaagccagttgcttcagattgttgggaaacattgtaaaactagtgagtttcatgagcatgtgctcattccccacacttcgtttgctctaaagtgagttccttgatcagaagcaatgctgtgtggaataccatgagggtaggtaaggcattttgtaagtccatgaatagtagctttggcaggagcattgcatgcagggaaagcatatctagatccaaactaagggtctatgccagaaaaaaaagttgtccttcccataatggaagctgttgagtgtaatgaacttgccaccaggtagctagctggctaattaccctggagaatggtgccacatcagggaatcagtgttagtctctgctgcagattgaacactcagaagtggctataatagccaggttggccttggtgagtgaaagtccatattgctgagcctatgcataacctctatccctgccaccatggccactttgttcatgagcccagtggatgtgatggggtggctgggcaaaaaggctgactcagtttgtccgacgtgtatacagttgcttctttttaaactccttcgcaaccttctctttcatttgttccataacatcttcctttagctgcttgtgtccttactttatattcttttcctgggccattttatcagctacctgctaagagctggtgaccttcatatatttgctacagactgttcctcgatatatattgaacatcaattcagtgtcaggtactcttttagatattggggttatagacaatgatctctgacctcatgaaatttacataaattattaaaaattattattattttgagaaagggtctcactctattgcccaggctgcagtgcactgacgtgaccatagctcactgtagtctcaacatcctgggctcaaacagttctcctgcctcacccttccaagtagctaggactacaggcatgctccaccatgcctggcttatttttaaatacaaattattaaattttgtaaatagtaatacaaattggtaaattataaaatatgctagaaaatggctagtgtcttgggatgggggaaataaaggtagagcagggtaaagaggagctgagaatgctgaggggagttatggccagtttgcattgttgagttgggtgatragggtaatctccattgagaaggtgagttttgagcaaataatcaaaggtggtggagcagttagccatgaagaaatctgaggaacagcgttttgtagctggcatgttcaagaatcagcagggagacttgtgtctagagcagaatgagttagggaaagaatggtaaattgggaaaggaagttagcgaggtaatgggcggttgattaggtatggctttgtagcctattaaagacttctgctatactatgaatggaaagggtagcctcttgaggtttttgaccagaagagccacatgatctaagctataatttcagaaagactggctgcaatgttgagaatagaatgtaggctgggatggcttttaggagaccattagaataatccagtcaagagatgatggtgatttagatctagggtggtagcaataaaggtggtcagattttggatatattttgaaagtaaagccaacacaatttattcatgtatttcacatgagtgttagaaagctttcagagaagaggagtatgttagtctgttcttgcattgctataaagaaatacctgaggctgggtaatttataaagaaaggagatttaaatggctcatggttcagcaggttgtacaaacatggcaccaattatctgctgccttggtgagggcctcaggaagcttacaatcatggtggaaacaggagcaagataggaaggaagtgccaaccaaatctcacatcaactcagagcaagaactcatcacaaagggattggtgctaagccattcatgagggatcctcccccatgatccaaatacccaccaggacccaactccagcactggggattacatttcaacatgagatttggaagggacaaacacccaaaccatatcaaggagaaaacagcaaggaaacagaaaaggaatgaccagagagataggaggaaaaccatgagaatatgatagattggaagtcaatgaaagaaagtgtattgagccctgaggaatatctcctgtgtcaaatattctgataggtaagatgaggtctgagaatggaccattgatttagcaatgctaatttccacattgccaaattaattttatcatgtctaaagttaaactctttgtcttccacatgtttattttctgggttatgtctatctaattgcccaaacattggaatccatgcatctcttactcagaattctgtgcattttcaactattctagggaatgaaaatcaattcaaaatggctggtaagattgttgagtagttttgcaagattcttttaagttgaactgagcagtttacgttttattctataaactattgaaggttacagatatcatgaagaggtttatatttacaaagataactctgggtcagaaatgcttctagaaagaaaaaggccataagatacagatacaaagaaaagtttcttgaacttccctaccttagttatttttaggatgagtgttacattctcttacttatttcctgtatgtcatttcccttggttattcaatactgcaagtcaaaggatgaaatctttctattaacttagttaatactaaatctatagttrtattttcatctcttttaaaatagggataaagtctcttcaagtattaaataaaactgtgctatttcagcartgattttaatgtttgcatgatattagttaagtttatggttctttattctttgcaatatttaagagtatttcttgtctgggtgcggtggctcatgcctgtaatcccagcactttgggaggccaaggcaggcagagcacttgaggtcaggagttcaagaccagcctggcccacatggtgaaactgtctctactaaaaatacaaaaaaaattagccgggcttgttggtgcacgcctgtagtcccagctacttgggaggctgaggcaggagaaaacgcttgaacccaggagacagaggttgcagtgagccaagatcatgccactgcactccagcctgggcgacagagcgagactctgtctcaaaataaataaataaataaataaaataaaaaataagccgggtgtggtggcatgccctcgtaatcctagctactcaggagatggggtttcaccatgttggccaggctggtcttgaactcctgacctcgtgatccacccgcctctgcctcccaaagtgctgggattacaggcgtgagccaccatgcccggccacttttgtatttttagtagagacggagtttcaccatgttggccaggctggtcttgaactcctgatcttgtgatccgcccacctcagcctcccaaggtgctgggattacaggcatgaaccactgtgcccggccaagactctgtcgtaaagaaaaagaaaagaatatttcttaagtcttttttaatcagatgttttctatgtaacctaaatgtactttatacttggttgaaaatatttaattagatttctaagtagctatttcatgactttatgggatgtagatctaattatgtccaatttttacaggtatcttctcttaatggatctccaagatagaaatgaaaaactcttttatagagtgctgacatctgacattgagaaattcatgcctattgtttatactcccactgtgggtctggcttgccaacaatatagtttggtgtttcggaagccaaggtatgtcaacttttattttawatgcaacttgtgtctttatttatttttgtaagttttttaacgaatttaaaatttattattattattttaaatttgacaataaaattgcatatatttatgatgtacagaggatgttctgaaacatgtatacattgtgaaatggtagaatcaagctaattagcatatgcrttatttcamattcatatcatttatttgtggtgagtatgctaaaatctacttttagcagttttcacgtatataataaattatccttagcaatagtcactatgtggtacaatagatgtcttgaactcattcctcctgtttaactgaaattttgtatccttttaaccagcatttccctaatcccgcaacccgctccccctacctttctcctatcctctggtaactaccgttcttctctttgctactatgagtttgactatttttaggttccacatgtaagatcatgtggtatttgtctttctgtgtctggcttatttcacttaacgtaatatcctaaaggttcatctgtattgttgcaaatgacagaatttctttcttctttaaggctgagtggtatcctagtgtgtatgtgtaccacattttctttatccattcatctgttaatggactcttaccttgatcccatatcttggccattgtgaataatgctgtagtgaacatgggagtgagtgcagatatctcctagacatactgatttcatttcctttggatatgtacccagtagtgttattactagatcatttggtagttctattcttaattttttgagaagcttccatactgttttccataatagatttactagtttacattcccactgaacartgaataagagtttcctttcctcaggttcctcgccaatacttattgttcatctttttggtatagccgttctaacaagtgtgaggtgatatctcactgtgcttttaatttcratttctgtgatgattagtgatgttgagcaatttttcataaacctgtaggtcatttatatgtcctcttttgagaactgtgtattctggtattttgctcattttaagaacaggttatttgttttcttgttactgagttatttgagttccttatatattttgaattaatcccttatgagatgtatggttcacagatattctctcctattccataggttgtctcttcactctgttgactgactgctgtgctgagctttttagtttattataattccatttgtctatttttgcttttgcctatgccactggggtcatatctaaaaacatcattgcccaaactactatcrtgaggcttttcccctaaattttcttgtagaagttttatagtttcaagtcttacatttttctttacctattgagttgattttttttaatatggtgtgaaataagggtctaatttcattcttctggcatttggaaaaccagttttcccgtcaccatttaatgaagagactgttctttctccatttcacttttgtaaaaaatcagttgactgcaaatgcatggatttatttctgggctgtctattctgtttcattctgggctgtctattctctttctttggtctctgtgtttgtttttatactggtaccatgccgttgtgattaccataacttaacagtatattttgaaatcaggtagtatgatacctctagctttgttctttttgcctaagattgctttggacatttggggccttttgtggttcatatgaattttttaatctttatttttatatttctgtgaaaaaatgtcattggaactctgatagggattgtactgaatctgtagatctctttgggtagtgtggtcattttaacaatattaattcttccaatccatgaaatggaacatctttccatttatttgtgtcttaaatttttttcatcaatgttttgtagttttccacatacagatatttcacctctttggttaaatttattcctaagtattttgttgttttggtggctatcattattattattattgttttgagacaatcttactttgtctggagtgtagtggcatgatcttggcacactgcaacctttgcctcctgggttcaagtgattctcatggctcagcctcctgagtagctgggattacaggtgcgcaccaccatacctggctaatttttgtatttttggtagagatggggtttcaccacattggctaggctggtctcaaactgttggcctcawgtgatccacccgcctcagcctcccaaaatgcctcccaaagtacaggcatgagccaccacacccaccctttgtagctattattaatgggattgcttttttgatatttttggatagtttatagttagtgtattagaaacactgctgacttttatatgttgattttgtatcatggaactttcctgaatttattagttgtaacagttttttgttggagtttatagggttttctatgtatatgatgatattgtctgcaaacagagaccatttaacttcttcctttctaatatggatgcctttttttttttcttttgcttgcctaattgttttggctaggacttccagtctctagatttctctctagatttaagatttggccaggcacagtggctcatacctgtaatcccagcactttgggaggctgaggcgggcagatcacgaggtcaagaggttgagaccatcctgaccaacatggtgaaaccccatctctactaaaaatacaaaaattagctgggcatggtggcatgtgcctgtagtcccagctactcaggaggctgaggaaggagaatcgcttgaatctgggaagtggaggttgcagtgagccgagatcacgccactgcactctagcctggtaacagagcgagactctgtctcaaaaaaaaaaaaaagaaaagatttaagataatagaaagtatttccaaatcaatttgggttcccttttacagatagtaaattaatttcctttttgttttgaaagagattggctgggcatggtagctcacacctgtaattccaggactttgggaggctgaggcaggcagatcacctgaggtcaggagtacgagaccagcctggccaacatggtgaaaccctatctctactaaaaatacaaaaattgctgagcgtggtggtagttgcctgtaatcccagctactagggaggctgaggtaggagaattgctggaatccaggaggcagaagcttcagtgagctgagattgctactgcactccagcctgggtgacagagtgagattccatctcaaaaaaaaaaaccaaaaaaacaaaaaagtaatactgatcataattaagcttgcctttgatatgttaattaccactattacatgtatatttttacaagttaaaacaaagattccaaatttttctgaaatgagaatattactttctaaattgagtcaaaattaaatgatcttaaagtagctcttttgttctttcccttaaatgaaatagtagtcacctttgagatgcataaaatatagaacacaatttttctagcactacttattcattatattagtttcaatactttttgaaagaagaaacaatcgaaataaatacatattaatacttttaacaacagcaataacaaaagttcaagttgcatatgtctttctacttttggctctgaatttaaagataaaaaagaaatgtttaaagtatctaccacaaacacaaaagcctactgaaagtactgtccttaaaaggaatatttcagaggtattatcggaaagcaatattgaatgtggatttccatgtagctgtattgatatagtggtaatatttatcatactgcgctgcattaccctttgtataaagaaaagagttggccgcatcatccctttgtataaagagaataattagataagtaactatagttgatctaaactacattaaaatttttttattgatacatattagatatacatattttggggatatgtgtgataatttaatacattcatataatttgtaaagatcaaatcagtgtaattgagatatctatcaccttaaatatttatcttttctttatgctagaaacattcggattatcttcttctagctgttctgaaatatacaataggtcttatttgttccatcaaacttcatactaaactacattaatagcacatatccatgttacatttatgtaatagttacattaacaatgactaawttttttttcattgaagaaaaggagttagaatttactgttaattgtattgcaaagtaattgttttctgggtatataagaatattattttaactatacaaataattatatattcattattgaaaaaataataaatattcagaaggaagaaacttaaaaatgcctaatgtcatcgtaccaaaaaacgccaacagacacaatacatactattttccttgtagatgaaggaatcatactacataaactatttcttgccttactaaaggcaagaaacctacagtattttccttatagatgaagggtcatactgtatgaactatttcttgccttactgtcttctctgggtaatgtattataaacatctgtgcatgtccaaaaaatatatttctatataaagaatcttaatacaagcataataaaaagctgttttaaattcaaggatgtttattgaaattttgtttctgagagatactaagtactaacaatgataaatgtagaagggcttgaatcaaacgaagtatttgagttgaagtcgatagaaatctcaatagcaacaagtttttttttttttggcaagcacaggggattttattgatggtacatgaaaaggtggggctccctcggctcctcccttttagggggtctgcatggaaactatgaggaggggagattctcagtgtggtgggagactgagtgtggcagggactctccagcagtgagggccgctctcttcccgtcgtgctgtcgctggggctggtggtctgggggtcttactccttggaagccacactgtgggcagaggtccaccaccctgttgctgcagccaaattcattgtcataccaggaaatgagcttgacaaagtggtcgttgagggcaatgccagccccagcatcgaaggtggaagagtgggtgtctgttgaagttggaggagaccacctggtgctcagagtagcccaggatgcctttgagggggtcctctgacgcctgcttcaccaccttcttggtgtcatcatatttgktaggkttttccagacggcaggtcaggtccaccactgacatgttggcagtggggacacggaaggccatgccagtgagcttcccgtttagctcagggatgaccttcctcacagccttggcagcaccagtagaggcagagaggatgttctggagagccccatggccgtcaccccacagtttcccataggagccatccatagtcttctgggtggcagcgatggtcatgagtccttccacggtaccaaagttgtcatggatgaccttggccaggggcgttaagcagctggtggtgcaggaggcattgctgataatcttgagctgttgtcatatktctcatggttcacacccatcacgaacatgggggcatcagcagagggtgcagagatgatgaccgttttggctcctccctccaagtgagccccagccttctccatggtggtgaagatgctggtgaactccatgatgtactcagtgccagcattgccccatttgattttggtgagatcttgcccctggaaaatagtgatgagatttccattgataacaagcttcccgttctcagccttgacggtgccgtggaatttgccatgggcggaattatactggaacatgtagacagtgttgttgaggtcaatgaaggggtcattgatggcgacaatatcgacttaaccagagtttaaagcagccctggtgaccaggcagccaatacaaccaaatctgttgactccagccttcaccttcaccatggtgtctcagggatgcagctggcaatgcacgagaagatgcagctgttgttctcagccttgacggtgccatggaatttgccatgggcagaattatactggaacatgtagacagtgttgttgaggtcaatgaaggggtcattgatggcgacaatatcgacttaaccagagtttaaagcagccctggtgaccaggcagccaatacaaccaaatctgttgactccagccttcaccttcaccatggtgtctcagggatgcagctggcaatgcacgagaagatgcagctgtctgttgaatgggaggagcagagagctgcaacaattattttttgagagcttttactatattagatggttttctcaggcttaggacactttggtgtgcatatattccaaaagaagaagagacaaacatataaaataaataaattgtctagaatgtttgaaggtgataagtgttatggagaaagagaacaggaaaagggggatcaggagtgtcagttgctttgcaggaggcagttgtaattttaaacagagtggacactgtgggtctcattggaagatgatattggaggagttggggaggaagtcatgtagatatgagtggaaacatgccagacagaaggaacagccaatgccaaggccctcagtgggaacatgcctggagaccagaagcaggatggagaccactgtgtctggagtggagtgagagagagggagagtaggggatgagttcacagaggtgggtcaatgagtgggtatatgtcttagggcttcctgtaggctgtttggaagaacattggcttttactsttagctaaatgaaaagccctaaatggtcttacgcagttacatgacatgatctagtatttttaaaaagagcattctggttgctgtgttgagaatagactaaagcaaaagaagaatcagggacccttgttaggagactattaaaataaacccagtgagagatgatagtggttcagattaggagggtaataatggagttaggggtaagttttaaaatccagattctggataaaaatgaagacagccacaaagaccttctgctggactgaaagcttcctagagtagtgattgaaagtatgggctctggagtaggtagcctatttttacttactggttttgccacttgttgtagtctggtataaggtatttaacttttctgtgcttcggtttcctcatctgtaaattgggagtaatactacagcctgccgcatcttatccatacttttgaattccaaaactttgaaaatcaagactgtaaaaaaatctcatttgggacaaaacctgatcttatctgaaatcattggcagcagtaccaaagactatatatagtcttataagtccagcagtaaactggatttataagactataatagtctatttatttcacttactgtcatttgtttttctgtagaagtactaatgtatttgattatgggaactttcttagaaataaatatgtttacatatatataaacttatataagtatgtgtttttatgtatgtatatatgtatatatatagagagagatgggtggctggggagggggagaggaagaaatggggaagagggtagaggtaggaaagcatttgtggcaaaatgcttacaaatgttgaatctaggtggaggtatttgttgtattattctttcaacttttctgtaatatttgaaatttaagtaaggaatgctttactgctagagaaagcaaagtttctaaatccatttctgtatgatctcttcatgacagttttctgtcatattgcaatttagtgtgtatattttcttgaacttttgatgattttgaagttttccagtaaaataattatggcttctcctataattataaaaaaatcctgtttgaaattgtgttatgtggcttaaatttaggtgttgtatttaattagaaagggaattgtggatgcgtgaatgatgtgaatgatggatcttccattagcatatagatgaattttatttttaagccaaaatggaaaagtgtctagtaaaccttatctactacaacagcaggtattttaagacattcagaaagtgaagaggagaattataccccttattctattaatacttactgtgtatggttttggtggtagcacttaggaacatagtgaaaattaagggttaaaagtacttcaagtactgagcttaacatagttacaaacaaatatatcttttgatcatacttttaagtatgtatcttaatgctgtgatacttttctgtggctagatttttttattttgaatatggcattaaaatctggctaggtatcccaaaataaattcttgtatgaataaccgtatttctaatttttttctaaatgactgctgggatactcctttattggttttgtgtggaatttcttttctttttggcatagatactttatgtgggtttttcagatgtcatagataatcatttttaagaatatttttgggctcgcttggattgtcttattcccatgtgccgaaatcattttaattcttgcagaatttccagtatttggtagtgcaatctgcttatgtcagtgtgcctaattgtggttagtttgtacatagaggtgtgatttttggaagctagagacaatttttttttttatttttgcagactgctgagcttcctgtgttacttaagttacctgtattttgtgaaacttttttttaaagaaaagttttctgcaaattgataatgcaggtatatgtaatggatagctgaagcagattcatataacttctttggaaatatttctacctactgtatttttacactgcattttctaagatttatctccctctcttttgagttctgattagctacatattattataccatgtatttggcaattattcatgttcctacttttgatatttctaatgttctatcaaaatatgcttgatctgtttttttggtattttaccattcattttgtctcaactatattgtaagtaaaattctagagaaaagggatcatattttataaattattcttgtatttctcatgctatttagatttaatgcctggttggtgttcaattagtatatgttgtttgctatctcagagaaattgtaacttagaattactttattcattcactcacacagaaaaaatataaagtattcatataatctttatttctcctactgtttaagtgtattatgctaacaggcaaattctcataaataatagatattaaagaaattggacacactaaggaatcagactgtgaggacatgaaatattattattattattttacttttgagacagagtctcactctgtcacccaggctagagtgtagtggcataatctctgctcactgcaacctctgtctcccggattcaagtgattctcctgcctcagcctcccaagtagctaggattacaggcatgcaccaccatgcccagctatttttttgtatttttttagtagagctggggtttcaccatgttgcccaggctggtctcaaacttctgggctcaagagatccatccatcttggcctcccaaagtgctgggattaccaccgcatctggcctcattcactcatccttatacagggcaccactgatttgattttggcaaacagaatgagctaatacaacagtttgctggtgatagtctttttaaaagaagcattttccaaagtttgattagatagtacttttggttcaccaaaaagttatgatgaaaaaagtattcagtgctcgaattaactggagaaaaacagaattaaatgaaatcaaaaaagattctttacagccaagtttcttagaataataacctattttgtgagtcttttgaatggtgagaattagatttaataaagtagtatacatagcctaattcttggcacaaagtagatattctcaaatggtggttattgttactggtataattttaactctcaggtttcttgatcaaatagattgtggtatcatgtaccaaatttcagaatattggaatatttgagagagatagaaagttcatttggggggccagatgtggtggtgcatgcctgtaatcccagtactttggggggccaaggcagacggatcagtttagtttaagagttcaagaccagcctgggcaacatggtgaaaccccgtctttacagaaaatacaaaaatcaactggtgtggtggtgcgtgctatagtcccacctactcagggggctgaggtgggaggattgcttgagcctgggatgttgaggatgcagtgagctgtaattacaccactgcagtctttctagcctgtgggacagagtgagatcctgtccaaaaaaaaaaaaaaaaaaaaaggaaggaaggaaggaaagaaggaagaaaggaaagaaaaagaaaagaaagtttatttttgggacatgctaaattttaaatgtgtttcggacttccaagtagaagggtctaatagtcaattaaatatatggatctggaacttggtagatgatgtagttaaaatgtcctaacattttaacttgcatattaatattatatgtgctgcacgaatggtatctgttttgattttggcaatgtcacagattatcaacaaaagtaattgttaaaaagaattagtcaataagttgttccattatgttgctttatgtcttcctagaaaattctttgaaaaatgcataaaaggaaatattaaaatcagccaaaacaaaatattaaaatatttttcctacatttaataatgcatttttatacttatttcctttagaatcccaaaaggatttgaagtagagtattcattatttaaattgtggggactaagctttctttattacttaatatgtaatttcatgtgaggaagtatgtctagtatgccatcatgaccacgattagaaatggagatgtatacaaacatgagggtctaaataatgtttacttatatggaaacatatagtttctgcagatgtatagcccatagtgttgtcttatatgatgagggtgtcagttttaattgatgtttaatttgtgaaatagcagcaagaaaagaagcttaaaaagaataaatgtaaaaagaaaccttcccaaagctaatactcctttaaccaaaaatgttctcgttgtatagtacagattataattatactatcaaaggagaggttaatataatgaaactttcatattgttcttgctttataaattttctctagttttaaatctacctggcttttttcatgtatctattttaattatatactgtatggtatggtaattttgcttgattaagctataagtacttcaataactcagtgattgtaaaatgagcctaagttgtttatggaaaagaaacatggtttcacagccagttttaataactgcaaattaaatttttaatgcttgaaataagactgtggcactgtcttagtcaatttgggctgctatgataaactaccataaactgggtactttatcagtgacagaaattcatttctcacagttctggggaggctgggaagtctgagagcagggtgtcagcgtggttgctttccagtaaggaccctcttctgggttgtagactgccagcttcctgttatttcctcacgttgcagaaagcagagagctctctggggtcccttttataaagggcactaatcatatggcctaaatcacctcccaaaggccccatctcctaataccatcatattgggggtcaggatttcaaaatacatgaattttgggggacacattcagtctgttgcaggaactttcaatagtttaatgctattctacttgttatttgacaattataatgtaaactgtcagttgattcagtgcccagaggttagtagacatgccttgctgtcctaggtcctctcactctgagatgtgtggagctagccttttttcatggaccagaatgggagtttctgggaaggggtgagaggcagtcctaaacctttaggtagtcctggatactagagctgcccaggtgaaccagaactatttttaattggatttgccttttttaaattaaactactttagaatccttaggaatatctaggaaacttttgaaaaccagggaatatttttggcttatagttctggtttagcatgtgacttttattttttattttgttataattgtctgtatttctagaaattctcttaaacatcaaatagttgatgtttaagagggcaactagcttttaatgcttccagaaaagtgatcattttaatgttaaatattaaaaacattttcactatttatctatggtaataagcctttgattttgatttatacttattctgtaatattatttggtccatttatttcatttcccttgaaactggcttacccctactttaaggtatgagaaaaagaaatacatggtgtaatttttttcaaagatatgaaacaagtcagatggaatgtctggactaattcaagtcttaactgttacctcagttgattttgtagttaaagataattatttattaaaagtggatttttatttattatagagatatagatgatgatttcttaaattatgaatttaaactaattattttttccaagcagaataaaagttatttttatgaaaatgtatatatgacttgtgctaaataggagtgaggtagagtattctatatcttaagtactggaaattcagtgagtgcccagaagtagtttaaaataccaaactgtcttctttcctaagcattgccttaatgaggaaaaatttggagaatggaaaaaatgtagacatgtttctaacatcagttctttacatcaagatctaagggttgtctaaatttgtgcgtagacrtataaatcttcaaggcagtgaaacttatcttttactgtaaaatgccattaaaaatataaagtaacagttcatcggctctccatattcatctagagattttaaatgtggaaaacttgaatggaaatttagtttaggatccaaaaataacttttgtacaatctgtgtggtacgttcaggtgttttgacttaagtttacacatagcatatggagaattaagaaaaattgccaagttttatctcaggtggtatttatggcagtctattaatttgggcattatttcctcatctttaaraagagtatttgtttttaaggaagattataaatctcactgttctttactaaaaataaagaatttttaaaaaggaggcatagttcttatatcactttgcatcctctacccaaatcacatctcgaatattgtatttagttttgcataccatggttttgaagtgtcattgatatccagagaaagtgacaataacagtgacagttactgaaaacttgtcatgtgagaaacagttggtggaaataggaatgtttagcttaaaaggaaagacttgatagttaagccttcaattatttgaaagatgttcatatagaagaaagtgtatgcttgcatggcatagcctcagaatgtagaacttaatcactagatgaggtgtaaagccacatacccacaaccaggtcatctttgacaaagtcaacaataacaaacaatggagaaaggactccctattcaataaatggtgctaggataactggctagcaacatgtagaatattgaaacagaatcccttcctttcacaattaactcaagatagattaaaggcttaaatgtaaaacctaaaactataaaacactagaagaaaacttaagaaataccattctggacattggccttggcaaataatttatgactaagttcccaaaagcaactgcaacaaaaacgaaaaaaggaccctaattaaagagcttctgcacagcaaaagaaactattaaaagaataaacagacaacctacagattgggagaaaatattcacaaactatgcatctgacaaagctctaatatccagaatctattaatataaggaacttaaatttacaagcaaaaaccaaacaatcccattaaaaagtgggcaaaaaacagacacttctcaaaagaagacatgaaaaactgttcaacatcagtaatcatcagagaagtgcaaatcaaaaccacagtgagataccatctcacaccagtcacaatgactattattaaaaagttaaaaaaaatcagatgttggtgaggttacaaagaaaagaaatgctcgtacactgctggtgggaatgtaaattattttagccactgtagaaagcagtttggagatttctcaaataactgaaaactgaactaccattcaacccagcaatcccattattgggtatatacccaaaggaaaataaaccattcgaccaaaaagacacatgcactggtatgttcgttgtagcatwattcacaatagcaaagacatggaatcaacctagatgcccaccagcagtggattggataaagaaaatgtggtgcgtatacacatagaatactacacagccataaaaagaatgaaatcatgtactttgcagcaacatgggtgcagcaaattgtcaattttaactcaatactatatgttttattgtatattttgtaataatattttatctttgctatggtaaaatttataaaatagttgatagaaggattccaaattaaatgttatctacttaaatccttaaggatatcaaattttatttttttctaagcaaagaagtttctcatttaacagtataaaccctgatcttaatatgattggtggctgaattaatggcatttataataatttggagaatatcatattttacaaaaatagtgctgccttgtgaaataaaacattttcactatgaaatgaggtaatttattttaaaagctgaaaatgtgcaagtatattatttccctctttaaataagttcatttttattgtcaacgtgccaaataaatgccatctgcctgatgagatcagtgttaccttaggattctttccagtgctttttaccatgaaaagtactttggagtttatcagaacaacagtctatttatacttaattaattgggtgyttgtactagttttaaagtgaataaatgaagaagaggttatataaaattattttctgtacattttgagtccacatttatttggaaacaatagttgagctgtgatatgtagagattgagtcagtaacatttgctatttgttgatttttaaaacctgctcattttrtaatgtaaaacaatcattcagaggaaagtatcaccagatagtaagtgccagagttggggcttgaacttgttttcttcctcctaatactttgcattagtaagagtcctccagagaaaaaaaaccaatagtatatatgtgtgtgtgtatgtatgtatgtatatgtgtgtatatgtatgtgtgtatacattttaaggagttgtcccatgaggctcgcaagtctaaaatctgcagtttgagtctgaagacagtctgctggcagaatttcctctttttcgggggaggtcagtcttttttaataagatttcagctgactggatgaggcccatacacattgtggaaggtaatctgttttattcagaatctactgatttaaatattagtatcatctaaaaactaccttcatggaaacatttagaatgtttgaccaaacatctgggtactatgcctagctaggttgacacatgaaartagccaatacatattcctagaccaatcttgartcttcttatcttagattgattatgttttccaactctactctgagttgctcagagaagcagcactcttatcatgtagctccttggacctttccctattgattaatatgtgttctgattttcaaaaggtaaaatgatgtattatgtttgttaattaagattattttctcaaatactggagtgtttacttgtgaagagtttcatatattgcttttcagaggagcttaattctagcagatatttcttaggaatattgctctactatggtttcacttttaaaagttcctaatactgactggattaattatagtaatttaacatttaaacctaattttagaaattgtcagataatattattgaccattcaattcttccggaagattcttgctttttcttcccaaccttgccatttctttacagtcttttaaattattgactatgcttattatttcccttctccttccttcctttaccagaaatttattgagcgtccactgcatgccaggcactttaccaagcattgagaataggtaaataaagacttaatttctgcatttgtggaatttacaggtaatattcaagtgaacaaagaaatacatgagtactgtttgtgttatgaaggaaatgaacagaggacaatgataaacaataacaggggatttcctttcacagtatagttagggaagtgcctgtaaggagatagtttaggctgccgcttgaaggataaggaagcagcttgtgaaaatcagggaaaaaaaaaaggaaaaaataaaaacctttgagcctgaggggatagcttgttcaaaagatctgggactggggaggtggcatgagatgaagtttgaggtagacagcagtctcatgcagggtgtgtgggtcatgatagagtttcattataaagcttaatccatttaaaaagccattgaatattcaaagtagacagcatctaactaaagttttaaaagattactctggctgccatgtggataaaatattagaaatgagagctagaatggaatggaaagggcactaagaagacttgcagtattggatccctttccaattcttaattgctttgaatgcacttgatcctcttaagatatggagcaaggaaatcaagaaaagctgtaagctaacagagttgccaatagcagcaaccagttcacatgggaataattccacagtcttgtagtcctgtactgatggctataggtaggtgaggtgatagggatatggacacacagcatgtaggtatatacacagactctaaatacatcagctggagataagaaggtctcctgtacataagactttctcaagcttgcagtaagctgagattgcaccactgcactccagcctgggcaacagagcgagactccgtctcaaaaaaaaaaaaaaagaatttcttaagcttgcaggcttaatatagttcattttatttatagcccaagtcaatcacctcactatcttgtcctttactcactgtacaaatccatcctgaaccaatcctttcttgccctcccagaagagccaattagatcatgttctatgaagccagtaagtattgttcatttcatttctgtgcacctattttttaattaaaatattattaatgtgggggtggagtgctataattctgcctgcacagttcaatttcggctgggccttctgctcctcagtgtttcattccagctgtgtttttggctcatctcactcttgcagttacaagaatgtaaacactctgcagccttatcctccttatctcagatatttctctccatgttccccatgaattcattggttcagctttttatttccatgaactawatctaatacatttcctttcttcaattatttccttcttaatctgttcagctaactgcagtgatccattccacccactaaaatgttggttcttgccaaggttttattctgggttctattttctttttattctatatattctcttagtcacatgtaattggagaatttccaagtcaatatttgtagcctagatttcttttcctaagattattactcgtattttcaactactaagtagctcatcttaatatggcaaacaactacttccacttacccactccccagcctaacatcccaggctcccaggttttctaacattgtaagrtgcaacatcattcattcagttactaaagcaaacacctcagagataatcaggattttttccccttcctttccctttttgagcattagaaattgtatcccttaattatctattgagtctcttttgtcctttcaatccccattgccacttttttttagctaggttcttcttgtttctttcctggactactactgcatatttacccttgaagactgtcaaaagggagtggattttcaaaaagatatatctaattatgtcattctcctgactaaaataactgaatggctccccatttcccccatgataaaattcaaactctttagcatgatattcaaggatttttgtaatttgacttctttgcctgcttctctgtcatctctttcctattcctcccactcatgtccctaccccaagttgaatgccctcgaaatcccctgggcattttcacaatctatttcatattgatggtgtagtaactgactttcttttctatctactgactgatttttttcttgagggtagcaactctgtatctttcagctatacccctgaacttagtagaattagcaatttttgttaagtgaataaatgggcaataaactatgacaaacattgccagccttgtatgtgctttggacctgaagagggttggtttgaatccctccatttcttcttactaaatgtctcatctgaactttagtttcctcttctgtaaaatgagtattgttactttgtttaagtaaaatgttccctcttaaacctttcttttgacaagaggtatatagaacttaaaaactgatttatctacaattcaaatgtacgtacagttctcaaatatcaaattctttcttataaagcagaagtttctaagtattgaaacttagtttgaaacgtgattacagaaattatcattggaacataattggtttaatgttataacatgtatttagtaatatataataatggaaaaggatggatgtcatctgactcatcaactaaaaaaataattttaagaactggatttcaaaaaaccaagcaaatgtaaattatgtattataaatatcattaatgaagatatttctaagacactaacaaatcaagattcatataaaaattactgaaaacggtgtttacaagcattcatagaatgcaaaggaagctattatgttattctgtctcacgactagtatatcatatttagtaccttaaaggaaatacaagtatttctgaagacaggtggaaagtgttaaatctaagtgataatttaaactatataaagtttctcaagaaagtcctcacccagaaaacaatctattttatattggggagttctttctttttcacatgagcagatgaggtcactaatttttctagtaagataaataagatactgatgttgtagatttctttttgcaaagattatttctttaccaaatttagcttgtgacttatcttgcagttataagacattcctaacatgtgactgttaaagtcttggagatggtagtatggtttctttattacttttcattatttctcatgcaacaaaatagagcagagtttattttaaaatgtgaaaagttacactaatgaaattcattttattagtgttgaaaataaggaagtaattagagcatttctataataaataagtaaccatcatgagcaatgccaaagaatatattgaactgttttcttcttgcttttatttggaaatgaggtacatgctagaaaacaatacaaaacaaaaacctcaagcaatcccagagggcagtcttctttagtttgtacccagagaaaaccactaatgactatggtaggaagaattccttgtggttggaaaacagatgaacaagttgctgaaagtctcatttatgtattaagccagttcagtcagtttgagagttacatgaaggatttctgttgtccaagtatctgctaactgccacattgaattggttaaaaaaaaaaaaaaaagaggaagaaagaaaaaaccttccctctcatgtcttctccaatcaatggacaaatataaatatctgaataaagaagataccttctagtttgatactttaacaatatagcaaactgtcttcggcaaagattatttctgactcattcaacctgatttacaggcatatgtaactttcattgtatctagtttttgtcagggtctatatgagaaaaaaataccaagtagagaaaattcttttatatctttcattgaaactgtggttagaaacaatgtctacaatgttgttcaatgtgctttatataaagacccatttgataaattcctctcaaaatcaaagaaatgcctttttttcttctttctctcttgctagaattgagaactaattcagtttttcctattgagctttgcctatatactattttatgctcaattatagtagttttctttagaacatctttttcctgtcttttccccacccccccattgtattaattatttttaatgaatgagtcttgcaaacacacattttagatagttgttagcccttgagttcctcctaggctcagtggagggctcgtgtcctttaaaaaaaataatctgacccactttagcagagtctcacactttcttcctcccctgggtatggggcaccttactgcagctcagagaaaacagagtaaatcttgcctgtcttctggatctctgtggttcctctcatttttctatggtttgaataayttcatgattttactgaatctgtgactttattaattattgcctcaaacctttttaaatttatttgaatccactagcaatttattttagtttawatggaaaaaaaagatcacaaactaaaaccataatttgagtctttgttttttaaaaatactttctaaacaccaatccctttgccttcccagctatgaacatagttaattagcaagatcttggggaaatctgaaggctgagatcccaaaggcttcatatacattttttttcaaataattatttaccaacctagtacctctcccttttaaattaaattattatattatatatttgggagtttaaaagtttaagttattttgattgccagtatgctgccaaatattgggttaaatttaagtatttccaaaaactatgctctcaagtctgcaattgcatgtttgagagtgactggtaatttcatcaatgccagatgattatcattcctctttctgaaaagacatttttgatagaaagttgtttttttctttcttattactaaatgtcaaagagttttgtttagcagtgtcacttaattcttagaactgtttccaagtcatgtgccaaaaaacatgtagagatatattatggaaacttatttttaattgatgtgccagttgacaactagattatattctccttcaaaattgttgaaagcaaagaattagaagccacttgaatttcaaaaggatttgttaccccatcatcataatcatcactttttaaatttctgaaaactgtctccaaaagtctttaccaagatttttcaaatggtctaatatctgttattttttcacttaaagtcatttaatctgagatacttataaagggttgggaaaattaaaatattagttttgatacatttccacagtataaactttttcagtatgaaatgtgtgtatcttacacttttgtcataaacttgaagttacagatttcattccttgatgtattggaaaatacttgccatgtaacctcattggcccaaacagtcctctttatcaaatcttacaggtgaattagacttactttctgccagaaaaattctgacttcatttttcaatcaaaatgtgttaatatttcttttttgaattttttttttttttttgtgagacagggtctggttctgtcgcctgggctggagttcagtggtgcattctcagggcactgcagcctctgcctcccatgttcaggtgattctcctgcctcagtctcccaagaagctgggattataggcgtccgccaccacacccagctaatttttttttttttttgacagagatggagtttcgccacgttggccaggttggtctcggattcctggccttgggggatcagcccgccttggcctcccaaagtgctgggattacaggtgtgagctactgcacccggcctctttttttctttttttttttttttgacagagtttcactcttgttgcccaggctggagtgcaatggcacaatcttggctcaccacaacctccagctcccaggttcaagtgattctcctgcctcagtctcctaagtagctggaatcacaggcatgcgccaccacacctagctaattttgcattttagtagagatggggtttcaccatgttgcccaggctggtcttgaactcctgacctcaggcgattcacctacctcaggctcccaaagtgttggcatgagccatcgtgctcagccctggcctctttttttaaatattataaacaccactgagaaataatttatagaacacagcttatatgattaataaaaatcataatgtcaagattaacatgatgcagatataattaaatgatttatctatttaaaaattataaaacaagataattgtttctcatttgttaatttgtaataaagcagtataatatatagcagaaactacaagttatttatgaactagagagtatgaaacacttccaagtatgatattacttggaagtacgtatgtatgcatatattaagttctggtgttgggcatttagaaataacatacacaattcaattaatgtaatccattacataaacagaaacaatgacaaaaaccacatgattatttcaatagatgcagaaaaggcctttgataaaatgcaacatctcttcctgttaaaaactctcaacaaactaagtattgatggaacatatctcaaaataataagagccatttatgacacacccacagccattatcatactgaatgcacaaaagctggaagcattccctttgaaaactggcatgagacaaggatgcccactgtaaccactcctattcaacatagtattggaagttctggccagggcaatcaggaaagagaaagaaataaaaggtattcagataagaagagaggaagtcaaactgtctctgtttgcagatgacatgatcctatatctagaaaaccccaaggtctcagcccaaaagttccttaagctggtaagcaactgcagcaaagtctcaggataccaaatcaatgtgcaaaaatcacaagcattcctatacaccaacaatagacaagcagagagccaaatcatgaattaactcccattcacaattgctacaaagaataaaatacccgggaatacagctaacaagggatgcgaaggacctcytcaaggagaactacaaaccactgctcgaggagataagagaggacacaaacaaatggaaaaacattccatcctcatggataggaagaatcaatattgtgaaaatggccatactgcccaaagtaatttatagattcaatgctattcccatcaaactaccattgacattcttcacagaattagaaaaactactttaaatttcatatggaatcaaagaagaccccatatagccaaggcaatcccaagcaaaaagaatgaagccagaggcctcatgctacctgacttcaaactatgctacaaggctatggtaacaacaacagcatagtgctagtaccaaaacagacacatagaccaatggaacagaatagagacctcagaaataagaccacacatctctaactatctgatctttgacaaacctgacaaaaacaagcaatggggaaaggaattcctatttaataaatggtgctgggaaaactgggtacccatatgcagaaaactgaaactggaccccttccttataccttacacaaaaattatctcaagatggctgaaatacttaaatgtaaaaccaaaaaccatgaaaactctagaagaaaatctaggtaataccattcaggacataggcatgtgcaaagattttatgatgaaattgccaaaagcaattgcaacattgctaaaattgacaaatgggatctacttaaactaaagagcttctgcacagcaaaagaaactgtcatcagaatgaacaggcaacctccagaatgggagaaaatttttgcaatctaccatctgacaaaggtctaatatccagaatttacaagaaacttaaatttacaagaaaaaaacaaacaaccccatcaaaaagtgggcaaaggacgtgaacagacacttctcaaaggaagacatttatgtggccaacaaacatatgaaaaaagctcaacatcactgattgttagagaaatgcaaatcaaaaccacaataagaaactacctcacacctgtcagaatggtgattattaaaaagtcaagaaacaagagatgctggtgaggctgtggagaaataggaatgcttttacattgttcgtgggaatgtaaattagttcaaccattatggaagacagtgtggtgattcctccaaggtctagaaccagaaataccatttgacccagcaatcccttttctggatatatacctaaaggaatataaatcattctattataaagatacatgcacacatatgtttattgcagcactatggtcatcaatgacccaacccaaatggtcwtcaatgatagactggataatgaaaatgtggtacatattacaccatggaatagtatgcagccataaaaacgaatgagataatggccttttcagggacatggatgaagctggaagccatcatcctcagcaaactaacacaggaacagaaaaccaaacaccgcatattctcatttataagtaggagttgaacaatgagaacacatggacacagggaggggaacaacacacaccagggcctgtggggggtgaggggaaggagatcaggacaaatagctagtgcatgcagggcttaatacctagatgacaggtcgatagatgcagcaagccaccgtggcacacatttacctatgtaacaaacctgcatgttctgtacacatgtatcccagatcctaaagtaaaataaaatttaaattaaaataaatttaacaaattaattttgttaaatataatgatcaaactttctatgtatttaatgaaagataaaaatacacattgctggctgggtgcggtggctcacgcctgtaatcccagcacttttggaggctgaggtgggcggagttcgagaccagcctggccagcaggtgaaaccccatctctactaaaaatacaaaattagctgggcttgttggcacctacctgtagtcccagctactggggaggctgaggcaggagcatcgcttaaacccgggaggtacgggttgcagtgagctgagatcgcaccactgcactccagcctgggcgatgaagtgagactcttcagaagaaaaaaaaaacaaatacatgttactaaaaatgcttggtttggtrgtctgtcaataatttggcctttggacaaagatacaggaaatatgaaacatttgataaaataaattaatatgagggttatttaacaggaataaatgctcgaatttaataaagtgttatctaatatctaactgaaggatggaacttttatttgaatgaaaataacatgaaatttttatctgcaggttttagccagtatatctgggaatatttagtagttttggaaagtattctatttatgttaaaacattcaacatcactaaacatttacttatttcagctgtttgaatatttctttctttccggtggacatagcataaccattgtgaatagctggaaatgtatgctttttgtcaaatatgtgagggaaaaagccattttcaacatatggttcttttgccttactttcatgagtgtctccctcaacagtgaagccatctcccactggtctactctacattgtctgaattcagaactaaaaataccctcattctagtgttagagtttacctgtaacaggaatatgtgaaaaaccagataaagcacacgttagcaggccttacctggtcgtgtaagttacctcaccaaatccagtaaaatcccaaaggtttttacacctcgggacaatgccaatagcaacttgagatagataatttggtgtctttcttttgtaagagagaagaaagtctagtattaaagcagctagggaatggagaatccacatgagtggatcaatcttggagaaccacactaggtcttggcagatcaaatttaggaaagagagatatgaaaggtaaatatctagaaattgattaaattaaaactgttgatgcttttgttgtcctaggaaagtctctcaaaccataccccagtcagtcttggggttccaagagtaaatgtttgaagagagaggaagtggaagctgatagttcttaagaattggttggaaactggcacagccttacttctgtcatattttatgggtcaaagcagttacagaggctgtctgaaattaaggagaagacatcgaccccacttctctacgggagaagtgtcaaaggatttgtgatcatctttaatatgcctcagctactatttgctagacactgtattaggtcattggaataaaataatgaatacaatagacataatggtttgttgcatgaagcatatgatctaacagaggagacaaacaagcaattataatattgcgtgataaacactatgataagagaatatagggtgccatggaatcatacaggaggggcccctaaaccagagagaactggaattcaggcacaacaccccaaaggaagtaccctgagaactctattctgaaccaagtcttattgatatgataatagtacagctataatttttgaaaacatatttctcactcgtgctagacttgaaggaaactagtgacagattttcagtagtagcataaatttgaatttgtgcagaggtgatctagatctgagggaaaatgggcattatttggtttatagagtagaattgaagggatcrttttcttagtacccagcagtagcaacctcccctggaaaattctttggaaaactgcctcatatcagaagaatttgcttgaactgtatttggcagtataccaagtctgtctgtatggcttatatttttctgttgatwcattttcttttctctgaaaaggaaaaacccggcaacaaggcctgtgaacaaacagcagtttttctgtttaggtttatataggcctattcctacagttttcagcatatgcatgtgagtctctgtcagttttccaaaacattagaataggaaatgagactgattgattgaatagtttgatcagttagttttgggtttagatasactaatctgcaagaatgtagacttccaatgtaaagatcagcaaagggaaagacttctggataaaggctaagtcaaggctgtaggatttactttagtagcwgtttgaaaggaacttgaaaataaaacttcaactaagaagctattgctcttcaagaatgctgttttatcagagaaacaataataaaattcttagaataaattataaatgaaattattagaaagtttatagcaacaacaatatgattaatgaaagttgtattaatgatagagattacctaaagatttgggacatgagatcttgagccagcacaggtaaatttcatgtgaacattggggcaaatcttaatggtctaagtaaagtgttatatgtttagaggtaattgaattctaccgtatcctctttttcttcattaatgttttttgtgctttatgcctttgacttcttgcataaaagcatggagtcattctggtgcacttccatcatagaatgtctctcctatttccgctcttggatcccattgcatagtcagtttatattggccctggatataactgtcattccctagacattaagtaatggaaatattttttctttgcgttgccagtaaatgctggataggatgtatatattttcatttaacagtgagaagtgcttttttcccctttacttcattgctgttatttgtaatgtttggaaagaaacctgagataccagtctaaatgtgagactaagtaattattctatttgatagaatttgctaactcaagcaggatgagtaggatggatatttggcaagcctttggtacttatgcagttgctttttatgcataggagtttatcattctatggatatttctatgtttttcaatcctcatttcaaattgtctcgttttcctctctattatgtcatattcaaacaattgtcatctgtcccattaaatatggtacctttgccaccttctttactgaaagggagtttagaaaaagcaagcaagttatcacatacgggattgaacacagtgtaagtaaagttgactgtttttcctgcaaagttaagctgtagaatttattatgccttttcctctcaccatatagtatcttgaaataattacagtacagactgagaaagacagggatttgtcagctacttcatttctttaattctaatgtcacagaaaagtatgaacatatcttcctaactttatccattttagtatgtaacggtctttacaaattttagcctgaatcacttgtatttaacctaagtttttatttttgattgagatgtagattcttaaactctttgcaataattctataaatatttaagaactattatctttttctcttcatatcttctccgctgcatccttttaaaacctttcctaaaggaacccctaaagggttgtcttttaaaacattgaatcatctttactgttctttcatgaccctttaagaattctctgtaatcagtttaaatcttattataccaaagttaatttgattggaaatatataggactttgatatagttgactgtcaagttttgaaccgagaaagaatatattccttcctctcaagttgttataaaaaaatcgttttctatggattggatttcatttatttccttccttccttccttccttccttccttccttccttccttccttccttcctctctctgtctctcttttcttttctttttctgacaaggtcactgtctgttgcccaggctggagtgcagtggcatgatcatggctcactccaatctcaacctctctgggtcttagaagatagaaggatcatttttctaccagtcatttgaaaatggaaggtgttatatccatcttagtaaggatagtatttttattatatggtgggagattttgcacttaggtaaagggagaaaataaggtcattgacttggaaaaactagagagttactttaatctgttaggccaaaaccctcttaaataaagtatattttaaaaattatggaacaaatacctcagttcacttcagtagacatttagagtgcctacagtaagttcagtgtcaggaatagaaaagaaatttccaatgaaatgtcctctttgggctaccaacagttagttaggtctttgatctcccattcatcaccctattcttcatgtaatgacccacatgacctgacacttaactgtgtgcctggaagtacaaggaagagtgggaaaaaattacaggagaaaattctttaaagcatatatatctatttttattttaaaagtcacattctgcacatgtatcccagaacttaaagtatattaataataataaagtctattttctttggaaggaggatttcttcattcaactttcctgcagttctctggttgctagcaaatattgcagagggaaatgaaaataaaatgggaaaattttctatggcaagttcaggattgggaaagacaatatcatagacccagagaatattgagtctcagcttrctgaatattctaggtccagctcttcttatctctaaattactgagtctggagaagataactgactgttctaaggattcatagccatgactaaaactcctatttttatccagtgcctttcttaataagaagccaaaaaatatgatagggtctactcagtaaattgtaatgtgttagttttgtaaatccatgttgtaaatggtgagatcaatgcatgtagttatatggcattttaatttattatatgataacatttgactcctttgaagttagtggactaaatgcaacaaaaattagaaatgtggccataaaagtgaccataaaagtaatgtaatttatagttaatatttaaatcacatgcaaaacatgtggaaatatttaataggaaactaaaaccaagcttattagtacaagcatgcctcgtttaatttttgttcatgttattgtgctttgcagataatttttttttgttttttataaattgaaggtttgtggcaatcctccattgggcaagtctatcagtgccattttccaatagcatgtgttcacttgtatctagtatctttgtgtcacattttgataattctcacaatatttcaaataattttgttattattataacttttatagtgatcttatatctgtaatcagatctttgatgttagtattgtaattattctggggtaccatgaacygctcccatataagactgcaaacttaacccataaatatgtgttttccaactgccccactgacagcagttctcatctcacttttctcgggcctattcccagacacacaacagtgttgaaattaacccagttaataaccctgcaatggcctttaagtgttcaggtgaaaggaagagtcacacatctctcagtttaaaacaaaatctggaaatgattaagcttagtgaggaaggcaagctgcaagctaggcctcttgtgccaaactgttatccaagttgtgaatgcaaaggaaaacttcttgaatgaaattaaaagtgctattccaatgaacataccaacgataagaaagtaaagcggccatattgctgatatggagaaagtttgaatggtctggatagaagatcaaaccagccacaacattccctttamgccaaagcctaatccagagcaagccctaactctcttcatttctgggaaggctgagagaagtcaggaagctgcagaagaaaatggtgaagctagtagaggttggttcatgaggtttaaggaaagaagccatctttataacataaaagtacaagatgaagaagcaagtgctaagggagaagctacagcaagttatccagatctagctaagatcattgatgaaggtggccacactaaacaacagattttcaatggagacaccgcagccttctattggaagaagatgccataggactttcatagctagagaggagaattcaatgcctggcttcatagctccaaaggacagactgattcttttgttaaggccaaatgcagctggtgactctaagttgaagccaatacctacttagcattttgaatatcctagagcccttaaaaattatgctaaatctaccttgcctataaatggaacaagagtctggatgacagcacatctgtttacagcatgatttactgttttaagcccactgttaagacatactgctcagaaaaaaaaagattattttcaaaatattacaaatattactgctcattgacaatgcaccttgtcacataagagctctgatggagatgtacaaggaggtgaatgttgttttcatgactgctaacatcatccattctgcagcctgtggattaaggagtaattttgactctcaagtcttattatataagaaatacattttgtaatactatagctgccatagacagtgattcgtttgatggatctgggcaaagtaaattgaaaaccttctggaaaggattcactagtctagatggcattgagaacttttgtgattcatgggaggagatcagaatatcaatattaacaggagtttggaagaagttgatttaatccctcataagtgactttgagggatccaagacttcggtggaagtcttttgatttctggaaactgcacccatctatgtgtgctatttagatctgaactatcaatgcaatgcattggtaatttggtcacagaagtggcaagagaggtatacagcaacaactggatagtcctcttgtattgatcgtatagctcctcagtgttcttcatcctaggatttttgccatagtgtttcacccacttttgagccagccagagccccagtctgatctgaactatctttctttcttcttacctttatcctttctgtttctccctgtttccttcttttttgaaggcaaattccttcttcacacaaaattcctgacttcaagagttggtaatctagtaggacagacatataagaaagtgaaaaataatatgataagcatcatagtagagaaagacagcagggttctatgggatttctgagggattccaaactcagattgagaatgtgggtcaggaaatatttccaagaggagctaacacttgaactgcctctggtaagcaattaggagctagcctagcagtgaaaaggagctggaggtattggacagatgcctaaatgaatccttaaaacatcactcagagttggaaaccagatagttctcaggcttagttgatcaaatgccaagaacagggtgggaaccttaatgggagatgaagccaaattatctgatgtagcmgaagctgagacaaagtggactttgaaaatgagtccaaggattggagcaaagcaaggattccctaggcggtcactgttcattagagtaaaaaagagaagagttgaacattggagcctggagaatgccagcatttaaggggtaagcagaaacaaagagactatgaagactgaggagtagccagagactgacagtgtcagggtaaactggactggaggacagagacactgacccttatttactaatactgtaatgaaggaaataactgggatacagatggaaggaagtttataggtagatagctagaagctgaatctctgtttatctttggagcaaatgaaagtgtactaatctattgagagtatagaggggtgggagtgagggacaggggaaatatgaagtagctcttgtgaagaatcgaagtatagctagtaaggaactcctggcctcaagtgatcctcccattttgccctcctaaagtgctgggcttacaggcacatgccactgcacccagccaacagtaaataattatagcttgtttttgtataccttacactagtttctctgtgttccttggagataacagcaacagtcaagctgcacccctctctgcatcatgctctttcattttctcattgaaagggctgggaaccctgcatgaaatgttgaagactggrcagggttaagaacacccacataaggccaggcacagtggctcatgcctgtaatcccagcactttgggaggccgagaaaggtggatcacctgagctcaggagttcaagaccagcctggccaacagggtgaaaccctatctctactaaaaatacaaaaaattagctgggcgtggtggcagaagcctataatcccagctamtcaggaggctgaggcaggagaattggttgaacccgggaggtggaggttgcagtgagccaacatcgtgccgctgcactccagcctgggcaacaagagcgatactttgtctcaaaaaaaagaacacccacataggttggtggcctgcctcagggtgtgaggacaagtgaggtgagaggagaatctgtgtaggagggcagtccagtgccaggtgacagagccccagtgggacgaggaggacttccaggtaggagagctacttacttcagagattggtgtctgagtgaggtgagtggggcatcaacttggggaggggaggcagttggtttcattcaggaggactgatcaaattagtattaaacataatggaagctaggtttctcactataagaaaaagtgaaaactgaagggagacaaccagaatgaaccctgttggaagtattgctgcaaatttatgtttttgatagatagatagatagatagatgacagatagatagatagatagatatgtatatacccacatattcacatacatatgcatgaagtgtatatgtacctatatatagtctctagctctgtccattgggttggcctggaagcagcaacacacctggatcagtgagcacatggaacactcacatctaaatagcattctctaccaaaaggaaccagaactgcttagaaaaattgctgactccagggctgtgccagagtaagtaaaagatgagttygggatatgtaccaaaaagtaagaatgtacttgaaaaatgatcagtgtatttagtcagggttctctagagggacagaactaatggaatatatatatataggggagtttattaagtattaactcacacaatcacaaggtcctacaataggctgtctgcaggctgaggagaaaggagagccagtctgagttccaaagctgaagaacttggagttcaatgtttagggcaggaagtatccagcacagcagaaagatgtagggtaggggaggctaggccagtctctcttttgacatttttctgcctgcttatattctagccatgctggcagctgattagatggtgcccaccaagattaagggtgggtatgcctttcccagcccactgactcaaatgttaatttcctttggcaacaccctcacagacacacccaggatcaatactatgtatctttcaatcctatcaagttgacactcagtattaatcatcacaagtccaccccttgtcaacttgaacccatatgcatctcctgagatcatacataatcttcaaataaagacaataataaggtcataattatgcttaacataatacaactatccttcctacaactagaaatgcaccaatccccaacccaaatactgttacataaagttaacaatacttaaatgctgatgcgcagttaatcttatgtcacatgataaaggaggaaggaaataaaatgaagatattttcttagtacaagtgtataaatacacaaacatgtttttaacaaaagaaggaggaaatacccatgacaattacagtcctcctttctgcaactggtcacgtggttgtagttggtattgatgagtaccttctactacccattctgtattccctttgccttcagcaaacacctcagcaggttgtagtttttttcctggtggagtgacccaaacctccattcctgaagggtctaggtcatgtgtaatcctgcctggattgggctgttgtagtttctcattgaccttaatcacagggcatggcagtactaagacaagccctaatggatctcttgtattccatgaatactcttccttaccgccattgtggagtagtaaactgatttcatcttgatcgtccaggtcaatcatcccagcaaacactgttactccattcttagcctgttgacttaaaggtatgaggagcccaaagtatctaggtggcaatcttaacttccagtttaatggaatcgttgttgtgtctcctggtggcagcgttcctccctctggaactaagacctctaggccagcagaacgtaatcttgtgggaacaggaagcaaaaattttgctagtggatcactagagatgatggtgagtggtgccacttccaccccttgattcctggactggttaatcctggctgtgggtgagacagtgccatatattggacgctgattcagagtatccgtggccttctggagaactttgcctcagcgctgcaaagtattgtcacctagttggcattgtaactgtgacttcaaaaggccgtttcaccattctrtcaatccagctgcttcaggatgataggaaacatggtaagaccagtgaattccatgagcatgagcccactgccacacttctttrgccataaagtgagtgcctttgttagaggcaatgctgtgtgtaataccatgatgatgcataaggcattctgtgagtccacrgatggtagtcttggcagaagcattgcatgcaggataggcaaactcatatccaaagtaagtgtctattccagtgaggacaaacctctgtcctttacatgatggaagaggtccaatataatcaacctgccactaggtagctggctgatcaccccaaggaatggcaccatatcgagggctcagtgttggtctctgctgctggcaaattgggcgcttagcagtggccatagccaggtcagccttggtgagcggaagtacatgttgctgagcccatacgtaacctccgcccctgccaccatgggtactttgttcatgggcccattgggtgatgacaggggtggctggggaaagaggctgagtggtgtccacagaacgggtcatgtcctgtcacttgattattaaaatcctcttctgctgagatcacccattagtgagcactcacatgggatacaaatatcttcacagtttttgaccggagaggtcgatccacatacctcttccccaaatttctttgtcaccaattttccaatcatgcttcttccaagtccctgaccatccagccaaacctacagcccatgaatccgtgtataatcgcasatctgaccatgtctcctttgatgcaaagtgcacaaccagttgcactgcttgaggttctgcccactgggaagatttcccttcactgctgtccttcagggatgtcctaaaaaggggctgtagtgctgtagctgtccactttcgggtgttatctgcatattgtgcagaaccatctgtgaaccagccccttctcttcctttgtcaactgatcatagggaactcctcatgaggccatcggtgcaggctggggaagagaagtcagggtggcaggagtggagaccatggacacgtgagccacttcctcatgtaacttasttgtgccttcaggacctgtttgagcccagtcacctatataccacttccatttgatgatggaatgctgctgtgcatggcccactttatggctacatgggtcagaaagcacccagttcatgacaggcagttcaggtcacatggagacttgatgacccatagtcaaatgttcagtttccaccaaagcccagtaacaggccaggagctgtctctcaaaaggagcttatttatctgcagaagatggcagggccttgccctaaaaccctagaggccaccactgtgattcacctatggcggcttgccaaaggctccaaacagcatccctatctgccactgacacttcaagcaccattgggtctgctgggtcatatggcccaagtggcagaggagctggcacagcagcctggacctgttgcagagccttttcctgttttggaccccactcaaaactggcagtctttcaggtcactcgataaatgggctggagtaatacacccaaatgaggaatgtgttgcctctcaaatcaaatcggcctactaggcattgtgcctttttcttggttgtaggaggggccaaatgcagcaacttatcctttaccttagaaggaatatcttgacagtccccacaccactggaccrctagaaattttactgaggtaggtgatcactgaattttagttggatttatttcccatcctctggcacgcaaatgtctcaccaatacattcggtgtgtttgctacttcttactcactggatgcaatcagcataatgtcatcaatgtaatggaccagtgtcatatcttgcaggagcgaaaagtgatcaaggtctctctgaataagattatgatacaaagctggagagttgataacccctgaggtagaacagtaaaggcatattgctggccttgctagctgaaggcaaatttcttctggtgggccttatggacagcaatggagaaaaaggcatttgccaagtcaatggctgcataccaggaaccaggagatgtgttaatttgctcaagcaatgaaaccacatctggtacaggtacagcagctgcaattggagtcaccacttggttaagcttacaataatctactgtcattctctatgatctgtctgtcttctgcacaggacaaatggaagagttgaacggggatgtggtaggaaacaccacccctgcgtctttcaagtccttgatggtggcactaatctctgcaatccctccagggatgcgatatagtttttgatttactatttaggtagaggcagctctaatggtttccatttgggctttcctaccataatagccctcaccctaccagtcagggagctaatgtgggggttctgccagctgctaagtatgtctatgccaattatgcatttctggcaatggggaaatgaccataggatgagtccagggactcrctgtaagttggacctgagctaaaactccattaattacctgacctccataagcccctactttaactggaggaccacaataatgtttggggtcccctggaatcaacgtcagctcagagccattgtccagtagtccccaaaatgtctgatcatttccctttccccagtgcacagttaccctggtaaaaggccagaggtctccttggggaagggtgggagaaagattcactgcataaattgtcggtaatgtactggggtccttcctccaggggatctggcctccctttcattcaagggattgtgggtttgtaaactggctcaagtctggaaattgattgaggggtcatgattctctgtttttmtaattcaaattagccttttgtccattcgacctagaaattttcagattgtgtagattaagtaggaacgcagtaggtttcctatcagtttcacttctagctctacataagtcagactattctgattgctgcattgcctctgctctctattacrgtagctccacccaccttgcgtttgaaggttgagtgtggccacttggcccctgccacctcaggatccaattattcccattgtatttaaattttgtagttgagtgactgtagttcccatgttacatctgacatgcagaggagagcaagtgcaaggcttttcaaagatgtaggtgctaccctcacaaatctgctttgcaagacattggtcaagggtatatcttctggacccaccctactgggatgagtcagtctaaagtgactaatccattccaccaccccaatctccctaagcctttggatcccttcctctacattaaaccaaggcagatcaggcatttccagctcactcacagtgggcaatcttttaatccatatttcagctaaccaagtaaataaactattagaactttttgtaaccccctgagctgcaacattaaatgcagagttcctatttagtggccccaaatcaataaattcagcctgatacaactctattttccttccaacattattccacacccttaatatccactcacatgcctgttctccagatttctgctgatataaatrggaaaactcaagcagttcttttcaagcataacgcacctcctcatgggtcacactttcaacctcacttctaggggcctgccgggacttttgtctagttataggtctagaagcaaacagaggtgttgggggtggctcctgaggagaatcaacattatcttgagcgcctctgcccagctcccgcatcgtctgggatgtgaagagtgcctctgcccgaccaccctgtctgggaagtgaggagtgcctctgcccagcccctgccctgtctgggatgtgaggagcgcctctgcccagccaccccatctgggaagtgatgtgcccctctgcccagctgcccaccatctgggaagtgaggagcgcctctgcctggccgctgtgcaaccttccaagtgagaagtgacagccttgtgtgtgatcttttctgtcttccccaagtttgcattttcaacattaaagtttactttttaattaaaagtttaaattggagaatataaaaagaaaaaagaaaaaaaaaaacattatcttgcctggcaactgcctcaggggaggccatcactgttgcctcaggtagcgcagggtttatctcctcagacaaaggtggaaaggctgatggcatcatgggtccaggaggggatgttgccactactggagatggggaagctgttccttctggaaaaaagagttcatcagagtttacaaactcagtgtccccagtttcattggggttctcccacacatccccattccaagttgcatggtcccattcttttctaatcgatgccctcactttaacagtagacacctggcaaggctgtgcatgcacctttcattgcaggtcagccacttgcacaataagagcttgtgtctgtttttccacaatttcagctctttctctacaggagataagactctcactctgagcaatcttagcagatttgaggctcagtatatgcttctgaagccaggagatacaatctctgagttcatcattttctttcataactttgtccactgaacttaggagcaaccaaccagctttattatggtcgttggttcaccacataggctcaaagatattaggtatagagtcactaaactccttgcctctcatgagtgatgaatcgggagtgtcaaatgcatatattttgcataactctgtaaacagttcacgccaaggactatgagtgttttccatgctattagaagtagagtccttagcattttgtggtctaatcatattaggcagccaactcccaaaaccccaaaaccaatgaaagaactccatccttaatattcttttccactagaaccactccttataccaaaatctgtattagtcagggttctctagagggacagaactaaatctgaattagtcagggttctctagagggacagaactaatgaaatatatatatatatatatatatatatatatatatagagagagagagagagagagagagagagagagaggggagtttattaagtattaactaacatgatcacaaggtctcacaataggccatctgcaggctgaggagcaaggagagccagtccgagttccaaagctgaagaacttggagttcgatgttcgagggaaggaagcatccagcatgggagaaagatgtaggctgggaggctaggcaagcctctcttttcacatttttctgcctgcttatattgtagccacactggcagctgattagattgtgcccacccagattaagggtgggtccacctttcccagcccaccgactcaaatattaaccttccttggcaacaccctcacagacacacccaggatcaatactttatatccttcagtcccatcaagttgacaatcagtattaaccatcacaattgggatatctcaaaagccatagaagccagcttgaagggcctccctctggcaaacctgggacaatttggccatcagatacattatatttgcaatagattaaaacctgttgaataagataataaactatgagcccatactgatctgaataaattgaaagttggatgaagaaacagtatacttacagagttttgaagaatcctttcacaaaatacttgttaaatacaaaggtaggaaagaatgactttgcagtaaagaagcctggaggacgccactttaatcaagtgttaaatgtgaacatcatcactaataggaccggtcggcaatgrtgccacctgatagtaaacaatgagaagaagccagcatcacttctgtaatattactgcaaaagatgtataatctcagtctaattatgagcaaacagtatgcaaactcaaatagagggacattctataaaaacactaaattgttcataagtatcaatgtcktgaaagtcaaggaaagactgaggaaatgagattgaccaaagagacctgacaactaaatattgcacagcattttgaactactctttattatgaaggacaatattggaacaactggtgaaatgtgaatgatgtctgaggattagatggtaataatgtgtcaatattaattttctggttaagattatgtaggagaatatttttatttgtaggaaatgcattacatcatttggtagtgatgcggcatcatgttggctatttaaatcatagttcaggaaaaaaaaacaattttatgtaatgtacttcaaagaagaattcaaagaatttactgcacttaatgatcatattgatctgtgctttcttaacattttttccccttgacttcctttggcttcagaaacactggttgtcttacctgttagatcattttcttctcaaaggccattcttagtcaccttattcttttattgtgggtactaatttgtaatgtttttccttggccttctcttctttcccctttaataattcttctatttcttgcaactctaggcatatctatcctaaatttgcatctttatcctagctatttcctgatctttagacctacattttacttgaagttagctttttttagtacttctttttctgtcagtccagatctttggtatataactcagcgttggcttaactcacagggctcactaatgcatactcacattttgtgaaaaatgtggggtttacttttcttatttcaaaagatagtaaaattggcttctgtaatggaacagagggttattaagaaaatttcagaatggctactacctgtactgatccaggatcagggtcataaacttatctccaaaatgaaatacaagtttgattacagtagaaagttgcatgttataaaaaggtgaattttatcttgatacgaaataaacttttagggatattatctgagataacatgaagaagtaagaatattatctcatctcccaaatctgttttgaaggaagaggttatgagaaaagtttgaactatatatatgaaaaagcatccatattttaaaattgtctcaattctaacatgaaacaagaacaaaaataggagtattcttagttggcatgtctaaaattaaacattttaaattgatcaagaataacagggatggtgaaaaggtattcattataattccattcattaaaaaatattgataaatacctttcttatttaaacttttttattttataactgtatatatgtatatgttgaaaattaatgtttttatatccaactgtgtaccagaaagtatgagtcatttctgtgccaaaacacttttggatatctcattcggtttctaattatgaaacatttcaggaagtattgcaaataactcaaatagccctcccgaaatgcttggttttggtgggacgttaccggtcctttatttgttgaactctcttcaaaagtaataattctttctatgaatgaatctctactcagtgcaagagattacaggtggccaaatgactcttattctgaagctgaactcagatataataaacattggcatttaattggtgttaattttggtgtaattcattgtctctcttatttaaaaaaatggtgtttcctgaaaccagtgttatttggaaaaccttggctaactaacaagttcctgagaaatattactggataccccaaagccttgacttgaccactgtgcaagctatgcatgtaacaaaattgcactggtaccccctaaatttatacaaataaaaaatagtatattgccaagaatgtcttagtaattcaacaaaagtgccttctttaaaaagttcaaaaatattttaattttataattatttattgagatcctgctgattttataggctcayattggactatgacagggatccaaaagaaatatataccttataaagaacttataatcaattttgagaaacaaaatacattcatatgaaacagcaagaaaaccatgaaaggatataatgtagtgtcagcttagtaagttaatattcttgttgagtcagacagtcatcagtaatcttcctatagcactgacgtaattttgggttacttaatgagtcaatattaggctggatttatttcatgttttctgtgctttataatatttgattataaaagccttatttttcagcactgaagtcagcacatattgttggatacatactacttgctagcacacttataggcatcaggattacaaatgtaagcaaaatagagattctttgtacttaagcaccttgctgctttgtgtgtacatgtacgctgggtgatgatgccagggaagacacagacagttaacatttgaatacataaataaataattctagatgtttttaagtattgtgaaggtgataaaaatgttggggtggaggtgcactgactactgttatcagagaaggcctgtctgaggagccaagattttagctgaagattgaataatgagaaagaattaagtaggtagttagatttatagtttggagctcaaggagaggtctagagtgatgatagaagttttagagtcactactatgaatatgatatttaaaaccacgagaggccaagtgccgtagctcacgcctataatcccaacactttgggaagctgaggcaggcggatcacttgaggtcaggagttcaagaccagcctggccaacgtggtgaaaccccatctcatgtctactaaaaatacaaaaattagctaggcgtggtggcaggcgcctgtaatcctagccacctgagaggctgaggcaggagaatcgcttgaacccaggaggcaggggatgcagtgagccaagattatgccaatgccctccaacctgggtgacagagcgagacactttcaaaaataaacaaccaaccatgagagtgcttaagttacatcagtgagtgtagctggagaagagaggagtatagagccctgaaacagttcaacattaagaagacagagaggaggaggaggcagcaaaggaacctgagaagaagcaggtagtgattaggaggaaacgtaggcaaatgtggtatctcagcagctagaaaagaaagtgtttcacaaaagggaaaaccaacaatgtcaaacagtcaagaggtcaaatgagatgagagttgagagctgacctttgcctgaccactttctgctcaaggaaacagattagaaaaatggctcattttaggtctgggcagaacattttcaaaatagacctggaacatttgatcataacagagcaaggaatctatccaaaactactatagacatgtcaaaaggactcaggggacagcatgaagagtctttcacttgctcaagatgagataatatgaatatcaataaggaaaataactataatggattgaaacacatcaaatatgtttaaatccatgagttcaaattgatcaaaaaaagaaaaccaaaaacaaaaccacacacacacacacacaacaacaacaacaactaagtggaaacctctgaagaaatgtagttaaccagctttttaatttaaaaactgataaagagaatcaagcatttttcctttttctatatcaaccgtatccttggatacccaaatagtagatgtggtgaaatttctctttaaaggggtgttccagtaaatacataatgaatgatacaattggaatatcaccattttgtaatgccagatgaattcatgaatttagacatttagcaaaataagctactaacatcacaaaaaggaataccaaatatggtgtgccttctgataacatcaacccatgaaatgtcttgtccaaaaaaattgaacataaatctgattatgcttctagattcaattttcaattaccaattttccaagaatacagaagaaagattaacatgttaacctatatcatagggatgtaattagccaaatctatattgagggaaactctaccagacaaattaaacaatagtgcctatggaaggtttatgatttggtgataaaataataaattaactataaaggatgtgataccataaaagtgaggatagtggttacacttagaagggaagagtctttgggagaaaacccgggatgggttttgggtagctggcaagattctgtttaaatgaatattatgtagaaatgtggttgtcttataacaattcattaagctrtatgtggttctctgtatgtgagtcacatttaacaatactagagcaaaacttttaaatgaggataaggcatttacatattttaaattctattattttaatttgtgaagttacttgttaagattttgtaggaaatgggaggggcaagcagtgttaaagactttagagtaaataacagagttgcaaacggcaactaagatcacaaatcaaagaaatcaagtgagctccacatgaaagaactactcagcattagtcagtcacttcagccatctctaacacatgttctcatcttcatgttgaaaatggattaggtggcatatacgttggaaatacctgtttacagatgcttcatgttgcttttcaaagtgcttttatatatattatatcatgacagattctaaatgaatttgtgagtggaactgataatggtatctaaattctctgtacataaaaatagtaaatgtttattaatttaaaaatattttaaaatatctaagagaacaaatctccctttattgtagatgtcaatatattatttcaagtaatttctcccttacttataagaattcctgccccttatttgtttaaggaaataatgtccaccagtttgataaaaattgagataaattaaattgttgtttgaaaaaaaatttaagatattcatggtagtttgacaggcctgaagtaaatgtaaactactcctttttttttttttttttctgcagaggtctctttattactatccacgatcgagggcatattgcttcagttctcaatgcatggccagaagatgtcatcaaggtaagttatcatgtttttccactatagcaaattttttcttttttctgtcccataaaacagtttaaaatatactgacaattctcatgataataggtagcattcattagcttttctagtgaatatcacctaatttatatccctttgatttttacatagtgggttaattttattctgatgccatttagatactaagttttcctattatttctatctaatttcttagtacctccattctaagtaatgataaatgttgaatatgtgatagcatctgaatttctttaagcaaacccttaaattctatctgttgtgtttaattatccactaagaggaatccaagtaggcaagaaaaaaagtctgttaattcatttcttttatcattatgactttaagtagttcatttgacttacctctgtaagtgagctaatgaaaataaaagtaataatagtacttgacatttggtagcgttctgaatgagactttttacatggattaactcttataataataataattgattgaggaaagaaaggcacagatgggttacaaagtagcttaagatagtggtgggaactgcatgcaggccccagagctggcctctgagtccctgttcttagacacagggctatgccatcttccttgtctaagggaggtgagaagtgtttgttctccctttggttccctctttcttttctgttgaatgcctagcaactttgtggtatcttttagtaccaggatggaataaatcaatgccttttggtggtasaaaggcacttcagctataacttctgaatgtaagtccgttaatgatctttttaaaattattttaatttttttagagacaaagtcccactatgttgctcagtctggtcttgaactcctgacctcacgcagtcctcctgcctgagcttcccaaagtattgaaactataggtgtgagctaccatgccttggtgatctttcctatttgagacattgtggctataattgattaatttggttctctagggctcatgccaggaaaacttgtaaattaaaatggtttttattatttccagtgtcctcaatttttttttttttttttttttttttttttgctttctccacctaagttgcttcctcagcttttctgctatcaacaggaccatgttatccacagattctggtcttagaaactaccctaagaaacatcttaattgtataaagcataaatgtctgatcacctaaggatgtttacttttaatcaggaatctaaagaaaatttaaggaatcaacaagttggccagaagtggtggctcaggcctgtgatmccaacactttgggaggccgaggtgggtgggaggattgcttgagctcaggagtttgagaccagcctgggcaacatagtgagactccatttctagaaaaaattttaaaattagctggaatggtggtgcatgcctgtagtcccagctacttggcatgcacccagctacttgggaggctgaggtgggaggatcacttgagctcaggagttcaattctgcaatgtactatgatcacaccactacactctagcctgggcaacagagtgagaccctgtctcagaaaaaaaacaaacaaacaagaattaacaagtcaatagaggaaatagttctgcagtagagagttctagccaatatccctgtaatcgtcctaacagctaggcagtaagctatcacaccatgtttcttgttcttccaactaactgatctctgcatctttaactttattcataagctacttttatcctttggactcttaatattgggcccttactgatgttcttatccctaactatgccctcttttatttaaaaatcttagcatagtgcctggcacatagtaggtacttagtaaacggcagctattgattgtaaaagaatgctgaagataggtaagtgtatcttatatggtctgtactatatacttgaaagtacccatgaaataaaggcaattattaagcaaaatataatcaaaatgtgtggtattataggtgccttatttattcattctgaggagaatattatttagagaaggctggaatagwtaagaaaacttttctagcaaagttgaaacttaaatccaacctttgatagttagaaagggaagaatatactattctaagaagggaacaggtgaatgtagatatcaagttcggtaagagaatggggtgtttttagataataaggaaattcacttgcctgactaaagctgagtgttaatattggaatatagtggaattaagattgtttaaggggtaatcaaattattgtaaaaggttttgaaattcagaaagagatttagatttgaaaaaatagaatgtcatatttaacaaggaaattatataagtaatatttgaagaaggttcactggaaacagattttagaatagtttcaagaaagcaggaaaagatgcaaaggttctgcatttaggtaggctacaagaggatgggccttgggaaattaaatgaagggatgaagacaggacacatggagagtatctttgtgtgttcaggagaaatctgcgtatttcatacagaagtttctattcaggtaatgcctagataataatttgtatagtggggtgaagatttattttgaaaaacagacatcactgatagaattgtagttgtcttactgatattaatcctgcagttgtgacttaattatcgtacagaaaacatccaactgcttcatttttctgaagcaggagataaagtaggttaaaaaaagcaagagaatattaatttagtgataaactacataagtgacaaaactttttttctttgagagaattcttttactgttaaaatctactcttttatatggaagtatttatgaattaatgctataaatgtacgtttgtaataaagcataaatatcaaatgtctcaaaacatattttaaaaacttctcaaactactacatatctaaatgttcatgtatatgtatattattaaataatataaataatagctttgagagaagaacttagggaataaaagttatgaagaaataagaaagaatgcactggtttttgttttttgtttttttttttttttttgagacagagttttgctcttgttgcccaggctggaatgcagtggtgtgatctctgctcactgcaacctccgcctcctaggttcaagcaattcttctgcctcagcctcccgagtagctgggaggctactcgccaccacgcccaggtaatttttgtgtttttagtagaaacggggttttgccatgttggtcaggctggtcttgaactcctgacctcaggtgatccgcccatctcggcctcccaaagtgtgctgggattataagcgtgagctactgcaattggcccacttttttttttttttaatgttcaagacatatatttagtttaacatagatgagctatcaaaaataagtgaaaagttatgccacttgaaatcccttcagaattttgaaaccaaataacaactctctgtgtttaagcacttttgatgaaatctggaaagcattttataaattattattcaggtcataactaagctaagctaaatgactaagctaactaagctaaatgacaatattactctccttataaaacatatcattaaaaatatttgtaagtataggcaggccaactggactttacctatgtaaagatcacattcataaaagtatatattatcaacgatatrtaaaaatacctctatttgtggtaatgcagtaaataaaactgtctgttaaatacacattagaagtaycaggactttgaaaatttggccttaatttaatttaaaaaacaaagttatagttatctgcagtatttatcttttttaccttaaatcagggctaagttaacccagtagtatcggattgcttcctccaaaagagcatcacatattgatccactgctatttgacatggaaaatcttccaaagacaaatgtattgartgtgcaaaaatgattttcacctacctcccaaatgtatttgcttttaagacaatttttcaagagctgaataatataggtgaacaggaaattaaataaaatatcttagaagtatattttaaaatatattctgcaatgtggtatggtgaaaagagcactgtactaggaattaacatatgtgggtttctggttctttgatattaaccaagtaaatcactttaggcaaattatttcagttctctgatttttcagttaactaatttataaaataagaggaatagacggaatatactttagatttctctttacatctaaaatgctataactttataattagctccagtgaaataatagtaataatagctataaatttttaagaatttgtaatgtaccaggtactgtggtaagttctttatatatcatgatttcattttatgtaatcatagttttattcaatttactaatatttattgattgtttactgtgtgccaaatgctatactaggtgctgatgtacagtggtaagcaaaaagacctggttcccaattttatacagctactctgaaaagtacctttattactcccaatttaccaataagaaacagaagcttaaattcacccaaggccaaataactgacatattcccacgtttctctgaatatgatgagtgtagcagtttgtagactatctaataaattgtgtttcataagattggttttgtttaaattcatataactgacatgaatcacaaagatgttcaataatgatatcaaattacatagaattaaaatctccacatgattaaagtatatgcttcataaatattcaagttaattagaaataaactaaacaggctgggcacggtggtggctcatgcctgtaatcccagcactttggaaggctgagacgggtggatcacgaggtcaggagtttgataccagcctggctaacatggtgaaaccctgtctctactaaaaatacaaaaattagccgggcgtggtggcgggcgcctgtaatcccagctacttgggaggctgagacaggagaattgcctgaacccggtaggcagaggttgcagtgagctgagattgtgccactgcactccagcctgggtgacagagcaagactccgtctcggaaaaaagggaaaaaaaagaaagataaaagaaggaaggaaggaaggaaggagaaagacaaaattcattaagtctagtggaaaattttcaggtaagaagtagcagactgtactggacatgtttcaaagatatcaagtgattataggagttaaggagaatgggtcagattgttgtaaaaataggaggatagggccaggatgcataaactgaagatcagagcatttagggcagagatataacctcctcaatctcttcagtaactatgcagtactttactaaggacactcttgctcaaaaccaccctgtgtttcttttggttcccagtctgagctcttatttccctatactttacccacttgctcytcttgattgaaaagttatttggtatgtttgaatctttatgtgcacacttgcccttctttttaaaataacctaattaagcatatttataaatcaagttcatttcttcaccctattcttccacaattacaatttataaaatctttttcataaatrttcaatttatgttttttaamagcttactatttcactagtagtaacttcagaaatagagtcagaaattgtgtctcaggatttgtgaaaacttgttaataggtaatttttctttttcttccaggccattgtggtgactgatggagagcgtattcttggcttgggagaccttggctgtaatggaatgggcatccctgtgggtaaattggctctatatacagcttgcggagggatgaatcctcaagaatgtctgcctgtcattctggatgtgggaaccgaaaatgaggtaaataatttaygtctataaggcagctatgtacctttaaaaatggcatcaattcttgcattttgaacttattccaggaactcataaaattcattcttttttgtctggytctctttctctctccaaatctgccctttactgttgtaagaaaattacttctcctgttctccttttcccatcttaataacgtgattaatcttttatttgcttccctagtgccttatgttgctttgatatgtatttacaccattattctatagaatatatgttttactttaaggcaatagttttaaaaattatttttttattatataggaactaataccatgggatttattaaatttaatcagtctgaaatattcttgttttaaaaaccatattgaacctaaaatagatcatttggagtttaacttttctcaatcatgactttatattttagaatcttaaagtcagatgttaagtactactttttttttgctcatcctttactgctaatatttaggattaactagctaactagatactagaagttaaacatagaattctctgaaatagaaatgaaagataatagtcagttaaggatgaacttttaaaaagttatttacaaatttcagacctaggtcccaaacagatatatcatcaaataagaccttgacacaaatacatacatgcattatgtttgttttctttgtctccttctaaaacaattgaagatataacttttgatctgtaagtaatgtgaaatatatttttgcatgagcaaaaatacagatagtgacttaaacagttatgtttttaacctacacatagaaagttacaatgtttaacttgatctatgcatgaatgctcacttaacctttatcaaaggatacattttaataaaaatacattgcttatctggcattttctaataccaatagaagtggcttagaaattatcaaagytggcctctttaaacaattgtcctaaaattgtgtgtatacattgaacattaacatttcctctttaagccaggagaggtggtgtgtacctacagtcctagctactcaggaggctagaaggtaggaggattggttgaactcaggagattcaggatgcagtgagccatgatcacgcaattggactacaacctgggctacagagtgagaccctgctctaaaaaatttaaattaaaataaaataaatatatttcttctttattttaaaaatatattttaaaaattgttatgtgataagttgcattgaaataaaatagtttatttattattattttattttattttatttttttttgagacggagtcttgctgtcacccaggctggagtacagtggctgatctctgctcactgcaacctccgcctcccgggttcaagcgattctcctgcctcagcctcccaagtagctgggactacaggcacatgccaccatgttcggtgaattttttgtatttttagtaaagagggtgtttcaccgtgttagccaggatggtctcgatctcctgaccttgtgatctgtccacctcgccctcccaaagtgctgggattaccggcgtgagccaccgtacccggcctatttttttattttctttaagacagggtctcactgttgttgcccaggctagagtgcactgtcatgatcatggctcactgcagcttcaatctcccatactcatgtgattctcccacctcagcctcccaagtagctgggactacagttacatgccaccacagccagctacttttttgtttacattgaaatcaaattttaaaaatcacaaaaatatgtaatatatcttaaaaatcctgtggagaaatgaggaggaatatataacaacaaaacagacatgcaaaaatgttagaatttggcttttttttttttttttgtaagagataggatgttgcactgccacccaggctgtagtgcagtggcactatcatagcttattgcagccttaaactcctgagcccaagtggtcctcctgcctcagcctttcgagtagctgggattccaggtgtgcaccaccacaccaatctaattttttttaacctttttttttttttttagacggggtcttgctatgtatgttgctcaggctggttttgaactcctggtatcaaacaatcctcctgcttcactgggataacagtgaagttttaaacagttttaaaccttggccatttattgagattgtttgtataatgtggacattaaaaaaaagctgtgcactagtgaaactgtaacactaggacacttgcattgatagatatgtattatatgaaagaattgatttcatgagagagattgtattatatgaaagagttgatttcatgaaagtaggtcttaaaatagccaaattgatggttgtcttgaattttccacattatctctgtttagtgtatgtttctttcctgttttggtattcattgcttttatgttattacatttctatccagtatcttacttcctcagcctgcagaacgcatccacctatccttcacgaaatttcttactttaaccagctgtagatctagctttttctctctctttttattaagacatgtctggttcatactacatttcaaaatttttaagctgataattagaaaataatctgattatctaaatgaatctactgttaaaatgctgtgtattatttgtagagattttgcttactgccattcgactttcaggaatattaagggcagaaaattaagtgaatggtgaacctttaactctttgacaggtcaccggagaatacctttgtcactttgagagtgacagaggtctttgagagacctttctgaaactcctcaaattgcatttggtagatttaattgaattagaccaacattgagtacctactcattatgttaagtgaaataaaccaggcacagaaagacaaatatcccatgttctcacacccgagctaaaaaagttgatctcatggaggtagagagtagaatgatagttgccaaaggctgggaagggtgtgtgtatgtcaggatagagggtgggaggatgaagagaggttggttaaggggtacaaatatgtcaattgaaggaataagttctaatgtttgatagcagagtagggtgactacagttaccaacactgtattgtatatttcaaaatagctagaagagaagacttgaaatgctaccaacacatagaaatgataacgcaaggtggccgggggtggtggctcctatctgtaatcccagaactttgggaggccaaggcgggcagatcacctgaggttgagagtttgagaccagcctgagcaacatagagaaaacccgtatactaaaaatacaaaattagttgggcatggtggcacatgcctgtaatcccagctacttgggaggctgaggcaggagaatcgcttgaacccagggatggaggttgcagtgagctgagatcacaacattgcactccagcctgggcaacaacagcaaaactatgtctcaaaaaaaaagaaaagaaataatactcaagatgatggactccctaaataccctgactggatcattacacgttccatgcatgtaaccaagtatcamgtgtaccctataaaaatatacaaatttatgtatcaataaacaaatttttaaaaagtattgaatatctgctatctatcaaagcctaagcaaagcctaggtaatatcggtgtaagaaactagattttgccagcaggatgctctgaatctagaagaggagatacacatgtaactagttgcagtatgtattaattgctttctttggtaaaggcttttgaaggcatttagcaaaccaattctctgacagttattatatactcttgttactggtgaacaaagaattggacaaaacacacaacgcaaggaaagaataaagcaagaaaagaagagatttaatgaaaatgaaagcatactccacagggtgggagcaggcctgagcagccgctcaaggacctggatacagaatcttctaaggtccaaatacccgctagaggtttcccattggccaattagtgttcaccccatttaaatgaagtggtggcctgcaatcagtctgattggttgcagaragcaaccaatcagaggctgaagtgaagttacaaaggtcacactcctagcaaacatctgattggttgtggaaagcaaccaatctgaggctaaagtggagttacaaagctgcccttctgtgcaaatgaagacttggcccacagtcagtgtgattggttggggacagcaaccaatcagaggctgatgtgaagttacaaagttacactcctatgcaaacgtctgattggttgcaaaaaccaaccagtcagaggtactttcaatttctcatctgccagcagaaaaggtaggggtttgcaaagggagtagcctctggtcattttgttacttaggcgtagaaagttagggttttcctttcaattttgttcyaggaagtcagtgcaaaacggccttagattccccgcctccagaccctattctcctgcctcattcttagtcttaaactctgtattactgttatcttcttatatcttgtctttttaaataaatcatattttgggaatttaattgtaaaaatgtatactagtaaatgatcaactagagttcttgttctaaaaggagagtaaattatttgttccctttataaaaggtagtttagctgtacccagagttaaactacagagtttacagactgccctcatttctgacatcaactgcaagttgaagagcttcccgaaaccaacttcaggcttgataatttgctaagactcaaaaaactcactgaaagctattgtactcacagttacagtgtattatgggcgaaagatacacattaaaatctcacaaaagaagagatgcatagggaagagtctagaagagtcccaaatgtgaagtgtccattttcctataaaatcaggacatgttaccctcccagtatggatatgaaatatcaacatgtgtcccactgttcagagttttattggggctccattacctagtcatgattgattgattgattgattgcccaggtggttgaactcagtctccaggttgaccgatactgtatgacgcagatgccctaccccagatcacatggttagtctttctggcatggccagcgttcacccggtgactctcagttatggtcgctaagctactagataaaaggattaggcccttattcaaactggttgaatgcttgtcaactgtcaccagagtccatccacagaataaatagaaatataagaggcaaacagacaaaaaggaaaatagatgtaaattttattgttaattaagcagaattaagttttaagctcagataagattaaggatttgatcatcaaccttttaaggaaatatagttcctatgctatataaactgtcccagagcatactaaaattgacagcttaacatttcagtttttaaaaagagcataaccttgatatccaaacttggtaaaaaaaaaaaaaatagcacataacaagaaattgctaattagtctcatatttacccatgctcccagtttcaccacttactagtggtgtttctgtgttttgctcatgtaaaatgagtacttacctcatagagctgtcatggtttaatacatttagaatgcttaaaattgtgactggcattttgaaagcacttggtaaatgttacctcacgtgaacatagatgtagaagcaaaagttctttataaaatactggcaagtaaaatcttgcagaatattttaatgttgaaataatgtttgaaatctattcaaaccattagctgcatcataattaatggtgatatattagaggcattattttaaaagacaggacacccgttatcactgctgttttcttttttattattcagaaaattctagcctgtgtaataagacaataaaacaaaggagatataactgacaggaaaagacaaaattatcattatttataggtaatatgtttatctattactgaaactcaagaaaaccaactaaaaaatactgtggtcaaattatagcactcagtaaagtggctgcctataaaacaaatattcaaaacttaatagcttttctatgtacttgtaataaccagttaaaaattaactcattcacagtagcaacaatattctattctgctattcttctaatgttatatagtatttcacatttcttttcttttctttttttttttattatactctaagttttagggtacatgtgcacattgtgcaggttagttacatatgtatacatgtgccatgctggtgcgctgcacccactaacgtgtcatctagcattaggtatatctcccaatgctatccctcccccctcccccgaccccaccacagtccccagagtgtgatattccccttcctgtgtccatgtgatctcattgttcaattcccacctatgagtgagaatatgcggtgtttggttttttgttcttgcgatagtttactgagaatgatggtttccaatttcatccatgtccctacaaaggacatgaactcatcattttttatggctgcatagtattccatggtgtatatgtgccacattttcttaatccagtctatcattgttggacatttgggttggttccaagtctttgctattgtgaatagtgccgcaataaacatacgtgtgtatgtgtctttatagcagcatgatttatagtcctttgggtatatacccagtaatgggatggctgggtcaaatggtatttctagttctagatccctgaggaatcgccacactgacttccacaatggttgaactagtttacagtcccaccaacagtgtaaaagtgttcctatttctccacatcctctccagcacctgttgtttcctgactttttaatgattgccattctaactggtgtgagatgatatctcatagtggttttgatttgcatttctctgatggccagtgatgatgagcatttcttcatgtgttttttggctgcataaatgtcttcttttgagaagtgtctgttcatgtccttcgcccactttttgatggggttgtttgtttttttcttgtaaatttgtttgagttcattgtagattctggatattagccctttgtcagatgagtaggctgcgaaaattttctcccatgttgtaggttgcctgttcactctgatggtagtttcttttgctgtgcagaagctctttagtttaattagatcccatttgtcaattttggcttttgttgccattgcttttggtgttttggacatgaagtccttgcccacgcctatgtcctgaatggtaatgcctaggttttcttctaggctttttatggttttaggtctaacgtttaaatctttaatccatcttgaattgatttttgtataaggtgtaaggaagggatccagtttcagctttctacatatggctagccagttttcccagcaccatttattaaatagggaatcctttccccattgcttgtttttctcaggtttgtcaaagatcagatagttgtagatatgcggcattatttctgagggctctgttctgttccattgatctatatctctgttttggtaccagtaccatgctgttttggttactgtagccttgtagtatagtttgaagtcaggtagtgtgatgcctccagctttgttcttttggcttaggattgacttggcgatgcgggctcttttttggttccatatgaactttaaagtagttttttccaattctgtgaagaaagtcattggtagcttgatggggatggcattgaatctgtaaattacctttggcagtatggccattttcacgatattgattcttcctacccatgagcatggaatgttcttccatttgtttgtgtcctcttttatttccttgagcagtggtttgtagttctccttgaagaggtccttcacatcccttgtaagttggattcctaggtattttattctctttgaagcaattgtgaatgggagttcactcatgatttggctctctgtttgtctgttgttggtgtataagaatgcttgtgatttttgtacattgattttgtatcctgagactttgctgaagttgcttatcagcttaaggagattttgggctgagacgatggggttttctagataaacaatcatgtcatctgcaaacagggacaatttgacttcctcttttcctaattgaataccctttatctccttctcctgcctgattgccctggccagaacttccaacactatgttgaataggagtggtgagagagggcatccctgtcttgtgccagttttcaaagggaatgcttccagtttttgcccattcagtatgatattggctgtgggtttgtcatagatagctcttattattttgagatacgtcccatcaatacctaatttattgagagtttttagcatgaagggttgttgaattttgtcaaaggctttttctgcatctattgagataatcatgtggtttttgtctttggctctgtttatatgctggattacatttattgatttgcgtatattgaaccagccttgcatcccagggrtgaagcccacttgatcatggtggataagctttttgatgtgctgctggattcggtttgccagtattttattgaggatttttgcatcaatgttcatcaaggatattggtctaaaattctcttttttggttgtgtctctgcccggctttggtatcagaatgatgctggcctcataaaatgagttagggaggattccctctttttctattgattggaatagtttcagaaggaatggtaccagttcctccttgtacctctggtagaattcggctgtgaatccatctggtcctggactctttttggttggtaaactattgattattgccacaatttcagagcctgttattggtctattcagagattcaacttcttcctggtttagtcttgggagagtgtatgtgtcgaggaatgtatccatttcttctagattttctagtttatttgcgtagaggtgtttgtagtattctctgatggtagtttgtatttctgtgggatcggtggtgatatcccctttatcattttttattgtgtctatttgattcttctctctttttttctttattagtcttgctagtggtctatcaattttgttgatcctttcaaaaaaccagctcctggattcattgattttttgaagggttttttgtgtctctatttccttcagttctgctctgattttagttatttcttgccttctgctagcttttgaatgtgtttgctcttgcttttctagttcttttaattgtgatgttagggtgtcaattttggatccttcctgctttctcttgtaggcatttagtgctataaatttccctctacacactgctttgaatgcgtcccagagattctggtatgtggtgtctttgttctcgttggtttcaaagaacatctttatttctgccttcatttcgttatgtacccagtagtcattcaggagcaggttgttcagtttccatgtagttgagcggctttgagtgagattcttaatcctgagttctagtttgattgcacggtggtctgagagatagtttgttataatttctgttcttttacatttgctgaggagtgctttacttccaactatgtggtcaattttggaataggtgtggtgtggtgctgaaaaaaatgtatattctgttgatttggggtggagagttctgtagatgtctattaggtctgcttggtgcagagctgagttcaattcctgggtatctttgttgactttctgtctcgttgatctgtctaatgttgacagtggggtgttaaagtctcccattattaatgtgtgggagtctaagtctctttgtaggtcactcaggacttgctttatgaatctgggtgctcctgtattgggtgcatatatatttaggatagttagctcctcttgttgaattgatccctttaccattatgtaatggccttctttgtctcttttgatccttgttggtttaaagtctgttttatcagagactaggattgcaacccctgcctttttttgttttccattggcttggtagatcttcctccatccttttattttgagcctatgtgtgtctctgcacgtgagatgggtttcctgaatacagcacactgatgggtcttgactctttatccaacttgccagtctgtgtcttttaattgcagaatttagtccatttatatttaaagttaatattgttatgtgtgaatttgatcctgtcattatgatgttagctggtgattttgctcattagttgatgcagtttcttcctagtctcgatggtctttacattttggcatgattttgcagcggctggtaccggttgttcctttccatgtttagcgcttccttcaggagctcttttagggcaggcctggtggtgacaaaatctctcagcatttgcttgtctataaagtattttatttctccttcacttatgaagcttagtttggctggatatgaaattctggtttgaaaattcttttctttaagaatgttgaatattggcccccactctcttctggcttgtagggtttctgccgagagatccgctgttagtctgatgggctttcctttgagggtaacccgacctttctctctggctgcccttaacattttttccttcatttcaactttggtgaatctgacaattatgtgtcttggagttgctcttctcgaggagtatctttatggcgttctctgtatttcctgaatctgaacgttggcctgccttgctagattggggaagttctcctggataatatcctgcagagtgttttccaacttggttccattctccacatcactttcaggtacaccaatcagacgtagatttggtcttttcacatagtcccatatttcttggaggctttgctcatttctttttattcttttttctctaaacttcccttctcgcttcatttcattcatttcatcttccattgctgataccctttattccagttgatcgcatcagctcctgaggcttctgcattcttcacgtagttctcgagccttggttttcagctccatcagctcctttaagcacttctctgtattggttattctagttatacattcttctaaatttttttcaaagttttcaacttctttgcctttggtttgaatgtcctcccgtagctcagagtaatttgatcgtctgaagccttcttctctcagctcgtcaaaatcattctccatccagctttgttccgttgctggtgaggaactgcgttcctttggaggaggagaggcgctctgcgttttagagtttccagtttttctgttctgttttttccccatctttgtggttttatctacttttggtctttgatgatggtgatgtacagatgggttttcggtgtagatgtcctttctggttgttagttttccttctaacagacaggaccctcagctgcaggtctgttggaataccctgccgtgtgaggtgtcagtgtgcccctgctgggggtgcctcccagttaggttgctcgggggtcaggggtcagggacccacttgaggaggcagtctgcccgttctcagatctccagctgcgtgctgggagaaccactgctctcttcaaagctgtcagacagggacatttaagtctgcagaggttactgctgtctttttgtttgtctgtgccctgcccccagaggtggagcctacagaggcaggcaggcctccttgagctgtggtgggctccacccagttcgagcttcccggctgctttgtttacctaagcaagcctgggcaatggcgggcgcccctcccccagcctcgttgccgccttgcagtttgatctcagactgctgtgctagcaatcagcgagattccgtgggcrtaggaccctctgagccaggtgtgggatatagtctcgtggtgcgccgtttcttaagccggtctgaaaagcgcaatattcgggtgggagtgacccgattttccaggtgcgtccgtcacccctttctttgactcggaaaaggaactccctgaccccttgcgcttcccaggtgaggcaatgcctcgacctgcttcggctcgcgcacggtgcacgcacacactggcctgcgcccactgtctggcactccctagtgagaagaacccggtacctcagatggaaatgcagaaatcacccgtcttctgcgtcgctcacgctgggagctgtagaccagagctgttcctattcggccatcttggctcctccccccctgacttggagttttatatcagtatttcacatttctaagcaaagaaatagttacatattatttggttaatcagaataattaattttggggcaagtattttttttctaaaaactgatcaaggtgtgttgtatttattaagcaaaatatgttttcatctttgactcaatttgcccttaattttattgactttcgggctacacatatcaactgtattccgttagcaatacagtgctgttcaggataaaaatagaagttgtttaagattctggattaacttttctgttgcttaaaatagatagaaatgctccaacatattactttctccatttgagctcttggagttcaaaatatgttagtaatattgtaacctgtaaaacatcctaatctaaatttttatggtctttaactcataatgtgtgtgaagaatagaaaaatatttggaatcaactgagttgctactcataatgttcttattttattcattctgacattttgtattttttgtatttattctttcactgctgctttactgagaagacaggaaggaaaacttaattatgactgagtctatgagttcatttaaaatgtaatggtgtttttatgtagtggcagtttcacatatggaaaactgattttagtcaaaatgttcctgtagtactaatttttaatcttaattgcttttttgaatctctgcatattttacacttaataataaaaatatagaaactgcttgataatatcacttagtttcttatccagaataacctagcaaattttaataaaagtaaatcccctttaaatacaaattataaatgttttcctcttttatcatacctacatgtactggatagtaatgaaaatagaaatggaattagctgccagttaataagacagtcttcacttgccataaagatacacttgcctgactgcttttaagcttctgcagctttcaactaaaggaaatttaaggaactaagatgccaaaacagaagtacacagaagtacttggctaaaaaatattcttatttttttatttttattttttattttaatagccttaagggtacaagtggtttttggttacacggatgaattatataatggtgaactctgagcttttagtgtacccatcacctgaaaaacattgtacccaataggtaattttttatcctttacctacctcctaccctcctcccatctgagtctccagtgtccattatactgctttgtatactcctatgtacccatagcttaactcccacttataagtgaaaatatgcagtatttggtcttccattcctaagttatttcatttaggttaatagcctccagtttcatccaagtkgctgcaaaggacattgttttatcctttcttatgactgagtggtatactatgatatatatgtgaaaattttctttatccactcattggttgatgggcacttgaggttgatttcatatcttcgcaattgtggattgtgctgtgataaacatacatgtgcaggtgtctttttgatataatggcttcttttcctttgggtggatacccagtagtgggattgctggattgaatagtagatctactttatgttctttgagaaatcgccatgttgttttccatagatgatatactaatttacattctcaataacagtgtataagttttcccttttcaccacatggtgccaacatctattgttttttttgactttaaaataatggccattttgattttgtttagatggaaaatactcttattctttaagttaataatactaagtattaaattaggtagggtgtttgtgtttatattttcatctcatctttcctctgttatttcacagtccatattttctttaattgtgaagcagttgctatataaagtttacttgttacgtgaagtaaattttctttagaacatgtcatgtttaattccttctttttttgctgttgccaaatcttttcatagaaattatgttgattatatgtctgtttttcttgtatatgactaatattgaggcttgctatttgactaaaaataatttgagtagatgttccttgtgttcccttcmtgcttgtttggacattattatgtcttaaagaaccttttcatacgttatatgggatattcttttttttagggttattgtaacaaagagccatagactaggtggcttaactgacagaaatttattttctcacagttctgggggctggaagtccaagatcaatgtgttggtagggttggtttcttctgtggtttgtgtccttgacttgtagatgcccgtcttcctctggtgtcttcatacagtttttcttctgtgtatgtctgtatcctaatttcctcttcttttttttttttttttgagatggagtcttgctctgttgcccaggctggagtgcagtggcatgatctcagctcactgcaacctccgcctcccgggttcaagcaattctctgcctcagcctcctgagtagctgggattacaggcgcccaccaccacgcccgactaatttttgtatatttagtagagatgggtttcaccatcttggccaggctggtcttaaactccggacctcgtgatccacccgcctcagcctcccaaagtgctgggattacagacgtgagccaccgcacccggccaatttcctcttcttaaaaggaccagtcatattggattagggcccactctaatgacctcattcaacttaattacttctttaaatactctgtctccaaatacgtcacattctgaggtactgggattagggattcaacatatgaatttgggggcaacacctttcaacccatagcacatgatcagtcctcaagaggtcacgggcagaatgagtaggagaatgtgatttctgcgtattctttgcttattaaaccattgctccaggtctcagcttttctgtgtctagttttatgtttagtctggcctctggttgatgtgtacagtgtacccttgccacttcagacaagtgatcctgtattggaatgaataccagtcatcattagtaaagccaggggagagaagaaaattctcaactcccaggagtttggcttggagtttcatttgcttgctctttgtggtctcattttgccccaccctctctaaattagaagatcttaatagattttatcaagaatttatttatctgtttcctgagacactacactagtgccttgggaaagagaatggggtctttctttagtttgattttatrcacactataactagcaggaactccttgaaatttttatgtaaattttagaaatactgattgtatagaacaaaatggaaaatttatttaaatgagacagaaacctagtaggaagtagaatggttttattttaacttaataatacaagttcgaaataacttaataatacaagttctcaccacttcagaattatcaggggcatgtgttaagaatgcagaattttgcaccctgctccagacatactgaatcacaactaaattttaatcatttttatttctagcactttttaataatcatgccagctcatatgcatgctgacattttagtggtactggttttagactcttacctgaatgtgatggttactttgcttattcttattgatgacatgaggcaacaaaacagcaaaagttatatattatttatttatagaatccataacaaaaaatgagaaatggtaacaaagaaaataattttctgtagattataaattgagtttaaaaataaatgctagaatgaggaatagttacatcagtwtagaagataaaggtgtataatgttcttaatatttaaagaatactttcaggtcagtaagagaatattagactaggctcagtgactcacacctgtaatcccaacactttaggaggtgaagtgagaggatcacttgagcccaggagttcaagaccagcctgggcaacataagcaagaccttgtctctgcaaaaattaaaataaaattagccaggtatggtgcctgtagtcctagttacttgggaggccaaggtgggaggattccttgagtctcggagttcgaggctatagtgagctgtctatgatcatgccactgcactccaggatagacaacagagtgagarcttgtctstaaaaaataattttaaaagaagacataaaaaaagagaacactttaaagtaagtaagaaaatgtgaaatctccactatacaaattgcctaaggacatatggacacagataatttacaaatgaagaaataaaaatggtcaataaacttatgaaaaaatgcacaacagtaatataaaaggaatataaatgaatgctgcttgagaacagttttgtgcctatgtgccacacagagacacacatatagcaggtacagatatgaatttattgttacttcttatatatttatatgtatatttcatgatataggcatgatatgaaaagataccttatttgagactgcaacaaaatagacatacttattatataccactggaggtgtgatgaggtgctgttaatttattcatacattctaggagagcagagtaccagtacagatgtttgtctattgacacgaaagctttcatcatatattcctttgtgaaaagaggttaaaatatactctatgctatcatcccaaatttggacagataatcttatatatgcatagatacaaagaaaaggacctggaagaatatacatcaaggtgctaatgttgggtagttctgaatgggtagagattattggtattctttggttttarttttacttttcagtgctctcaaacatttctgataaacaaatattgcttttgtgatgagaaaaatacttataatattaagataatatttttaaattctcagacacgtcagattgtaaagatagaaatgtgggagacaaaaacaaggtgagatttgatagtgattactattaacttcaaataaatagatgcttcagttataaattctgaagggtgcagaattgagataatgtgaatagtaagatmattagtataattaccaatatataccctccttatctcctttttttgagctctcttatatttccatatgtcttrttccttacttttgccccagtctttttccttttctcaggcttgtaaattttcataagtcttcagtggcaccacaygcatttagygtaacacctagtgctaaagaagttccacccttttttaagtgcttccttaataccaagtatttattctctaacagtgatctattgagtgtttgctcctgaccataagaagtttttaatccagtaaattaatatcacttctgtgccagtctactttgtctgtggaaccattatcaaaactgaataatgttgttaaattgctttttgtagatactaatttttttgtcagccaaatctctgagaatgcactaattattcaagccttgattatsttaattaaaattatgaaattaaaaaaactaatttttaacagggacattattatgattggaagaatttttttatatactttaagttctgggatatatgtgcagaacatgcagctttgttacataggtatacatgtgccatggtggtttgctgcactcatcaacccgtcatccacattaggtatttcctaatgctatccctccccttgccttccaccccctgacatgccccgctgtgtgatgttcccctccctgtgtccatgtgttctcattgttcagttcccacttatgagtgagaacatgcggtgtttggttttctgttcctgtgttagtttgctgagaatgatggtttccagcttcatccatgtccctgcaaaggacgtgaactcattcttttatatggctacatagtattccatggtgtatatgtgccacattttctttatccagtctaacattgatgggcatttggattggttccaagtctttgctgttgtgaacagtgctgcaataaacatacgtgtgcatgtgtctttatcatagaatgatttataatctttcaggggacctgccccaaaaatcacgtaggttcttttctattttcctaagcatcggctggcttgagaaataaagggacagagtacagaagagagaaattttaaagctgggcatccgggggagacatcacatgttggtaggatccgtgatgccccaaaagccacaaaaaccagcaagtttttrttagggattttcaaaaggggagggagtatgcaaataggtgtgggtgacagacatcaagtacttaacagggtaatagaatatcacaaggcaagtggagacagggtgagatcacaggaccacaggaccgaggcgaaattaaaattgctaatgaagtttcgggcaccattgtcattgataacatcttatyaggagacagggttttgagatcaactggtctgaccaaaatttgttaggcgggaatttcctcttcctaataagcctgagagcgctatgggagactggagtctatttcatctctgcagactcaaccataagagacaggtgtgccccgggggggccarttcagagacctacccctaggtgcgcattctctttctcagggatattccatgctgagaaaaagaattcrgtgatatttctcccattcgcttttgaaagaagagaaatatgcctctgttctgcccagctcaccaatggtcagagtttaaggttatctctcttattccctgaacaattgctgttatcctgttcttttttcaaggtgctcagatttcatattgctcaaacacacatgctgtgctgtacaatttgtgcagttaacgcaattattacagggtcctgaggtgacatacatccttcttagctgacaggattaagagattaaagcaaagataggcataggaaatcacaagggtattgattggggaagtgataagtgtccatgaaatctttacaatttgtgtttagagattgcagtaaagacaggcataagaaattayaaaagtatcaatttggggaactaataaatgtcyataaaatcttcacaatccacgttcttctgtcatggcttcagccggtccctctgtttggggtccctgacttcccgcaacaataatcctttgggtatatacccagtaatgggattgctgggtcaaatgatttttctatttctagatccttgaggagtcgccacactgtcttccatagtggttgaactaatttacactcccaccaacagtgtgtaaaagcatttctatttctccatatcctctccagcatctgttgtttcctgactttttaacaattaccattccaaaaggcatgagatgatatctcattgtggttctgattggcatttctctaatgaccagtgatgatgagctttttttyatgttttttggccacatacatgccttcttttgaaaatgtctgttcatatcctttgcccactttctgatggagtgttttggttttttcttgtaaatttaagttccttgtagattctggatattagcccattgtcagatggatagattgcaaaaatttctcccattctgtaggttgcctgttcactcagatgatagtttcctttgctgtgcagaagctctttagtttaattagatcccatttgtcaattttgcttttgttgccattgcttttggtgttttagtcatgaaatatttgcccatgcctatggcctgaatggtattcccaaggttttcttctagggtttttatagttttaggtgttatgtttaaatctttaatccatattgagttaatttttgtataagttgtaaggaaaggggtccagtttcagttttctgccagttttcccaacaccatttattaaatagggaatcctttccccgttgcttgtttttgtcaggtttgtgaaagatcatatagttgtagatgtgtggtgttatttctgaggcctctgttctgttccattggtctatatatctgttttggttccaataccatgctgtttgggttactgtagccttgtagtatagtttgaagtcaggtagcatgatgcctccagctttgtttttttttttttttgtttgcttcgtttttttgtgttttttttgcttaggattgtctgggctatatgggctcttttttggttccatatgaaatttaaagtagttttttctaattctgtgaaggaggtcagtggtagtttgatgggaataacattgaatctataaattactttgggccctatggtcagtttcatgatattgactcttcctatccatgagcatggaaggtttttccatttgtttgtgtcctctcttatttcctcgagcagtggtttgtagtttttcttgaagaggtccttcacatcccttgttaactgtattcctaggtactttattctcttagtagcaattgtgaatgggagttcactcatgatttggctctctatttgcttattattggtatataggaatgcttgtgatttttgtatattgattttgcatcctgagattttgctgaagttgcctatcagcttaaggagtttttgtgctgagacaatggggttttckaaatatacaatcatgtcgtctgcaaagagagacaatttgacttcttcttttcctattggaataccctttatttctttctcttgcctgattgccctggccagaccttccaatactatgttgaataggagtggtgagagagggcatccttgtcttgtgccrgttttgaaagggaatgcttccagcttttgtccattcagtatgatattggctgtgggtttagcataaatagctcttattattttgagatatgtttcatcaatacctagtttattgagtgtttttagcatgaagggttgttgaattttattgaaggccttttctgcatctattgagataatcatgtgrtttttgttattggttctgtttatgtgatggattacatttattgattcgcataygttgaaccagccttgcatcccagggatgaarccsacttgatcatggtggataagctttttgatgtgctgctggattcggtttgcaagtattttattgaggacttttgtgtcaatgttcgtcagagatattggcctgaaattttcttgttttgttgtgtctctgccaggttttggtatcaggatgatgctgatgtgataaaatgagttagagaggagcccttctttttctattgtttggaatagtttcagaaggaatggtaccagctcctctttctttgtacctctgttagaatacggctgtgaatccatctcgtcctgggctttttttttttttttttttttttttggttggtaggctattaattamtaccacagttttagaacttgttattggtctattcggggattcgacttcttcctagtttagtcttgggaggctgtatgtgtgcaggaatttatccatttcttctagatattctaggttatttactagtttatttgtagaggtgtttgtagtattctctgatggtagtttgtatttctgtgggatcagtggtgatctcccctttatcatttttttattgtttctatttgattcttctctcttttcttctttattagtctggctagcagtctattttgttaatcttttcaaaaaaccagctcctggattcattcatttttttaagggtttttcatgtctttatctccttcagttctgctctgatcttagttatttctcatcttctgcttgattttgaatttgtttgctcttgcttctctagttcttttaattgtgatgttagggtgtcaattttagatctttccccctttctcctgtgggcatttagtgctataaatttccctctaaatactgctttagctgtgtcccagagattctggcacattgtgtctttgttctcattggtttcaaagaacttatttatttctgccttaatttcattacttacccagtagtcgttcaggagcaggttgttcagtttccatgtagttgtgcagttttgagtgagtttattaatcttgagttctaatttgattgcactgtggtctgagagtgtgtttgttatgatttcctttcttttgcatgtgctgaagagtgttttccctctaattgtggggtcaattttagaataagtgctgtgtggtgctaagaagaatgtatactctgttgatttgggatggagagttctgtagatgtctattaggtaggcttggtccaaagctgagttcaagtcctgaatatctgtgttaattttctgtcttgttgatctgcctaatattgccagtggggtgttaaagtcttccactattattttgtgggagtctaggtctttttgtaggtctctatgaacttgctttatgaacctgggtgctcctgtattggtgcatatgtatttaggatacttagttcttcttgttgaattgatccctttaccattatgtaatagccttctttgtctcttttgatctttatttgtttaaactctgttttatcagagaccagaattgcaacctctgggkkttttttttgttttttgtttgtttgtttgtttttgttttgcttcccatttgcttkgtaaatcttcctccatccctttattttgagcctatgtgtgtctttgcatgtgagataagtctcctgaatacagcacactgatgggtattgactctttatcctgtttgccagtctgtgtctggcaaactggggcatttagcccatttacatttaaggttaatattgttgtttgaatttgctcctgtcattattatgctagctggttattttgcccattagttgatacagtttcctcataatgtcaatggtctttacattttggtttgtttttgtagtgcctgtcccggtttttcctttccatattcagtgcttccttcaggagctcttgtaaggcaggtctggtggtgacaaaatccctcagcatttgcttgtctgtaaaggattttatttctccttcacttatgaagcttatcttggctgtatatgaaattctgggttgaaaattcttttctttaagaatgttgaatgttggcccccactctcttcgggcttgcagaatttctgcagagagatccactgttagtctgatgggcttccctttgtggataacccaacccttctctctcactgcccttaaatttttttcttcatttcaacgatggtggatctgacgattatgcatcttggggttgcttttgtcgaggagtatctttgtggtgttctctgtatttcctgaatttgagtgttggcctgtcttgtgagtttggggaagttctcttggataatatcctgaagagtgttttccaacttggttccattctccccatcactttcaggtacaccaaccaaacgtcagtttggccttttcacatagtcccatatttcttggaagttttcttcattccttttcattattttttctctaatcttgtcttcaaactttatttcattaagttgatcttcaatctcagatatcctctcttctacttgattgattcagctattgatacttgtgtatgcttcatgaagttcttgtgctgtgtttttcaggtccatcaggtcatttatgttcttctctaatctggttattctagttagcaattcctctaaccttttatcaaggttcttagcttccttgcattgagttagaacatgctcctttagctcagagaagtttgttattacccaccttctgaagcctacttttgtcaattagtcaaactcattctccatccagttttattcccttgctggtgaggagttgtgatcctttggaggagaagagttattctggtttttggaattttcagcctttttgtgctggtttttgctgatcttcatggatttatctacctttggtcttccctgttggtgaccttcgcgtggggtttttgcatggttgtcctttttgttgatgttcatgctcttcctttctgtttgttagttttccttctaagagtcagtcccctcttctgcaggtctgctggagtttgctggaggtccactccagtccctgtttaccttagtgtcaccagcggaggctgcagaacagcaaagattgctgcctgttccttcctctggcagcttcccccaagaggggcacctgccagatgccagccggagctctcctgtatgaggtgtctgttgacccttgctgggaggtgtctctccgtcaggaggcacaagaatcagggacccacttgaggaggcagtctgtttcttagcagagctcaaatgctgtgctgggagatgtgctgctctcttcagagctgtcaggctggaaagtttaagtctgctgaagctgtgcgcacagctgccctttgcctcaggtgttctgtcccagggagataggagttttatctataagaccctgactggggctgctgcttttctttcagagatgccctgcccagagaggaggaatctagagaggcagtttggctatagtggctttgtggtgctgtggtgggcttcacccagtccaaacttcccrgtggctttatttacactgtgaggggaaaactgcctactcgagcctcagtaatgatggacatccctccccacaccaagctcgagtgtcccaggtctgactgctgtgctggcagcaagaatttcaagccagtggatcttagcttgctgggctccatagggatggaatctgctgagcaagaccagttggctccttagcttcagcccccttttcaggggtgtgaatggttctgtctcgctggcattctaggtgccactggggtatggaaaaaaaactcctgcagctagcttggtgtctgcccaaatgaccacccagttttgtgcttgaaacccagggctgttgtggtgtaagcacccaagggaatctcctggtctgtgggttgtgaagaccatggggaaaagtgttgtatctgagccagagtgcatagtcgctcagggcagggtccctcacagcttcccttggctaggggagggagttccctaaccccctgcgcttcctgggtgcagcgatgccccaccctgcttctccttgccctctgtgggctgtacccactgtctaaccyatcccaatgagatgaaccgggtacctcaattggaaatgcagaaatcacccaccttctgcattggtcttgctgggagctgcagaccggagctgttcctatttggtcatctyacctgggaatcgataattttttaactttctgatttacttcagaatctctatcttgttcataaatctttgtaatcgactacattgtagtcagacttctttatggtgtatactttaattattaacatgggaaaggagggagaaaagagaaggggaaacgtarcatttttttctcaattgtgtaatttttctaattcacattttagaagtctaaatatattctagacatggagaaagtattttaattctggcagccattagtagcacattggcacttcaacttcagctgctcagaagcctgccagtaattgtttaaagtttttatgccttaaggaacagctgcagtttacagcggcacttgatttcagattttacatttcatctgaaatatatttatatgatataacttgttaactttcagctagctggaaatccttaactcttcttatgcaatacattataagtaagatatattggccaaaccaagacaatttcacaacgacagagggtgccattactaattacaacaggacaacaagtgtgaagaactgggctataatttctgttgcctgtaagtaaactcctcttcagattattcttaacatctgaaggtttaaccttcttaacatcaccctctcagtggcttaaaacaattactgttttattaatgtttatgattctgttggctggcagtttggactggaatggctaggaaggctaggatgcctggcacagctggacctttctccacatcagttctcattcttcagaaattggtcacattccacatayaaaatatgcttatcaccatcctaggatttcaaaagtttcatcccactaatagcaacaggtccaaagttcaagaaatygtcatctaaatctgatctagatgcaaatgaggtttcttgggttttgctccttggtggaactcatttctgtgttcccacatatcaaacatacaacggtgaggcagggacagaataaccaccatcaacattctcattcatagctggaggagtaggaatcatatggctctaaatggtacatagcaattctgaaatctaactgggcacatgttgccaggccacctacatggggaagagaagggaatattctttgaatagggcccattaagtttcctcagggtggttctgtagttcattgttcttttttgggcttttggttttgccttctgggttcttggctgtgtcctctgagatatccttcctctttcataagaaatgatctgtattagcagctgaataactttctcagtctgcttcctgactacagaaaattggggacccagagaattattttcatttgaagtgtctctgtcttaataatccaagatagtgccatacccttaaaaactctttaggccttctctgttatcagattatactctactcaatttgacagaggctccattcacaattctttcaaaataggcctccttcctatgttggctggcatgtcagagtgatgcgggaccagttccttttttgttttttttcctatctttttattttttatttttattttattttattttttttattattatactttaagttttagggtacatgtgcacattgtgcaggttagttacatacatatacatgtgccatgctggtgcgctgcacccactaactcgtcatctagcattaggtatatctcccaatgctatccctcccccctcccctgaccccacaacagtccccagagtgtgatgttccccttcctgtgtccatgtgttctcattgttcagttcccacctatgagtgagaacatgcggtgtttggttttttgttcttgcaatagtttactgagaatgatgatttccaatttcatccatgtccctacaaaggacatgaactcatcattttttatggctgcatagtattccatggtgtatatgtgccacattttcttaatccagtctatcattgttggacatttgggttggttccaagtctttgctattgtgaataatgccgcaataaacatacgtgtgcatgtgtctttatagcagcatgatttatagtcctttggttatatacccagtaatgggatggctgggtcaaatggtatttctagttctagatccctgaggaatcgccacactgacttccacaatggttgaacgagtttacagtcccaccaacagtgtaaaagtgttcctatttctccacatcctctccagcacctgttgtttcctgactttttaatgattgccattctaactggtgtgagatggtatctcaytgtggttttgatttgcatttctctgatggccagtgatgatgagcattttttcatgtgttttttggctgcataaatgtcttcttttgagaagtgtctgttcatatccttcgcccactttttgatggggttgtttgtttttttcttgtaaatttgtttgagttcattgtagattctggatattagccctttgtcagatgagtaggttgcaaaaattttctcccattttgtaggttgcctgttcactctgttggtagtttcttttgctgtgcagaagctctttagtttaattagatcccatttgtcaattttgtcttttgttgccattgcttttggtgttttagacatgaagtccttgcccatgcctatgtcctgaatggtaatgcctaggttttcttctagggtttttatggttttaggtctaatgtttaagtctttaatccatcttgaattgatttttgtataaggtgtaaggaagggatccagtttcagctttctacatatggctagccagttttcccagcaccatttatttaatagggaatcctttccccatttcttgtttttctcaggtttgtcaaagatcagatagttgtagatatgtggcgttatttctgagggctctgttctgttccgttgatctatatctctgttttggtaccagtaccatgctgttttggttactgtagccttgtagtatagtttgaagtcaggtagtgtgatgcctccagctttgttcttttggcttaggattgacttggcagtgcgggctcttttttggttccatatgaactttaaagtagttttttccaattgtgtgaagaaaggcattggtagcttgatggggatggcattgaatctgtaaattacctttggcagtatggccattttcacgatattgattcttcctacccatgagcaagggcaattaggcaggagaaggaaataaagggtattcaattaggaaaagaggaagtcaaattgtccctgtttgcagacgacatgattgtrtatctagaaaaccccattgtctcagcccaaaatctccttaagctgataagcaacttcagcaaagtctcaggatacaaaatcaatgtgcaaaaatcacaagcattcctatacaccaacaacagacaaacagagagccaaatcatgagtgaactcccattcacaattgcttcaaagagaataaaatacctaggaatccaacttacaagggatgtgaaggacctcttcaaggagaactacaaaccactgctcaaggaaataaaagaggatacaaacaaatggaagaccagttccttttgtctagtcaaggtgatctagtagtcttcactttaaatcattcagagatttcttaaaaagttattaaaaccacacacttaatttcatgtttgaagaccttattttgctatgcacatcttttaccagcaagtcctgtgtcctctatattccttcaattttgctcacaaactgaacattttcttctctagctcttctctgttttagactttattatatagccacaagaagccaagtcagcattctgcctggaaatctcattagccagattcacaaattcattatttcaattttctctattctaggttactgaaggtgtcactttggtcttttttttttatttttattttttgcaggttattcccaatttaagtctttttgagtttctttcagcaatattttgtagtttccagtgtgcaggtcttacacatattttcttaaatatstccttatgaattttgcattttgggctggtattataaatggagttgtatattttatttcatttttaactgtccattgcaagtgtatagaggtaaaattgatttgtgtatatttactttataaactgtgattgtgttaaattcatgtatttttttctactgggattttttttggtagatttcttagtattttctatgtacacaattatatgtgtacaaataaaaaagttttgcttctttttttttcaatctatatttctttctttttcttgccttattgtaatagctagggtctccagtatagtgtagagtagaagtgatgaaggtaagtattcttgtcttgttccctatcgtaagtgaagagcactcagtctttcactgctaaatatgctatcagctgtgggattttcatagatgtcctttattgcgttaaggaagttcctttctgcttctagtttactgagagcttttgttatgaatgggtatgttatatttaaattatatctcaatttcaaaactgatttaataaaagtgatattacatattatatataccaaaatttacacagggcaacattctcagatatatcagtttaagaaacaacttaaactgtgtaaagttaaaaaatttaagaaaacactagtaaaggctaaaaaatttattttaaagtctgttaactatcatagtaaaggtaaagtaaaaccattgtttgataattttgctttcggaagtggaaaattaagaaaggaattgctatctttccattccttaarctaatatttcaaaactaaatgttatttctctgtgtgattacctttgtctgtaaaatctgaattgcacttttctaattaacacaaatgaaatattttatttttttcttttcctcagaataatctagaatgtttttaacgtttaggaattatttttctttcttatttatttatttatctatttttattgcagcagagtctccttctgttgcccaggctggagtgcagtggtgcgatcttggttcactgcaacctccacctcccaggttcaagtgattcttctgcttcaggctcccaaatagctgggactacagatgcacaccaccacacccagctaatttttgttcttttgtagagacagggtttcactgttgttacccaggatggtcttgatctcctgacctcgtgatctgcctgcctcagcctcccaaagtgttgagattacaggcgtgagccactgctcctgaccagaaattatttttcttatttggtgtataaatactacaggtatattctatgtaacattaagtaattaccctgtaggttaattctgaatcagtatggtaagattttatttctatttttgtcccttttatacagatgaagaaactgaggctcaataaatgatttggttatagttatttctatttttatggtaactttttttaataggagttacttaaagatccactctacattggactacggcagagaagagtaagaggttctgaatatgatgattttttggacgaattcatggaggcagtttcttccaagtatgtatctttatttaacctatattttagtcagtaacaataacataacagactattaaaaaatccaagatttatgcaatatggtttaataattagaagtaatttgaatgaaaaatgcatatatcctatctatttcctcataactgttaatggacaaatgataatatcatgtgtctatccagaatagattatttctgttgctgtccctgaatatacttttttttttacaagaacctttagaacctgtggctgttgaaatgcatgattatggtaaaggaggcagtgaccagtgactaaattacctgcaaacctttttacatttatcgacaatctgtactttctggttgatgataaaatctgatcttcagtcatctttgtagctggtatttgactctcttatggtcaaccmccagccacaaaggaaaagcagaaaaagaggtggggattgagcatgagttggtacagtccacaggggtccagaatggagcaaggacagggcattccatcatgatccatgcatctctgattaaatctataatatttgattaaaatgcagtgctatgtaggttgagagtctcttatccaaatcacctgagaccattagtgtttatgcagattttgaaatatttgcatatatatataatgagatggtacccatatctacacaagaaatttatttatgtttcatataaatcatatacacatagcctaaaggtaattttatgcaaaagtttaaataattttgtgtgtaaaacaaagtttatgtacatcgaaccatcagaggcaaagatgtcactgtctcagctacccatgtggacaatgtatggttgtttggcatcaccattatccctgattctgaattttatatgctagcaataagcaatcattttttgcacttatcatgcataaatccttaacagtataaaacataatataccattaatgcaatgaaaaaaataatgtgttcagggtaactggtggcatcatatcagcgctcaaaatgtttcagattttggagcattttggattttggatttttggattagagatgctcaacctgtatctttttaagttagcatttgattgtgggccagatgctattgtaaatttttccattttttttcagaaaagagactcccaccataatttagtaatatattctaagagaattttatcacactgacagtcatcccttggttactgtgtagccacagaaaccacatactatttaaaaacacatatgttgccttggtttttcttagaaataaagtcatcactagaattaactctaactagagatgcacttctggtttctttttattataatgtttatttttaagaagttttatccaacagcagaaagtgctttcatcagcttgcacaacatttagaatgcattgaacctctcattactcaaggttttaatgctgggtacatttgccaattagtatggactacattttagaaccacatgcttgatttatttattgtaattatttgaactatacttatttatagaaatagttgagaaactctgcaktttgagatcacataatacagttaatttctaatagttttttatacttaaagtgccttatcttgtgaaacgctcatgtaaggttttgaaattatccaacttcctcagtagcaacattaatcaagagattgtatagataataccgtaaggctatataagaggaaaggaaatgcagtctggaataaagtctatctaaataagacaactttaacaaacagacgctgctaacaagttaggtgcacttaaacgctgatgaaataaggggagaaggagtttttattattgggaatcaatgaaaagttttgggaaaaaatgagataygaacaaattttgaatattttatatcaatccagaatgaagaaaactgttttttttttaaatgtggaattgaggagttacctwagttctttgtaaggaaacagggattgacaagtgtaaacaataattttaaatgtagatagcacctatgaatcagggtttgtacttccagagaaaaatgccaaagactaaaaaaatactttctgtcataacattgtttcaggaaaatgatctagatgtgaaacctaacactacccaattaaattgggaagttgtagtgaagataaacccaagattattttaaaaagaaacataacttaaattcaaagtgggaaatgattgttacaggttacctagacatcagactctgagatagagtttattaaggagtacccttgggccaggcacagtggctcacacctttaatcccagcactttggaaggccgaggcaagcagatcacttgaggccaggatttggagaccagcctggccagcatggcgaaaccctgtctctrctaaaaaatacaaaaacattagccaggcatggtggcgtatgcctgtaatcccagctactcagaggctgagagacgagaattgcctgaacctgggaggcggaggttgcagttagccaagatcacaccaccccgcactccagcctgggcaacagagcaagactctttcttaaaaaaattaaaaaaaaaggagtacccattgggataaacctctttggaggagaggacatagtacagaggttatactgcaacatggacccaccaatagccatggataacttagttgggattacccctgcctgctgtttagatacttacatggacactaatttctgcccatcaacctccctctctttctccttcaatgcccatcaacctccccctctttctccatcaatgctatgttggttttttttatttgccatcttggcaggtttagggtagagcagcttcaaattcttcctctcggtcttctccacaatgagagctcttcactcacaggctgaggatttgatatgggtcttgtggcacttaccaagtctgtcttttctgattacacatctagggtctgaggaatcaccaccaggtgggtctgtggtgacagtggacctattatgagccagaacttggctggggctccatttattactggctcctgtatgcctctactctaacagggagaggggaacagtgttttgatgcttcaagtctccaggtatcagtgtcaactgtgtgctcattagttctcagacatttgaatagtccttctccagtgcatagttacttgggtaaagggctgtagttccctgtggataaagattagggggattattaccctgtattcttgtcatggtgttataaggttctttcttctgggaactaggcctcttcttcagtttatgggttctgrgtctaaaaattaactcaggttcggaagctgagcaagagattgtgacttcattggggcagctacactcaactttgtggtcattcatctttggtttcttttgatagtaaatattgagtagtagctttgttagctctccgttttgcctctagggatgcaagattccgttaattatctcaaaaacattttgtgggttagccacacacaccccacttttgccactcttatgataattgtgtccatctggcttctgattgttaagcattctcacctggtcttagcatccttattgctatcagtcaggctggttatatatcatccttttcttctgtcactcctgaccttcaggggagaaccaccactgaaatttttagtaatgttgatgtcttctcattggcatattccttatggctttgggaaatggtgtgttttctgggccttcctgtggaatatgttcatyttatggattttctggcttttacatgtgtctatataccagactgcccagttctctgagcctcgcaatcccctcttctgtcatttgccacagcattcctggcatttcagtcatattagtatcagccattaatttgtccatgtttctaggaaccatcctagcaatgagtttgcaccatcttctgggattcttgccacatgttaaatcctgtatctcaggagagtgcctgcaaatcagtaagctctcccttttcctaggttccagcccttttaatcaaacaccctcagaatttaattctacatgtattctcctggctaatacaaatactggtcttgtggctcctttggggtaaagtctctttcttcctttatcaactctagtatgtcccagataggttatattgtgataaaaccttagttattggcccagggatctggaggggaggcagaggtagatggtagttaaggggcacatgttaacttatgggggtgaaatctctacccttatcatcccaagaaagaaggggaaggccactttgtgagatgcgaaagctctgggggaatctggggattcaggatttcgacagacatcaaaccagacatcccattccatgtggcaaattcccattcttttgtaactaggattctgacttagcagatctgctttccttgagtttgggagcttgaatattctgatgattgagccctgtttctggacataagctttctctacccagcagctacagaagctgagaacatctttgtatctacaaaggagggcctctggctttcytgttggcaattactttctctgagctttttgtgttttttttcccattgtccttatagttactctacttctctcatatttctcaaacatctgaaatatcattctagctaagatgttcccttcccaacatctcaactcacctctggtgagttttaatagttggactgctaccttggaccgggcrtgtgctccatcttctaccagtggtggggtcctcattaccactgcagcagtgagttaaccagtgccaaagccccatcttattaccagctttctcagactattccaagattaggttacctgggaggcacattcggaaatgaagtttagtgtttaagaggtttgtaagaagtgcccttgagattaaactctgtggaagaaataacaaaggaagcaggaatgggcagarggagaagttgagctgcctgcaggcaccatgacagctttccctgatcccgtggggaactctgaagctacagtggcttttcagagttgttaccagttgggctgagatggtcaaggctttatattcctgcatcaattagtcactggatgtggatgtgggtcactctgggaaagagcataggtcgtggtctgtggtgaaacgactctttgcagctgaggcaacccccaggacaacagtgggggatccgaggggcatatcatgatattcagcataattwytcaattcagaaagtattgattaattagcttggatattaattagcatctctagtggagtagcacaaatccatttcctagtactggcctgttcaacaaatttatcaattgggcctagtaattctacatctgagtatataggttaagaaaatactttaaaataagaatataggtaaaggaaaaatttgaagcccaacatacagaatttcttctctttgcttccaggatagcacactccccttgctttcctcctgcctcactgattgttccttcgtagttttcctcagcttattccttttcatcttccccactccctgccagctgtaaacattagaatgcttcggggcttgaagcttgaaacttttctttttgctattaatctccacttccttggtaatctcatcaagtcatacatctttatatttgtgactcccaaatctttatctctaacctgtacctcttctctgaacttcagaatcacgtggtaaaactccacttcacatttatactcagatctgtaatagacatagcatatgtaacatgtccagacttggactcccaatctcccactgactcccagccctgctcctgttgcagcctttcccatctcagtaaatgacaaccccattcttcctcttcctgtgactaaaaatgttggaattaccactttgtacccaggccacctacaaaacttagtagctttaactacagaatgtatccagaatctaaccttttctcattgtcagtatcattacttctcttaactgaacctcttttacctggattattgtaacaattttttaactgttaatgaaattctgcttcctcctttattgccctttagcctgaaaattctgtttcactgcttcctcctttattgccctttagtctgtcctcaacacaaaagctgtgatggttctgaggtaatttctctgctcaaaaccccaggaaagcttatcattttattcagaataaaaacaaattcttgcaatagtgtaaaaggccctgagacttctggcttcctgttacctttctcacattatctcctcctagtttccccccttgcccactttgttgtggcctgtttgctatttttctaattcaaactaggtcaaagcttgtctttctgtctacttgacatcctcaccatacctgcctctgcccagttttccacatgactagctctctcacctcctttaacatttcctcaaatatccttttctcaataaggccttctttgatcaacctatgtaaaattttaccctcagcccactttcctcttttcatacatttataaatatctgacatatttgatatttaattatttatgttctgtctctattcatatactgttaagttctatgaaagcagggagttttctttttcctccactgccatatccctagtttctaaaaagttatctagtatgtgataagtactcaataaatatttgttaaatgatggtaaaatttgatttgttttgtttatatagcttaaaatgaaaagtatgaatggaagaacttattagaatttcttttcatgtgatttaatttcaggaaatattaaagctcttaaatatgtgtgtttgtttttgtagttgtactccttatagtatccttttttttttttttacagaatcagttgcccctgaaaattaatagaaatatagagacagcttcagctttactgcctaaaattctctatattagaatttcattaatgattattaactaaatgagaacaaaagctttacctcaagtaagcttttaagaactaatattaaattttttaaatggaataaatagctaatattcaacaaagactatatttaaaaattgtgttcttttttattttaaatgacaaaaattaaaagttattgggaagcactaggaatggccacaaacgtrgttattatactacaccctccttcaaccttggctgccatcacaaattgttctgtgatctgtcacataaagtttaagagaaataatcttagtctgaagccatatcatctgccatttgctgccaggtgtgataatgaggttttcatacaattatgctttttttgctgagtagtgttgaacaaaagtcttggctgtgtgcctgaaacagaccagactagtcagagatactatcaagttggtaatagtccttgagggtcacttatcagatttcaagatatatagcctgtgaattatcatggccagatatactaaatttatttctttaattattaatatcatcttttctaaagaaggcatcaaatatgtaaattaatatgtgctcttcacccttattcagggttgcagttagatagagtttcgtccaactctacactaaatccctggcttcccaacagggaagggtctttttctactgccctccttctttctccatttcttctgcagttaatttcatggctaactttctgtactacctttttctacctgttctaatcattgctttttatgcctgatcattttttagatgacggggatatatttataacttacgtgattttatctataagtctgtgaggctctttagattccacctgtcactttgatcagcatgagttactttgcttttcataagaaatttaatgaaagcatatgattatatgggattccacctgctattcttccctgtggacccagggtgaaataaccaggtgaaaaaaataaaatgcaaagaatgtctgtcaatgtgagaaaaatcagcagtcatgttactagggaacatgactcaaatcaggtttctgactcagaatttttttccattttcccatccaaagaaagatcagattcacaattaactatagccatattttccttaaaatcccaactatttctatttataccattctctctacttttttttttcaagtgaacaaaaatggtgggtcatgaaagaattagaaatctaaaggtatgcattatgtgtatgtatgtgtaaaaacatgtgcacttatattccataatggatttaaagtggatgtatacttcagtattttgatatttgatttgcatccctgtcagtatcccagtccaaccttggagaagccagaactttagcaagtcaagtttactgtttcattctgaacatggtttacaactcttccttttagatgctttttgtgcctaattccattttattctaatcaattgcattaattccaccattcctttaatatggatataaatgttttacactgtttttgttctggttacatgagtcttatgcatgcattatttcatttaaccctattttccttactagaatataagctgtgttagaaaaagtactgtattatcaagggattgcttttttctgactatcccatattatattttaccctacagtaggcataaaataactgctgttgaaagcattatttaagcattgagtctaatgttcttgaaactacagtggcatatatctgaagtaaaggtagctccccaacataaactagagaaagacacagttttccaaataaagagtctctgcctatagtaaactaaagatttgagttttaattatatggatacatttatgttttaggttgtaacttttatctaaagaaaagaaacattttaataaattcctgttgtatccattgttacctatctttttctcttagaatttgtaaacattgagatttatatagagaaagcccttaatattttatctgaatttattaaagctaaattattagattattaaagataatcattacgatttgaaaattagattattaaagataatcattatgatttcaaaataatctgtataccatgtttcttttctgtatctctctccttttttattctsttaactttaatttagcaagattaagcccagtttcttaaaagcttgtgtttcttattgttttccatctatagtcccacatataataaattagaaaataagaatgatacatccgctcattggtaacataaaaaaagaagattcaatatgatttcctgagttatagatcaacctaaaaacaaaacaaaaaacactatcaatagcaatatcttgtaggttaaaataaggtcttttgtttataatattttttcttgccatccttaatttacgtgtgtttatagacaaaggtaaagcaggtatgaacatgtgaaagcaatttacttttccttttgaaagaccatctatgtggctggtttggggaaatcttataacaatattagaatgaagtacatatattttaattattagagattaaagatgcggaaaggaaaagaataattaaagaggcaaacttagaaaattgatttgggggtaaggtcagaaattaagggtacttttttggttctgtaggaaattgaaaccctaattgcaactaatatcgtatctggacctaacattagtattgacagtcagtgcatttcagttaatgaaagccaaagtccttataatggccctcaagccctgatgtggcccccttcctgacctctatgatgtgctcactctcctgcacccacattctccacgctgcctgtactgtcattgaactctcaaggcatgttccttagaatattttcacttgcttttccctctgtctaaaatattcttctcccagaaatgtgtttggttaaaaacttaatctttttcatatattagctcaaatcttaaccttcttttgaggtttaccctgactaccctatgtaatactgaaacctgtcccatcttctccccaccctggctctcctgatcacccttgttttgctctacttttccttttttaaaataccacttattaccattattcatttattatgtttatgcttattgtgtgtttcttccactagaagatatgctgtcaaggacagggatctactttgttcattttatgaacaagttccttcctgtatcaatgcttggcacagagtagataaacaataaatatttgttgaactcaattgagatacttaaagggaggccacacaagacaatgtgagtggttttgcagaaatctttcaccattactagaaaattatttcatttaaacatgtcttatttttattgaattactagcatcatttttatatggaaaggagagccatcagcacatggtaagtaatgaatacccgattgtctcaggtcccagaagcagattatccctcaaggaattagaggttagttctaaagttagcatgttacatagagtaatctaacgacatttaatgcaagttggtagtaaatattgtttgagctgacatatgtcaaagtctcattatttaaagctacaacaaaatttgtataaaatttgccataatcaaaatgtaagaacaaaataatcattcctgttgccaagatgatcacattctggctaactcaattttccatgatttgactgttacttttatttcactaactataaagcaagccagaattaacacagtgtgccaygttttttattttaccaatatgtagtgattaattctcaagagtgtttttctttgtggtatccacagatggtgacccacttttttcatatcctcatgaaaataatatcatattctgtatatacatggtaaaaatgccacatttgtgaatagaaaacaaaataagctattgttaaagttttgttgaccaatattgttagattgagatgtgtcgaaatttagatggaaagaaaggctcatcctactgagcacaggttggaatggtgctgcctgggacaggtttgcagtccatttcttcagaggtgtcatagaatgacatttcttaattcagttaatttaccatggtttggagcctgactctcagctcaggaagtttagaaatctaattttgacagcttgcaaagctcatatctcaggtacatgtgataagtaaaacttgcactttggagtcaatcctcagctccaccaactactacatttgtaaccttggaaaaattacttaccttcctcaaggcttaattttcttgcctgtaaattggggtaaaatgctaatagtaccttcagtagtaccttcagacagttgttatgatgattgagagaaaacatataaaacaaattacttttatcaagtgctataaatagtaactataatttttatttttcaggaaggattactaggaccataatttagttaaaagatgtaggctggcaaatttggcttaatattaaatagagcatttaatagttggaattgtccccaaagaaaataatgtatataaaagtacttgcacataaaaattactcagaggttgttattccttattgtttctgttgttaatattatttgtgaactctccatcactctgagaacatggacagatgtgcttaaagatataaagatttctacttttatgtgagatgatggattagaattaaatgtttctaaagtgttccaactttaggattctatgaaagtggtaaaaaaaaatcgtattttgtttcaacattcaggactggttgtttcataaaattcagtgattcagccatgcttgtgatcattatgagtcagttgaaattgatcatcacaatatatttgacccagaggaataaacttctcattcaacattgtaaattattttgttttgcataacaaaacaactttaataaacttcagtaagctttagctttcccttgctacccaaagtttatttcataaagagctcaagagacaattggcaagttaaataattcaagagaaaaaatgttcacaagaagtttttatttgctttgcattctattccctatgctacatattaattgtacagttagcttcaaagtaagtttgtagtaaaaattactttcacaataaaaaaggtacatagatacaagcaactagcaaattaacttcgcaaagaataagatgtgggtttacataagccatttatgccagttaactagaccagttctcaactctctctttttttgaaacatctgtatcagtatcatctgattgtatcctaaagcagatatggaaataatttattattcttgggtctcttctgtgaccccattattgtcctgtgcatttatctcaagatcagattcattattaaatctatccagacaattcctctatcatgtccttgatccatttctataaccataacccagtttctataatcataacccaacttcaccattttatatctttacaccatctcggtaacttctgattttctttaggatcatattaataagtattcaggaacttacctttacccygctattgactgttttcacctacatataaatccctttgtgatctggcccatrcasttcaycttcctgtctgccatcctccacccctccgtgtatcctttacaccattgtataaataaatagttttagttggctgcacatgtcattgttctgtcacacttcttctctgtataaactgctccttcttcccccagtgcttttgcttatttaattcatgcttatctttcataactcaggttaaatatctagactggattagagaagttttctgtatagtatcctagcatggatacaccaaaatagcatgtatcacactgtattgtaattatatgtatttatttgacttagcattaagtcatcaagatattagaggtcagggcctcattcttttctctcttcctttataatatatgttgttactgtgatacttctttttaataactttaattttaagttcaggagtacatgtgcaggtttgttacataggtgaccttgtatgatgggggtttgttgtacagattatttcatcacccaggaactaagcatagtactcgttagttattttttttttgctcttctccctcctcccaacctcctactctaagtaagctgcagtgtctgttgttcccttctttgtgttcacatgttcttattatttagstttcacttataagtgagaacatgtggtaatttgttttctgttcttgcrttagtttgctaaggataatggcctccagctccatccaagttcctacaaaggacataatctcattcttttttatggctgcatagtatttcatggtgcttatgtaccacattttctttatccagtcttctattgatgggcatttaggttgattccatatctttgctattttgaatagtgctggagtgaacaacgtgtgcatgtgcatgtgtctttatggtacattgatttayattcttttgggtacatacacagtaatgggattgctgggttgaatggtagttatgtttttagctctatgaggaatctgcacactgctttccacaaagcatgaactaatttacactcccaccagcagtgtataagtgtttcctttgctctgaaagtacaccaggatctgtgttttttgatgtttaaataatagccattctgactggtgtgagatggttatctcattatggttttgacttacatttctctaatgatcagtgatattgaacttttttcatatgtttgttggctgcatatatatcttcttctgaaaaatatttgttggctgagcacagtggctcgtgcctgtaatcccagcactttgggaggccgaggtgggtggatcaccagaggtcaggagttcaagaccagcctggtcaacatggtgaaaccccatgtctactaaaaatacaaaaattagccaggcatgatggtgggtgcctgtaatcccagctattcgggaggctgaggcaggagaatcgcttgaactcaggaggcagaagttgcagtgagccaagattgtgccactgcactctagtctgggcgactgagcacaactccatctcaagaaagaaagaaagaaagagagagagagagagagagagagaaagaaagaaagaaggaaagaaaggagggagggacggagggaaggaaggaaggggaaagaaagaaagagaaaggaagcaagggaggacatttgttttcctttgcctactttttttttattattatactttaagttctagggtacatgtgcacaacgtgcaggtttgttacatgtgtatacatgtaccatgttggtgtgctgcacccaytgactcgtcatttacattaggtatatctcctaatgctatccctccccactccccccatcccatggcaggccctggtgtgtgatgttccccttcctgtgtccaagtgttcttattgttcaattcctacctatgaktgagaacacgcagtgtttggttttctgtccttgcgatagtttgatgagaatgatggtttccagcttcatccatgtctctacaaaggaygtgaactcatcttttttatcactgcatagtattccatggtgtatatgtaccatattttcttaatccagtctaccattgatggacatttgggttggttccaagtctttgctattgtgaatagtgccgcaataaacatacgtgtgcttgtgtctttatagcagcatgatttgcaatcctttggatatgtacccagtaatgggatggctgggtcaaatggtatttctagttctagatcctgcacaactccatctcaaaaaaaaaaaaaaaaaaaaaaagaaagaaagaaaggaaaataaaagaaaaatatttgttgatgtcctttgcctactttttaatggggctgttttttgtttgtagatttaagttctctatagataatggatgttagaccttgtcagatgcatagtttacaaatattttctcccattgtgtaggttctttgtttactttgtttatagtttcttttgctgtggagaagctctttagtttagttagatcctatttataaatttttgcttttgttgtgattgcttttggcatctttgtcatgaaatctttgccagatcctatgttcagaatgatatttcctaggttattttccagggtttttatggttttgggttttatatttaagtctttattaagatgattgttgtatatggtgtaaagaaggagtctagcttcaatctgtatatggctagccagttatcccagcaccatttattgaatagggagtcctctccccattgcttgtttttgttagctttattgaagattagatggctgcctgataccaaaacctggcagaaaaccaacagaaaaagaaaacttcaggccagtatccctgatgaacattgatgcgaaaatccttgataaaatattggcaaaccgaatccagcagcacgtcaaaaagcttatccaccgcattcaagtcggtttcatccctgggatgcaaggctggttcaacatacacaaatcaattaatgaaatccatcacataaacagaactaaagacaaaaaccgtgtgattatcttaatagaagcagaacaggccttcgataagatttgatatcccttcatgttaaaaactctcaataaactaggtattgatgtcacatatctcaaaataataagagccatttatgacagacccacagtgcatatcatactgaatgggcaaaaactggaagcattacccttgaaaactggcacaagtcaaggatgccctctctcaccactcttattcaacttagtattgaaagttctggccagggcaatcaggcaagagaaaaaaataaagagtattcaaatagaaggagagaaagtcaaattatctctgcttgcaaacaacgtaatcctatacctagaaaaccccatggtctcagcccaaaagctccttaagctgataaacaacttcagcaaagtcttaggatacaaaatcagtgtgcaaaattcacaagcattcctatacaccaaaaatagacgaatgccaaatcatgaatgaactcccatttgcaactgctataaagagaataaaatatctaggaatacagctagcaaggraagcgaaggacctcttcaggaagaactacaaaccactgctcaaggcagtaagagatgacacaaacaaatggaaaaccttccatgctcatggataggaagaatcaatattgtgaaaatggtcatactgcccaaagtaatttgtagatttataaattcaatgctatttccattaaactaccattgacattcttcacagaactagaaaaagctactttaaaattcgtgtgaaaccaaaaaagagcccgaatagccaagaaaatactaagcaaaaagaacaaagctggaggcatcacactaccctacttcaaactatacacaaggctacagtaaccaaaacagcatagtactggtaaaaaaaaaaaaaaaaaaaaaaaaaaaaaaaaaaaaacagacacatagactaatggaacagcatagagatctcagaaataagaccacacatctccaaccrtctgatcttcaaaaagcctgacaaaaccaagcaatggggaaaggattccctatttaataaatagttctgggaaaactggctagccatatgcagaaaactgaaactggaccccttccttacacattatacaaaaattaactcaagatggattaaagtcttaaatgtaaaacacaaagctataaaaaccctagaagaaaatctaggtaataccattcaagacataggcatggacaaagatttcatgacagaaacatgaaaagcaattgcaacaaaagcaaaaattgacaaatggaatctaattaaactaaaaagcttctgcacagcaaaagaaactatcatcagagtaaacagacagcctacagaatgggagaaaatttttgcaatctatccatctgagaaagrtctaatatccaacatcttcaaggaacttaaacaaatttacaataaaaaaaaacacacagccccatcaaaaagtgggcaaaggacatgaaccaacacttctcaaaagaagacatttatgtggccaacaaacatatgaaaaaaagctcaacatcactgattgttagagaaacgcaaatcaaaaccacaatgagataccatctcatgcctgtcagaatggtgattattaaaaagtcaagaaacaacagatgctggtgaggctgtggagaaataggaactcttttacactattggtgggaatgtaaactagttcaatcattgtggaagacagtgtgatgattcctcaaagatatagaaccagaaaaaccatttgacccaacaatcccattactgggtttatacccaaaacaatataaatcattctattataaagatacatgcaagcgtatgttcattgcagcactattcacaatagcaaaggtagtgaatcaacccaaatgtccatcaatgatagactggataaagaaaatgtggtacatacacaccatggaatactatgcagccataaaaaggaatgagatcatgtcctttgcagggacatggatgaagctggaagccattatcctcagcaaacttacacaggaactcataagtgggaggtgaacaatgagaacacatggacacagggaggggaagaacacacactggggcctgtcgggtgtcggggcagggagagcatcagggtaaatagctaatgcatgcggggcttaatacttaggtgatgggttgataggtgtagcaaaccaccatggcaaacgtttacctatgtaacaaacctgcacatccctcacatgtatcctggaacttaaataatatttaaaaaaaaagaagattagatggtcgtaagtgctcagccttatttctggactctctacactgttccattagtctctttgcttaggattgccttggctattcaggttttttcgtggttccatatgaactttacaatagccttttctagttctgtggagaatgtaattgatagtttgattggaataacatttaatttctaaattgctttgggcagtacggccattttaatgatattgattcttcctcttcatgggcatggaatgtttttctatttgtttgtgttgtctctgatttccttccgcagtgttttgtagttgtcagtatagaggtctttcaactctctggttagctgtattgctaggtttttttttattcattttatggcaattgtgaatgggattgagttcctgatttggctttcagcttggctgctgttggtgtatttttatgtgcaggtacttttacatcccttgggtagcaaggagaatctaaagtttattgaagtttattaatgttattttcttatggaaaagaaaatcatttaaaatgttgaatgagaagtttattcctctgagttaaatacgttgtgatgatcaatttcaactgattcataatgatcacaggtatcactgaatcactgaattttatgatacaaccagtcctgaatgttgaaacaaaatacaattttttagcactttaatagaaccttgaagttggaacaccctaaagatgtttaatacaggtgatttttgtacattgattttgtatcctgaaacttggctgaagttgtttatcaaatgaaggagcttttggactgagaaaatggtgtttactacatgtagaatcatgtcatctgcaaacagggacagtctgacttcctttcttcctatttggatgcctttatttctttctcttgcctgattgctgtggacaagacttccaatactgtgtttaataggagtagtgagagagggcatccttgtcttgtgccagttttcaaggagaatgctcccagcttttacccattcagcatgatgttggctgttggtttgtcatagatggctcttattattttgaggtatgttccttcaatacatagtttattgagcatttttaacagaaagggatgttgaattttatcgatagccttttctgcatctattgagataatcatgtgttttatctttagttctgtttatgtgatgaatcacatttattgatgtgtgcatgttgaaccaactttgcatcacagggatgaagcctacttgatcgtagtggagtaactttttgatgtgctgctggattcagtttgcaagtcttttttttctttttttgaggatttttgcttcagtgctaatcagggatattgatctgaagtttttgttgttgttgtgtctctgccagcttttggtatcaggatgatgctggcatcatagaatgaggagragactctcctcaaatttttggaatagttccagtagaaatagtaccagctcttctttgtacatttgatagaatttatctgtgaatctttcagttcctgggcttttttgggggtgataggctatttattactgatttaattttggcgctcattattggtctgttcaggggttcagtttcttcctgatttagtcttgggagagtttatatgtccaggaatttatccatctcttcaaagttttctagtttgggtacataaaggtgttcataatagtctctggtggttatttgtgtttctgtgggatcagtgttaacatcccctttgttgcgtctaattgtgtttatttggatcttacctcttttcttctttattaatctagatagcagcctatcttatkaattttttcaaagaaccactcctggatttgttaaacttttaaatagtttttcatgtcttatctccttcagttcagctctgattttggttatttcttgtcttctgctagctttggggttggtttgctgaggctggagaattgcttgaacccaggaggcagaggttgcagtgatctgagattgcgccattgcactccagcctgggcgacaagagtgaaacttcatctcaaagaaaaaaaaaatagatttattgagttggatttcaatgttcttccaactttcaatgatcttcattcctatccatattctgaattttatttctgtcatttcagtcatctcatcctggttaagaatccttgctggaaaactctgtggtcatttggaagacagaagatactctggccatttgagttgctcaagttcttgctctggttttttctcatctctgtgtttgagtgttcctttaactgccaggtagattgagtacaggcagtagaattcttttctagatgtctctagagggctgagcctttgtgcagagtctttatttctagctgtcttcttgtctttggtttcacatgggggtatgttaccaaagtattttttggtgttgaagttttgaggtgtgatccagtaggtggcacttaagcataatggtcagttggtaggctcttaatcatgtggctcctctatatttacccacagttgcagccatgctccctcttaatgctctgaaagtgggttcctctcctatttgagtgctggctgcagatcgcagtgtggcactccggggctgcacaccacggttctggagcaatctcagtgtttatgttccttctccaacttggaagcagcagtggttgtggctgagggtctctcacttccccttttcttctggggctctaacccagagagatgtggcgctgcaatctatcagtgcaattgccctgggatggggggcggcactgcctattgaggagcagggggagtcggggggaactgtggaagacagattggcctcccctccttggggtaactgcagcttgctggagatgtggataaggcacttagggtctttgctccttacccattctgaggacaataggggcagtaccactgcagaggcagtggcagaagggcttttggttgcccctgggttctccacgtccaagaattgtttagctgctgtcactggtagtgttcagccagggggttgggtggctgcaatgctggcctgagcagggggctctgcttgttggggagcaggggatcgagggctcaccaggaggaaagaccattctcctctctgtatggtgactgtgtgtgctgcaagctyggatagaatatttattaggtggtcaacaactggttgctgaatgagggctgaggtaaaatcttagagttggaatgtcagagatggtgtatctgaagactctgtaaccttaagggaattggatgattacttgaaattaattcagaattctggatgaaatagtgtttctttttccaatgatttacagtgtaaaattagcagttcttaataatacacagagtagttgtatatttgtccagtgtttttggaaaagtattgtgcatgtatttcagtggcaaaagaatttcttgcacagaaagtaaatgtttagcttcatccatgtcccatatttaatatataatttaatatgcaaacatttatgttgttttctggttacaaatagttgaggataataccaacttcagccctgtcttagttttcttatttaaactctggattagactataactgtagtctctgcctagaagtatatatagctaatataaatctcaagtgcacacagagagtaaatagatgctacaactaaatgcgaaagaagaattaaaatgagtgtagtagctcgcttcagtggtgttttttataaaagtgactctggagaatttgtatgttagagatgtcatttggaaataggaattgggcaaaagagaaattgaggagataccctggaatgaaggcaaatctagtgaaacaactgagtcagaagcagatacattatgacagctcctttcgcttacttcatttcacccctttccccatcccacacatttatgcagttgatttcctgggcaaaattcatttctattctattcagttaatttttttttgttctggttaaagctctaggcatggmtgaatcttcagtttcagtaaaacatacctaaataaaattttgcctgtggaaaattgtaatattatttcacacatatgcaatatctaaagtaggcaaaatcatacaaacagaaagtagaaacagaaactagaaagtggttgccaaaagctgggggaagagaggagggagaattagtatgagtatagagtttcagttttgcaagatgaaaaagttctagagatccattgtacgatgytgtgaatacacttaacatttctgaactgtacatttaaaaatgattatgatggaggtcacttccaagatggccgaataggaacgctctggtctacagctcccrgcaagatcgatgcagaagatgggtgatttctgcatttccaactgaggtacctggttcatctcattgggactggttggacagtgggtgcagcccacagagggcaagctgaagcagggcagggtgtcgcctcacctgggaagtgcaagcggtcaggggatttctctttcctagccaagggaagctgtgagtcactgtacctggaggagtggtatgctcctgcccaaatactgtgcttttcccatgatctttgcaaccggcagaccaggagatcccctcccatgcctggctcagtgggtcccatgcccacggagccttgctcactgctagcacagcagtctgagatcgacctgggatgcgggagcttggcggcgggaggggcgtccaccattgctgaggcttgagtaggcggttctatgctcacagtgtaagcaaagcggcagggaagctcaaactgggcagagtccaccacatctcagcaaggcctactgcctctctagattccacctctggggacagagcatatctgaacaaaaggcagcagacagcttctccagacttaaacgtccctgcctgacagctctgaagacagcaatggttctcccagcatggcgtttgggctccaagaacagaagcactgcctcctcaagtgggtccctgacccctgtgtagcctgactgggagacacctcccagtaggggctgacagacacctcatacaggcgggtgcctctctgggatgaagcttccagaggaagtatcaggcagcaatatttgctgttctgcagcctccactggtgatacctaggcaaacagggtatggaggggacctccagcaaactgcgaagtaactgcagctgaggggcctgtctgttagaaggaaaactaacaaacagaaaggaatagcatcaacatcaacaagaaggacatccacaccaaaaccctattcgtaggtcccaacatcaatgaccaaaggtagataaaaccacaaagatgtgtagaaaccagagcagaaaggctgaaaattccaaaaaacagaacacctcttctccaaaggaacacaacttctctccagtgagggaacaaaactggatggagaatgaatttgatgaattgacagaagtaggcttcagaaggttgataataacaaacttatctgagctaaaggagcatgttctaacccatcgcaaggaagctaaaaaccttgaaaaaatattacacgaatggctaactagaattaccagtgtagagaagagcttaaatgacttgatggagctggaaagcacactacaagaacttcgcgaagcaaacacaagcttcaatagccgattcgatcaagcagaagaaaggatatcaatgattgaagatcaaattaatgaaataaagcgagaagacaagattagagaaaaaagagtgaaaagaaacgaacaaaacctccaagaaatatgggactacgtgaaaagaccaaatctacatttgactggtgtacctgaaagtgacagggagaatggaaccaagttagaaaacactcttcaggatattatgcaggagaacttccccaacctagcaaggcaggccaacattcaaattcaggaaatacagagaacaccacagagatactcctcaagaagagcaacccgagacacataattatcagattcaccaaggttgaaatgaaggaaaaaatgttaagggcagtgagagagaaaggttgggttacccacaaagggaagccaatcagactaacagtggatctctctgcagaaaccctacaaaccagaagaggctaggggccaatattcaacattcttaaagcaaagaattctcaacctagaatttcatatccagccaaactaagcttcataagtgaaggagaaataaaatgctttacagacaagcaaatgctgagagattttgtcaccaccaggcctgccttacaagagcttctgaaggaagcactaaacatggataggaacaactggtaccagccactgcaaaaacaggccaaattgtaaagaccatcaatrctaagaagaaactgcatcaattaacaggtgaaataaccagctarcatcamaatgacaggatcaaattcacacataacaatattaaccttaaatgtaaatgggctaaatgccccaattaaaagacacagactggcaaattggatgaagagtcaagactcagtggtatactgtattgaggagactcatctcacgtgcagagacacacatcaggcttgaaataaaggaatggaggaagatctatcaagcaaatgcaaagcaaaaaaaaagcaggggttgcaatcctggtctctgataaaacagactttaaaccaacaaagatcgaaagagacaaggccattacataatggtaaagggatcaattcaacaagaagagctaactatcctaaatatatatgcacccaatacaggagcacccagattcataaagcaagttcttggagacctacaaagagacttagactcccacacaataatagtgggagactttaacaccctactgtcaatattagatcaacaagacagaaaatgagcaaggatatccaggacttgaactcagctctggaccaagtggacctaatagacatctacagaactctccaccctaaatcaacagaatatacattcttctcagcaccacmatacacttattctaaaattgaccacataattggaagtaaaacactcagcaaatataaamgaacagaaatcacaacaaactgtctctcagaccacagtgcaatcaaattagaactcagggttaagaatcacactcaaaaccacacaactacatggaaactgaacaacctgctcctgaatgactactgggtaaataatgaaatgaaggcagarataaacacgttctttgaaaccaactagaacaaagacacaatgtaccagaatctctgggacacatttaaagcagtgtgtagagggaaatttatagcactaaatgcccacaagagaaagcaggagagatctaaaatcgacatcctaacatcacaattaaaagaactagagaagcaagagcaaacatattcaaaagctagcagaagacgagaaataactaagatcagagcagaactgaaggagatagagacacaaaaaaaaccttcaaaaattaatgaatgcaggagctggttttttgaaaagatcaacaaaatagccctctagcaagactaataaaggataaaagagggaagaatcaaatagatgcaataaaaatgataaaggggatatcaccaccaatcccacagaaatacaaactaccatcagagaatactataaacacctgtatgcaaataaactagaaaatctagaagaagcagataaattcctggacacatacaacctcccaagactaaaccaggaagaagttgaatctctgaatagaccaataayasgttctgaaattgaggcaataattaatagcctaccaaccaaaaaaagtcgaggaccagatggattcacagccgtattctaccagaggtacaaagaggagctggtaccattccttctgaaactattctgatcaatgagaaaaaagggaatcctccctaactcatttatgaggctagcatcatcctgataccaaagcctggcagagacacaacaaaaaaagaaaatttcaggccaatatccctgatgaacattgatgtgaaaatcctcaatacaatactggcaaatcaaaaagcttatccaccacgatcaagtcagcttcatcgctgggatgcaagtctggttcaacatatgcaaatcaataaacaaaatccatcacataaacagaaccaatgacaaaaaccacatgattatctcaatagatgcagaaaaggccttcaacaatattcaacagcctttcatgctaaaaactctcaataaactagatattgatggaacatatctcaacataataagagctatttatgacaaacccatagccaatatcatactgaatgggcaaaaactggaagcattccctttgaaaaccagcacaagacaaggatgccctctttcaccacttcgattcaacctagtattggaagttctggccagggccatcaagcaagagaaagcaataaggggtattcaagtaggaagagaggaattcaaattgtctctgtttgcagatgacatgattgtatatttagaaaaccccatcatctcagccccaaatttccttaagctgataagcaacttcagcaaagtctcaggatacaaaatcaatgtgcaaaaatcatgagcattcctatacaccaataacagacaaacacagagccatgagtgaactcctattcacaactgctactcagagaataaatacctaggaatacaacttacaagggacgtgaaggacctcttcaaggagaactacaaaccactgctcaaggaaataatagaggacacaaacaagtggaaaaacattccatgctcatggataggaagaataaatatcatgaaaatggccttactgcccaaagtaatttatagattcaatgctatccccatcaagctgccactgactttcttcacagaattagaaaaaactgctttaaatttcatatggaaccaaaaaagagcctgcataaccaatacagtcctgggcaagaagaacaaagctggaggcatcacactacctgacttcaaactttactacaaggctacaataaccaaaacagcatggtactggtaccaaaacagatatatagaccaatggaacagaacggaggcctcagaaataacaccacacatctaccaccatctgatctttgacaaamctgacacacacaagcaatagggaaaagattccctatttaataaatagtgttgggaaaactgggtagccatatgcagaaaactgaaactggaccccttccttacgccttatacaaaaatcaactcaagatggatcaaagacttaaatgtaagacctaggactgtaaaaatcctagaagaaaacctaggcaatacaattcaggacataggcatgggcaaatacttcatgtctaaaacaccaaaagcaatggtaacaaaagccaaaattgacaaattggatctagttgaactgaagggcttctgcacagcaaaagaaactattatcagagtgaacaggcaacctacagaatgagagaaattttttgcaatatgtctatctgacaaagggctaatatccagaatctacaaagaacttaaacaaatttacaagaaaaaagcaaacaaccccatcaaaaaatgggcaaaggatatggacagacacttctcaaaagaagacatttatgcagccaacagacatatgaaaaaatgctcattataactggtcattagagaaatgcaaatcaaaaccacaatgagataccatctcactccagttagaaaggcaatcattagaaagtcaggaaacaacrgatgctggagaggttgtggaaaaataggaatgcttttacactattgttgggagtgtaaattagttcaaccattgtggaagacagtgtggcgattccttaaggatctagaactagaaataccatttgacccagctttcccattactgagtgtataccaaaaggattatacatcattctacgataaagacacatgcacacgtatgtttattgctgcactattcacaatggcaaagacttggaaccaacccaaatgtccatcaatgatagactggattaagaaaatgtggcacatatatactctggaatactacgcagccataaaaaatgatgagttcatgttctttgcagggacatggatgaagctagaaaccatcattctcagcaaactatcgcaagatcagaaaaccaaacaccgcatgttctcactcctaagtgggagttgaacaatgggagcacatggacacagggaggggaatatcaaacaccgggacctgtggtgggtgtggagctaggggagggataacattaggagaaatacctaatgtaggtgacaggttgatgggtgcagcaaaccaccatggcttgtgtatacctatgtaacaaaactgcatgttctgcacatgtaacccagaacttcaagtataattttaaaaaaagwttatgatgataagattaatgttacatatttttaccataataaaaacgtttttagtatttgtcgatgaaaattttcataaaaacagtttttaaaggattgttgaaatatttagtgttatatactaacctgttttattatttttacagttcatataaagtgcttggactaatacctatagtaagtgcttaataatatcatgattgaatatgtaacatttactttccaatgcaatttgatgctttctttttaagctgcttttacggaaagggtacttgcactgtaactcaaaatcatctgatgtagttcatgagggctatttatagtcatagagtactgtgaggctacaaggaaaattttaatataaatatacattcttcaggaatattttatgctttgtaacaactcattttccttgaaatagccagcctgctcctgtgtttatcacttctttgtgtttttctcttaaatgttataaatgcaaaagaattttctttcaagtatgccttttatatactgctgagcactcataaatattaggtattaaaaaggatattttcttctaatttagatattatgagaaggtaacttaatttgaactcattgtttctcaatatttaaaaatatctctttaagtgtaagaatgaatacttgatatgtattcaaatgttatcatggatttgaatcttcaggaattgaagaatgattttaactattgacatcaagggagaaaaatagaaaagttaaagaagcattattttttcttattttgactatgacacatcaaaatacccacctgatctcttccatcaatgttaataacgagtcacagctagtacatttgttagttatgtaccaagctcagttctaaatgctttaaattatttttattctcaaaacaactatgagatacttacaattatttatcttaatttttcagggtaagaaaacagaggcacagagtaacttattatagccacccaatcagaaagtgacagtctgagattgaaatccagactctctggctccagagcccatacttttaatcagtgcacgacactcctgtcttatttaaagaaatcttattcagatatgtcaagtgcaaacaggatggcatctctagtacattctgaattcggaaatcttataagcaccacttttggtataatgtgaaaatagaaatgacaatgactgtatgcttttggctgaattttaaacatgaagataagccgtatccgaacaactgaaaaaacaactatggaaaactcggttattcagttgaaaattatgcattcgcctcttttcctaaacataacttccctaaaaaagacaaaacagtttgataatcttttgtcgtatttgaaattcaaacaaataggaaatgtgtgtgaattcaatagaagtttcattcaatggcattccaaatcttgctatttcttgtacacttcaggtgcactcccacctcagggtctttgcttttgctgttctcttgaacctgaacactcctctaggtgtctccatgcctttctttatccctgtctcctcttctgcaagtctttactaacttgtcaccttctcagtgaagacttcccttcaatatttgcatatcttacagtggctttctccttcttccttctctacagcatgtatcaccttataacatggtacatagtttacttattcttatttattatctgtcttcagcaagtasaataaaaactctataaaagcagggattttttatgtctattttgtttcctgcaatatccccagagtctgattgcaagtaagcactcactataatttgttaaatgtattcactttatctctggtttcaaagcagtttacattaagatttatctgacagtctagtagaattaaagcttttatgctttttgatgcaggcaaaagaataaaagagagaaaaaccaatccattttgttttgaacagtccctaatacacatacattttcaataactgttaaatatatattatactctgctggttaaggttgtcgtattaatcagttttgtgatatattatacccccattcacttattttcagtctaatgttaagaaaagacaaaacgggaaaacagatcatcatatgaaaaagatasctgcactgatatgtttatcacagtgctattcacaatggcaaaatcatagactcaatctaagtgtccatcaacagatgattggatttttaaatgtgataaatatataccatggaatactactcagagagattatttacttcttctttcctatttggatgccttttatttctttttattgcctggttgatctggctaggacttgcagtactatgttggataggagtggggagagtgagcatcattgtcttgttcctgatcttaaggagaatgcttccaggttttgtcagtttaatatgatgttggctgtaagtttgtcttagatggctcttattatttttagatatgttcattctatgcctagtttgttgaggttttttataatgaagggatgttggattttattgaaaggttttctgcatctattgagatgatcctatggtttttgtttttaaatctgtttatgtattccaagaataaatccttcttgatcatgatgtattaactttttatgtgctgctggatttggtttgctagtattttgtcgagcatttttgcatatgtgcttatcagtggcattggcctgtagttttctctttttttgttgtgtctttgccaggttttggtagaagggtgatgctggcttcacagaatgagttagggaggagtccctcctccttgattttttttggggtaatttcagtggaatatggaccagcttttctttgtacatctggtagaatttgactgtgaatccattttctgggtttttgggggatttttttggttggtagggtttttattactaattcaattttggaagttaatatgktcttattagggttgcaactttttcctgattcaatcttgggaagttgtgtgtttccaggaatttatccattttctctagattttctagttcatgtgcatagaggtgttcataatagtctctgagaatcttcygtgtttctgtggaattggttgcaacatcacctttgttgtttttgattgtgcgtatttggttcttcttgctttttccttgttaatctagctagcagtctattgatcttgttccctctttcaaagaaccaacttttgatgtcattgattctttgtgcagaattttgggtctcaatttcattcacttttgctctgattttagttatttattttcttctactagctttaggkttagtttgttcttgttcctctagttcctctaggcatgatgttagattgttaatttgagatctttccaaattttgatgtggcaagattagggaaattttcttgaattattccctcaaatctatttttcaggttgtttactttttctccttttctctcaggaatgccagtaattcctagatttggttgctttatataatcgcatatttctttaagattttgttaatgttttggggttttttgtttgtttgtttttgtttttgttttttattttaagttctgggatacatgtgcagaacgtgcaggtttgttacacaggtatacatgtgccatggtggtttgctgcacccatcaacctatcacctagattttaagctctggatgcattaggtatttgtcctaatgctctccctctcctttccccccaccccatgagaggtcctggtgtgtgatgttaccctccctgtgtccatgtgttctcattgttcatttcccacttatgagtgagaaaatgcagtgtttggttttctgttcctgtgttagtttgctgagaaggatggtttccagcttcatccatgcccctgcaaaggacatgaactcatcattttttttttttttttttttttttttttttttttttttttttttgagacggagtctygctctgtcgcccaggctggagtgcagtggcgcgatctcggctcactgcaagctccgcctcccgggttcacgccattctcctgcctcagcctcccgagtagctgggactacaggcgcccgctaccacgcccggctaattttttgtatttttagtagagacggggtttcaccttgttagccaggatggtctcgatctcctgacctcgtgatccgcccacctcggcctcccaaagtgctgggattacaggcktgagccaccgcgcccggccgaactcatcattttttatggctgcatagtaatccatgttgtatatgtgccacattttctttacccagtctatcattgatggacatttgggttggttccatatctttgctattgtgaatagtgctgcagcaaacatacatgtgcatgtgtctttatagtagaatgatttatagtcctttggatatatacccagtaatgggattgctgggtcaaatggtatttctggttctagatccttgaggaatcgtcacactgttttccacaatgattgaactaacttatactcccaccagcagtataaagtgttcctatttctccacatcctctccaacgtctgctatttcctgactttttaatgatcgccattctaactggagtgagatgatatctcattgtggttttgatttgcatttctctaatgaccagtgatgatgagcttttttcatgtttgttggccacataaatgtcttcttttgagaagtgtctgttcatatccttcacccactttttgatgagattgtttgttttttcttgtaagtttgtttaagttctttgtagattctggatattagccctttgtcagatggatagattgcaaaaattttctcctattctgtaggttgcctgttcactctgatgatagtttcttttgctgtgcagaagcccttcagtttaattagatctcatttgtcaawtttgctttcattgcaattgcttttggtgctttagtcgtgaattctttgcctatgcctgtgtcctgaatgttattgcctaggttttcttctagagtttttatggttttaagktttacatttatcttttttctttatttgtctgccttgattagttcaaaagactagtcatcaagttctgaaattccttcttctatatggtctagtctattgatgaaactttcaattctatttagaaattccttaagtgaggttttcaattccrgaagctctgattgattttttttttttaagttgtattatctcttcctgcatttcctggattttcttacaagtttctttgtgctgagtgagaacattcagtgtttggttttctgtttttttctctctttttttttttctcttttttgttttcttttctttttttttttttttttttttttttttggagacagagtctcagtctgtcacccaggctcgagtgcagtggcacaatgttggctcactgcaacttctgtttcccaggttcaggtgattctcatgcctcagcctcccgagtagctggaattatagactcccaccaccacactcggctaattgttgtacttttagtagagatggggtttcaccatcttggccaggctggtctcaaactcccgacctcaagtgatgggcccacacctgcctcccaaagtgctgggattacaggtgtaagccactgtgcctggccggaagtttgtgttgattttcagccttgccttgacattttcagtaagccctgtagtaaaaattagtttagataatgtaagaggatatagaaagagtacctaataagtaatgttgttagatgagttatcagagatgatgtctcacttacctcttctggcttttatagaacgaatggtttagtagtaattgttgttttttaagtgccaagccacatgaaattaagattagaggcagatttttgctcactttattcattttcattcactatagacccatgatgttttgaaaggttatattaaacatccatgaaattttaccatggcataagtcttcctaaatctgcatatatatttgaaaagctttgaagtattttttcacaagggaatggtttattttcaaagacttgtatagctattctaaacaccttttaatgtgccagatatatgatcttttcttagcatgctcttcaatatttttgtaaagttagattcagaactgcaaaacaatatagtagacttcattttatttgtgagatggttgttaaagcaagttgacaataataaaaatgattttattagtcctcaacagggattaaatattctcccttttaatgtcaattaatttatttcttcaacaaatattgactatttgccatatggcaggttttgttctaggcactgcagatacaaatatattattatgagtataatcagactcacccacacagttatatyaactaatacctaattatatgttcatggtgagacacaggctataaaattctgacacatttccacctgtttagctactgtagttgttggatcaattcttttaattttatgggcagcattttttgtttatttaccatcttgccaaaacatgggcagcaaaaggagcagttagtggmgacaaaatgtgaaatataagtagctccaaaagagaagtttagcagatattgcaagtaagaagttaattcatttaaggagaaacaaatactaaccctaagttcgttttctctccagttttagcctatsaattatatacttgtttttaaaaaatgtttattggttgcctcagagtttatagtatacatttataacaaatccaaatccacttttaaataatagtatgctgcttcatgaatactgcaggtaccatataacagagtatttccagttcttccctgctggcccttgtcacattgctttcatttgtttcacttgtccataaactataattatggaatatattgttgttgttattattttttaaaaaaatggttgttaggtcagttgagaaaaagaaaaatattttattttaccttaatgtatttcttctctaatgctcttcctttctttatgtggatctaatatccgacataattcctgacatatcattttctttcttatcttttaatattactgcaaggcaggtctactgacaagaaatgtcttcatttttgtctgagaaagyctttatttctcctacagtatatcagtgtattacatgatgcagaattgtaggttggtggggtttcttttcaaaacttgaaatatttaaccccacactcttcttgcttgtgtggtttctgaggaggagtttcatgtaatccttattcgtcttcctgtggagatagttttcttcaaactttcaagattttcttcttctctttaattttctacacttaactctgatatgcctatgtgtagataatttggtatttatacagcatgatgttctttgagcttcctggatctgtgccttggtttctgtcattaattttgtaaaattctcagccattattacttcaaatacttacttcttccttctctttcttgtattctcattgtgattattttacaacttttgtaattgtcacacagttcttggctattctgttatttttttctctctctcttttttctctttgcatttcagttttggaagtttctgttgacgtttctttgagcacacaaatgctttccttgtggtgtctggtctactgatgagcccatcaaagccagtctttatttctggtactgttactttgacttctatcattacctttcgattcttagagtttctattgctctgcttagatcacttagcatattaatcatagttatttcaaattcccagtctgtttattccaaaatttccactatatctgaatctcattctgatgcttgctttgtgttttccgactatatttcttgccttttaggatgccttgtaattttgttgacaattagacctgmtatatggggtaaaaggaacttagggagatatgcctttaatatgctgggttttgtttatctggctaggagttaagctgtgtttgatgtttgctgtagctgtagtattagaggctaaaagttcttcrgtgtcattgtttttgtctaacctcttgtctttggatttttccagcrtctccttaaatagactttsaggctagaatttgttttagctgtaatctgctgttattataccagagccctgttggggcagtgatagggttgggggggaaggggttgtttactatagtcctatgattggctgtcagttttttagtgagcctgagttttgagtattttctttcctccatttgaaagcccagggaggactgtagttggatatttcccttcccccagtttaggtaggctttggtgaaccccattaagttaggatctggtaaaatagtttctcttgagggtaagtcctattaagaagaacagaatgctctggcattttaaaaaatgataaataggcttggcatagtggctcatgcctgtaattctggtgcttttggaggctgaggtgggaggattgcctgagcccaggagttcaagaccagcctgggcaatgtaggaggaccctcatatctacaagaaattaaaaaaaaaaagactctagtcaggcaccaggcgtggtggcaagcatccataatcacagttagttgagaggctgagacaggaggatcacttgagcccaggagttctaggttacagtgagctatgactgtgcccctgcactctagcctgggcgacagagcaagagctcctctctaaaaataaaataaacaatcaaattttttaaatggttactattctctccccgcttgctggaagcacaagggggacttttcctcaaatcttcagtcaaaacctaatgaagctcctggagataaaacttatgaaagtgtggaggcccccataagactggacctcctagtagtttttaatttgcaagttagtatacactgagtctccagcaattcattaattacagtttaaagctttgctgctgatactggctcttgctgcacggttctgctcctgggcttctactcaaagccatgattctctgtatttgcctgtctttctagttttgggggcaacctaatgcatcatgatggattgagttgttaacgtgtagtttgttcagcatttttcttgtgagatgggagtaacagtttccaagctctttacatgtaagaaccagaaactctgaccctagattcagaattctagggttcaaatggcaggaggtccaagaagataagcaagctttctggcacactgtgttgaaktccaaatattattattattattattattattattttgagatacagtctcactrtcgcccaagctggagtgcaatggtgcgatctcagctcactgcaacctctacctcccaggttcaagcgattctcctgcctcagcctcccgtgtagctgcgattacagccatgtgccaccacgctaggataatttttgtatttttggtagtgacggggtttcaccatgttggccaggctggcctcgaactcctgacctcaagtgatctgcctgcctcagcctcccaaagtgctgggattacaggcgtaaaccaccacacctggccccaaatcttatttttgttcttagttttagtttgataatctaagatatagattagaatgtactgtatgaatcctttccccatgttttgttaccttaaataatatgrtattctaactattctgccataatcctgagtctcgtcttccttggcctgtggctgtccatgacacagagccaacatacttgtagtggacattggttttcagttgtgttttctgctaatgtagagttactggttagttctaattaaactgggggtgctgaggctaggcctgctgaggaatttatacccagattcaaaaggcattgagtttcatgttataaaagaagttgtgtagttaaggagtcagcattacacaacttatagacagtgaatatgagaatgtaaatattctctttataaaagacaatataatggatatgtaagtacccaggcttgttttgtttggttcacaaaatatattaaaagttttatttaagagaatgtttattgctgttttttcttctaaagaaatgycatcttatacattcatcaattgttaaatatttctttgaggtgggatgcagtttacttcaatacagatggctgtctgtcttaagacaatatgctaaaattcagttttaaaatcttaaccacttaacagtttattgcagagctagggaactgtagtgtagcatataagttatttgtctctttcttataacaatttgttatcagtgacagaactttttgtaagtaaatcagtgataattctaagtgaccagggaagctgaaactgtgattattaggttatcttaataaccaataataaaaattaagatcgttctatgacctttaaaattttttttgtcaagacattaaaaacttcttaatgttggttataagtatattgggaaatgaaaaaatagtaaaactaatttttttttagtatactgtaattgtaaacatcagaaacattcagaattaaagttttatttctttgtaaaaacttttcaagagtagtttgaacacttcttgccttgttttcattgtatggagcaagaggttttctatgccttggcaaattatcatactcctttccaaatgtggataagctgtccacttttgatctgtgcatttttaatgtcatggaatatctgagargtcttttaatgtggaggtctttgctggctggcatcactgctcctgggacattgtcatgctttgcatcacaactactttcctgagtttataaagttttcctgggtatggatttcacagcagaatctttatctgcaccagcagttcaccagctagcttaacattatcaattcatgctgacttttgaaacaaagaaatcagcctttactggaggttagagattcatcttcagtcttcttgtaattactgctttcaattactgtattcaaagttggttcttggacctaaatgctagccaactgcatcgtgaatttgttttattacagagtcttcaatgcaaaaaagtcggtgcttcgtttcaaccgtaagtgactttctgtatgttgtgcagattaaactaaaaaatgttggccggggcgcggtggctgacacctataattccagcagttccggagaccgagacgggcagatcacgaggtcagaagatcgcgaccatcctggctaacatggtgaaaccccgtctctactaaagatacaaaaaaattagctgggcgtggtggtgtgcacctgtagtcccagctactcctgaggctgaggcagaatggcgtgaacccgggaggcggaggttgcagtgagccgagatcgcgccactgcactccagcctgggcgacagagcaagactccatcamaaaaaaaaaaaaaaaaaaaaaaaaaaggccgggcgccgtggctcacaccggtaatcccagcactttgggaggccgaggcgggcggatcacgaggtcaggagatcgagaccatcctggctaacacggtgaaaccccgtctctactaaaaatacaaaaaaattagccaggcgtggtggcggcgcctgtagtcctagctacttgggaggctgaggcaggagaatggcatgaacccgggaggcggagcttgcagtgagccaagatcgcgccactgcactccagcctgggcgacagagcaagactccatcaaaaaaaaaaaaaaaaaaaaagatcaaaactattttacctaattttcaaaatattcactagacttttcaatatggttcggtttatactataacctcatgtagtgctagtttattattattattattattattatttgtttgtttctttgtttgagactgagtctcactctgtcccccaggctggagtgcagtagcacgatctctgctcacggcaacctccagctcccaggttccagcgattctcctgcctcagcctcccatgtagctgggattactggcgcctggcaccacacctggctaatttttgtatttttagtagagacagggtttcaccgtgttggccaggctggtcttgaactccttacctcctgtgatccgcccacctcggccttccaaagtgctgggattgcagacgtaagccactgagcccagcctgtttttgtcctatcttaacattgctgttaccattttaaaatcttctagtcacatctaatttcacttccagtgtcaattttcatttcttcattgtactttcctggggcatttttggaaatttcctcttttgattaaatatttttgtaaaatatcactgggagtttattacttggagaaacacaattacatactttgctgtctgtgcatgagccgactagcagaaaagaagtgacgtgatttgtcactgatcgtgatgtgcatctcttatttgtgtagtgatttgtaaatagcagcaagcacatctggtttggtatattttccatatcagatttcaaaatgtaaatcgattgcttacttgttggttttaagtcccaatatatgtcttatactctgaaataaacacttctagatgtattttatgttgatgcttagtggtagtttaaatggccttctatcctggaattaaactacaaagattctcacttatattcaacaaaaataatggatactaaatagaagaactgaaacaaccttttatgaatcctttgaaaaaaagttttttagtaaatttctgctaaattaactattagatataggcttatctataatatactatttatgtgtttgcataaagagaaattactaccaaaagatcaaatccttcaattttttytaatgttccctggagttgaagagatggagcatttttataagctcctgtacttcactttttccatctatccactgcttaacttcaggcagtatttttatcaaacatgttctttttctccattatcatgacccaagatacatgttccatttattctttttaatttaaccatgggcatgaacacttatcaatatagtaagagaagtctgaatggaaattttaaaaatcaggtagcaagcataaaatagtttcatattattcttctccatatttcattattagcagagcattaggtgacaatatttgagtattagcacatcagaggaaaggagccagattttggaaaggtagcagtgaagctgagggatacgagtttgaaaacagaagggattaatagggccaaacatagtgaatcaagcaagataagcatttaacagtttccactgaaaactcacttttacactgtaaaagtaggatacttttacatgaaggagttaaaaggcacttaaccaaataactgaaaatgtcagtggagcacactggtgagtatagttagaaaggcttggcagaataagacttaactgaagcagcagagatggtgtcatataacgttcatttcataacacataacatgaagtagattcttgtcagctgayataaaatcttctttctaaaatggtaatgattttacctgatttgtcactgtaaattcaatcatctgaatctattagtataattatatttcaggagtttaaaggaaaatcaacctcttttttgtatgtagaaaatacttcatcatagaagaaaactttctttttaatcatggaatgttgttttagttcatggaataagacttaagtttaggatttttgttgaaacgtaagtgttgagttgaggtggttgattgttttagaaccttttaaaaacttcttaaaactttatttaaaagtttttaaaaacaagtcttaaaagaacttggagagcagtgtttaaaccaaggttcttatgaagccaacctagaaaaaataacattcctgtatatttttagtcaattgtttatctttattgttttacaaaagatttgctcatagttacattaaaaccttcttattttatgtcttcttaaaagggacaatttgaaattctcattttagaaactagtattacagctttatacagtgtctttttttttttttttttttttgaggcagagtctcattctgtcacccaggctggagtgcagtggcaccatgttggctcactgcagcctccatctcctgggttcaagcaattcttctgcctcagcctcccgagtagctgggattacaggtgcccaccaccatgcccggctaatttttttatatttttagtagagacgaggtttcaccatactggccaggctggtcttgaactcctgacttcaggtgatccacctgcctcagcctcccaaagtgctgggattataggcgtgagctaccacgcctggcccttttgcctatattctaaggagctattagttgcttttagagaattagtttacatgtaaagattaattccataaatacacatataaatatcaatataaatgtatacgcatataaatattatctgcatatatacctgctaagtctataaagagagactaattctgtgaatgtgagatgtatgtcctcagttttagaggaagctttatcttgcatttagttgtttgaatctaatccttggacttagggggtaagtagctgactgcattgcctttccaatcacccgtaaaagaaaaaaagcacagctttcctgaagtatagaaccgtgggaatatttgcaagcataatatgtragtctccctgactttaacctggatatcctttgtttcaacttctctttcatatggtttttaaaaatattatatacctcaattttaaggcctagaatgttgtttttagatacaattaaagtatgttacacacaaattatcttctgtaacacttgaaattggtatctttaaaaacttaacacacaccaatatggaaattcaagatagcacattatatttcagaaaaaaaaatgcttctctgttaggatttcatgagagtgtttaggcttttttgtgtctattgttttacagtaaatttttatagatttgtttatttggtagccctgttaaggatatttcatagtcatatctctaggatcctttaatatatcaggtgagttggtttaatgatgtccacattttaaaacrggtacaaaaaatagaatgagtagtatttaacagcaaaacagggtgactatagtcacctgtgcattttgtgcatgaaaacttgaaatgcaaaattgtgcagttttaaataactaagagagtataattggattgtttgtaacacgaaggataaatgcttgaggggatggatatctcatcttccatgatgtgattattatgcattgcatgcctgtgtcaaaatatctcatgtaccccataaatatatacacctactatgtacccacaattttttaaaaaaagtaataaaaaataatatgttgcccttagtgtcttacatttttattatgaaattgaatatttttacttraagttataacttgctatgtctttacattccttggtatgtggagaatttggaatgtcccatacttaatattttgatttgccaccaagattgctctgaatctgtattcgcctttattgccaagtttcttcttaactgggagtttgaaaatataaactttaaccattttttctggataccacagaacccacaacgtattactgttatcagtttacagaaaaacacaatgactaatacgtgactaatgactgatgtagttgatatgagaaagactaatcatatcaatgactaatataggttcatatgagaaagaggaatgggaacctctttattccacatatgcttattattcaacattgccaaatttcaaaaaaccaattgcagcctccatgtgactcagttgtagccacattctccccttttccattaaactgccacacagctcttttcacttatgacctgatagagccaccccaggaaaagagaaaatggttttcagacaatttgtgtctgtaaattgtcatttaacttactttgtttttaaatttttatccctttcgaattttctggagctttgtgaagttasttactacttaataatcctatctttgaaaagagttagtgctgtatcagcaagtaatctgaggtgggaatagtcccaaattatgggcccattcgtcttgagaccttttcattttatattaccggaaagtaaaagcccctttcctgacattgtagtgtcagttttctagttagattttttttttttttttactccttcacctagccacaactttacttcatttgaaattaactaaatttgtttggctttgattataaatttatcttgtttgtttaaattttcttctcccaaaatgacattcttatgttatttattagtgtggaacagttatgaatcctttcctttttattataaactgttgaacaacttagaacttttcttactctgttttaagaattgcatgtgtagtcttttcagtaatcttttcaactcctgtggactgtgaaaaggtattttctagcaaaataagaatgagaaattccacatattatgcatcctcttctcagagattattagtttatagaagcatgttagggttcagagaacttgaatgctgagtgaagaaacccctctgttttgctttgccaagtgtttccaaaatcagttagtcaggattgctatttttgcraaatcccagttaatgccctccattagcgtgccactactgcatgcagtagtgtgcagttctgagaaacccagtttctcagctgtttctaatcactataggatatggtgatcacttttgtcagaggaaagtataataattaaataggatttgtcctatagaaatatcaaattttttttttatttttgagaaggcgttagggagaaaagagatttttatgtggagtagatcgtttaacaagaaatctgggacctgatttgttgtgcagtttagctaacaacttcaaaaagaaaaggaatgaagagtggcaatttagaacatatagaatgtaaaagcagatatggtctgataagaaatatgttttttaaatgtataatgtcttagaaaaatcaaataggaatttattacacaaatcaactgaagtatggtaatatcattcattttacttacacgagtacaggtcaccccaccccttgctgcagcaccattttttgatgtactatgttttttcccattagatggattaaagaatgagatatatgatatatttgtaaaaaagcattacagagacctataaatccagacctctgggtctatatttcacaagaagttttagagcaatacagaggttatttttcttgctatggagtaatacagaattttggaatgagacaaagatatttttagaagttaatraagacttttatttttataaacacctacatattccagaagtttacatttggacagcctcctagtttaaaaactgaagataggcactagaatctcattgtaataaatccgtttgggtcattttggaagacttaatcctcttccaaattctcattaacctagtctcygaggacaagagcacaaccagaatgcgttagttactaacttctttcccaatctctttttatagctagattcatttaggcctgtaattatttcaaattttattaaattattgatataaaaagggggaacagttgggtatatctgaaaaaatgcatttcaggagggaaagccaattagacaatttagaaaactggctatattttgacttatgcattgtcttagtaatgttttatgttattgtttaactacttcataatacctccactaaagtaaactaacagaacagtctcaagatttgtgtattatgaaatccaaatatggtgtactttatgatggaaaaggcatataatcaaagcctcccaagaatatttcttaaatgtcacaattaatatcccttaatgttacttgcatatayactttattatatatgtcttgtctatgtattatatacttgcatgtacagtttattatagaaaaaaaacaaacataaatgatagaggaacaagatttagaaaataaatgaatcaataactgaaaggtaattagactgaaactgtttattagcactgagtatttcatttgggatcatactacctttacccacatactatagtaacacttacctaaatatacacagatatctaaggaaaggaccaataaatattcctgggtcattgcttactcaatcatggtttaatataccaccaagcttactcgtggctcttgtgataaacaacaaaatcccactgagcaaacaataactaatatttagtgaatccttattatgtgccagagtttattccaaaggcttgtattaatttaacctctcaaaagtgtgagctggatacagtggctcatgcctataacccccgcactttgggaggccgaggctggcagattgcttgagctcaggagttcaagaccwgcctgggcaacatagtgaaaccccatctctaccaaaaatacaataataataataataataataataataataataacggggcatggtgatgcgcgcctgtggtcccagatacttatggggctaaggctggaggatcgcttgagccygggaggtggagactgcagtgagctgagattgtaccattgcactccagcctgggtgacaaagtgagactctgtctcgaaaaagtttaatctccagtactagaaagcagatcagtgactttctggggcccgtgctggactggggattgactgagktgggccacaagagaacttttgggaatgttgtgaatattctataccttacctttataaaggtgagacataagatacatttatcggaacttaccctaattgtatacttaataggagtacttttattgtatgtaaataacacatcatttaagttaatttaaaagaaagcaaggcacagaaaaagtcttaccctgaaataaagctactataataccttattgtttatctaggcaactttatagattttattatcaatatttagattttccaggcattttctttataggatttgtcctatataaatatcaatttttttatttttgagaaggccttaggcagaaaagagatgagtagatcatttaacaagaaatctgggacctgatctgttctgcagttcagctaacaacttcaaaaagaaaaggaatgaaaagtggcaatttagaacatatagaatgtaaaagcagatgtattttctttatagagcatgccaccttttttcagtttcattattcaktataaactctaatggagtatgaaaaaaagaagaatgtgacacttgaattgatcacttaggctgtttaagtgaggagaatgttggacctattggcttttaataaatgactatcaaatatcatatatctgtgttcttgttctgctaatatttttcaatggattgtcaatggatatcacatatacagaatatctatgtttatatataaaaggaaaacaatatatgagagatttattcagtatttcttttgaccatattagtctattagtatcagaagtgagtggaattctaaggcatttgcaaacatgaaccataattatctgtttcagaagttacttatgtttcttgcacatctctggaaaacagttggaccaaaatactcctatctagaaaatgcaaagtttatacatcttgtcatgtatgcctccttaagagacatagttttatttagacatttttcatcagagaggctaaaactgttctcctctgactgggctgcactgagagcaaaattatcagatttttatttcctctttgactaatcaggttactgacagggtcagactttttcaaaacctgagtattttgcttagtagtaagtggcctggggttgttcatttgatctctgttgagtatactttttccagttctttttattgatttagaattgcacaaggaattcttagaagggcagtggatagacttgagattttaacccaaaaggctcaatttgtttgtaataatctgctggattattgggttctttttagtaagtattgttttaggtgcagaaatttcttgtgttgttttatatttctcagtgataccagaataaaattattagtttaaaaataataaattattgagcttccacacatccctatgttagtaaactcagtaaactaccaaaattanccttcctaaaagataaactacctacaatatagctttgttaatcagattatggaaatttgtcaattttgcagagacgaagttgcattcttgaaaatttaggctgaaatataagcatacttgttaattcaaaaaaagttccagagtcattcataaatggtttaatgtgaaaggaagtcaaaacaattattagaactacatagacggcatcatgttttgtccctaaaaattgttaggaatgaagcagagactctgccagtagaattctaattttagtagtatgtcagattaaatcaactaattattgcactattttaagggtgggtagagattggcatgcaggtaattgcacccataccggtgccaatggaagcaattctaaaacagtttgggcttaaatatcttcaataccactggacgtatgatggcttagttcatgatgtcctcagtatatgagaggaaacgagcttatttataaaacagggaacataatattttaattagtatttaattttgattagtgttagacaataatactggcatttaattagtattagacaataatactgccataagaaacactattaatttggaattataaatagacataactcaggacatgttattgataagtgagtgctaattatggaagatggttagtattcagactttracattattccagatgattgtgccagagaagctagatttgtactttacaytggatttgtgctttcagctatttctaaatgtaccattctgattattcttgaataatatgcatggatttccattactctgtggcctaagaatggatattggctttcaaagtttttattttaagcagttatacatgcaaagtcctttttaaatttttcttttgattttgaggtctcactataaaatagtttgatttttttaaaaacgaagatctgaatgattgttatctttttctaagtagtattctggaacgctgtacaatgataactgctaatgtttataatgcttttggaatgcctctttgaagattatgtatagagcctacaagcaattattttaagtatcataatggtgacatttcaggaaaaatcctttgaagtggatattgacttttgagaataatcagaatgagaatatgatccaattagtattcatattcaattatagttcacaaaatacttgttcaaatctgttattgccaatgaggaaaaaggatagaaagttacctgcaagatataactatcaagcaataaaattgattttaaattcaccttgtarttgaaagtagttgagcagttgcagcatcattgcataaatatatggtctgaaagtgtgcacagaaagataaataacattcatattcatttgaatacaggcatacctcaaagatattgcagctttggttccagacaaccacaataaaacaaatactacaataaagcaagtcacatgaattttttggtttctcagtgaaaagttgtgtttaaggccaggcccggtgactcatacctgtaatcccagcactttgggaggcyaaggcgggtgaatagtttgagctgaggagtttgagactagcctgggcaatgtagtgagcccttgtctctacaaaacattaaaagaaaaattagccaggcatggtggcacactcctgtggtcccagccactagggaggctgaaatgggaaaattacttgaccctgggatgttgaggctgctgtgagttgtgatcatgccactgcactccagtctggatgatggagtgagaccctgtctccaaaaaataaaataaaataaaataaaactcacttgtgtttacactatactgtaggatactaagtatgcaatagcattatgtttaaaaaatttgtctaccttaattaagaaataactttattgctattgaatgttaatgatcatctgagccttcagagagtcataatctttttgctggtggagggtcttgctttgatgttgatagctgctgactgattacaatggtggttactgaaggttgggtgaggtggtaatttctgaaaataggacagtaatggagtttgcaacatcaattgactcttcctttcatgagagatctgtctgtagcatgcaatgctatttgacagcattatatccacagtagaacttctttcaatattggagtcaatcctttcaaaccaggttgttcctttatcaactgagtttatgtgatattccaaatctaaatattctaaattgttgtcgtttcaacagtattcatagcatctccaccagaagtaaatttcatctcaaaaaaacactttctttgctcatccagaaaaagcaattcctcagccattcaggttttataatgagattgcagcaattcagtcccatcttcaagctccacttctaattctagttctacttgttatttccaccacatctgcagtgacttcctctgctaacatcttgaacccctcaaagtcatccatgagggttggaattagcttcttccaaactcccattaatgttgatgttttgacctccttccatgaatcacaaatgttcttagggacatctagaatggtaaaccctttccagaggttttcaatttactttgcccaaattcataagaggaattattgtctagggtagcaataactttaggaagtgcattttctatataataagacttgaaagtttaaattgcctctctatgtatgggctgcagaatagatgttgtgttcgcaggcatgaaaacatttttctagtacagctccatcagagctcttcagctgactaggtgcattgccaataagcagcaatattttgaaaggaatctaattttttgagcagtaggtctcattagcagacttaagatattcagtaaaccatgctgtaaacagatatgttgttacccaggctttgttgtttcatttatagagcacagacagagtctatttagcataattcttaagggacctatgtttttcaaaatggtgaatgagcattggcttcagattaatgtcaccagctgcattagaccttaacaagggtgtcagcctattctttgaagctttgaagccagacgttgacttctcctttctagctatgaaagccctagatgccatcatctttctacagaaggctattttgtctccattttaaatctggtctttaatgtaaccaccttcatttatgagcttaggtagatcttctggataacttgctgcagcttctacatcagtactttctgcttcaccttgcaggttatgttatgttatgttatgttatgttatgttatgttatgttatgttatgttatgttatgttgacagctgttttccttaaacttcacggatcagactctgctagcatcaaacttttcttctgcattttctttacctttctcagcctttatagaattgaagagagttagggccttgctatggattaggctttggcttaaggaaatgttgtgactggcttaatctatccagatcactcaaacgttctccctatcaaaagactcccaaaaaaagactttttttgctttcttatcatttatgtggtcactagtgtagcacttttagtttacttcaagaacttttcctttgcattcacaacttggctaactgcttcgtacaacaggtctaacttttgtcctgtctcagctttcaacattcctttctcactaaacttaaccatttcaagcttttgatttaaagagatgtgtgacttttcctttgacttgaacacttaaaggctattgtggggttgttaattggcctaatttcaatagtgttgtgtctcagggaatagggaggtttgaggagaaggagagagtcatgggtgtggccagtcagtggagcagtcagaacatacacaacatttattgcttaagtttgccatcttatatgcaattataatggtaacataaaagatcactgatcacaggtcatcataacacatataataataatgcaaaagtttgaaatattgggagcattaccaaaatgtgacagagacacaaagtgagcacattctgttggaaaaaatggtcccaatagatttgctcaacaagggttgtcacaaatcttcaatttgtaaaaaaatggcagtatcttcaaagtgcagtaaagcaaagcacaataaaatgagatgtgctggtaataaattctgataaacttacctgaaaatattctgtattcttgtagtatgaaataagatagaaggtatcttactacattaccaaaaaggtctgctctaccgtacgtggctattggacttagtccctctggcttttctcttagatggcaacactcactaccatatatttttctggaaccttgggtgttttttaaccttcctggtcattagttattgctaaatcatctctgaggacatttctagatctaaaattttatgactgtaatattcttcagtaaaataatatacaatyctcttttctgctgaatatgtgayccttagtgttcatagaagttgctggcttttagaaataaacagtttgattcaggctaaatggagaaaaagtcacagatttagtgattcaaactacagaagtaaatgacatgattgaggttggagatgaggtatttactggaacatgctttgaggagacctttaattctctattgtaagtttgcacatggagtttataaaagcattttctaaatttctgcatcccttatatgaaggcattttaggcataaggaatggtacaaactagaaatagragaatacagtggtatgttgaagcacagataagtcctttagagccaaagcttctctgaggatttgagcctgtacccatgctgccttcagctcagaggccatgatgttccctctttcacatactcatctccccatgttccacctttgccgtccatcagatggcctgtgcacataattagraagtcttgcttcacattattgttatacttggttgcctattaaaatgtaaaaataacatgtcatttgtctcttttcatgtatgcctccacatacttcatgctttttcttttttctttttttttttttttttgagatggattctcgctctgttgcccaggctggagtgcggtggtgcaatcacggctcactgcaacctccaccacctgggttcaagtgattctcctgcctcagcctcccaagtagctgggattacaagcgcctgccaccacgcctagctaatttttgtatttttagtagagacagggtttcaccatgttggccaggctggtctcgaactcctgacctcaggtgatccatctgcctcggcctcccaaagtgctgggattacaggcgtgagccaccgcgcccggcctatgctttttcatacttcacgttttgtgcttcatcttccctaaaccagactcccaacacttcttcttctcagatctttccactgtttaactggaaacccgcactttaacaacaggctaccttacctcctcacttcctcactggatgttccctttacctccttgctttactgagaaatggctctctgaacataggaacaggcaaagatttcatgacaaagatggcaaaaacaatcacaacaaaagcaaaaatgtacaaatgggatctaattaaactaaaagcttttccacagcaaaaaaaaaaaaaaaaaaaattaccaacagagtaaacaaagaacctacagaatgggagaaaatatttgcaaactatggatttgacaaagttctagtatccagaattttaaggaacttaaatctacaagaaaaaacaaccccattaaaaagtaggcaaagaacatgaagagacacttttcaaaagaacatgcatacggccaataagcatatgaaaaaaagctcaatatcactgatcattagagaaatgcaaatctaaaccataatgagataccatgtcataccagtcagaatggctattattaaaaagtcaaaaaataacagatcctggcaagggtgcagagcaaaggaaatgcttatacatagctggtgggagtgtaaattagttcagccattgtggaagcagtatggagattcctcaaagaaataaaagcagaagtaccatttgacccagcaatcccattagtggatatatacccaaaagaatataaattattktaccacaaagatgcatgcacacattttttttgtttattggagcactactcacaatagcaaagacatggaatcaacctaaatgcccatcagtgatacactggataaagaaaatgtggtactgatacaccatggaatattatgcagccataaaaaagagtgagatcacatcctttgcaggaacatggatggagctggagagctggaggccattatccctagcaaactaatgcaagaacagaaaaccaagtactgtgtgttctcacttataagtgggagttaaaatgatgagaacacttgaacacaaagaggggcacaacagacactggggcctagtgtccatgtgttctcatcmccaccccagagggtggaggatcagaagaggaagaggagcagaacaagtaactattgtgtaccaggcttagcatctaggtgataaaataatctgtacaacaaacccccataacatgaatttacctatagaactaccttgtatatgtacccctgaacctaaaataaaagtttaaaaacaacaacaaaataataaaattaaaatcacaagggaaaaagtttcatgaattttggagacaaggaggattttttaaatgctttttattaaaatatactaaatagccactttagttataaaccgaacttcaaaatttgttgaattttaaggaactcagaatctcttaggtttgctattttttttgaaaagcagacaacacctaaacatagtgattctattttgcttgtgattcttttttttttttggtccttgctataaatgttgtgtgattttttgattctatagatgcttttagagaaataaatactaaataaaaatggttggaaatactgttttaattatttatctctcattctaaaagaaaaaagattcatagtataaaatttcttcaagtccttggtatcattttggaaacagagttgtttctttgaaagatcagcagcagagatataaatttagaagtaatttgtgtaaaacatgattgtcaattccttaagaagacaagaaacttgaggggatgagaatatgggggaaaagaatggatgattatggctgaatcttcatcatttctactgtcacaaagaataattaagaggtaacagtaaaatataataaaaggagtggtaagagaaatgaaaggactgtctaaatgttacaaaataatatggaagtaaagtagtaggagcaaaagccatattgctatgaaagaagttaamacatccatcttcttcgttgttacctacaaagaagaattgaatttgaatggttcttggccagagataatttgtgtcaacttcggattacttattctagcattcaagaccattcatcatctgaaattcagcaaccaatactgatcttctaaagtccttgaagctaatatttgtcatctccccagtacaaactttgagacctctattctatcattggttctttactccactcttttccttatttgagttctaccaagggcccatcttaagtctcacctaattcatgttgttttccctcagtcctttagtgatcagtgtgccactgcttttgcttttaatctgaacctcctttaagttatttgcttacatccttttgtcttcycaatgagactattttcccagtgagcatttccagggcaagatccatgtttcttatttgctgcttaattcattgagcactctcaagcttcaatacattatmaaaaatgggtaatttggaataagttatccctaaggtactcatcagagctaaagtgcactagatcttgaatgttccatatgtaataaatcctataaaaacattttactatatctcaggaaaaattaaaacatgcttggttaacctggttacagtgaattcttgatcagttataatcaaagaaagattcatgttctcaccaatatctgttcatatatttcctataataaaaggacctggtatgttgaatgcatacaaatactgttttgctattaatagttttatgataaaattataacacccttattttatcagtgcagtattttcagatgtaaatatgctattcatttcattgacttgataactctgttggtgctctgtggtagccagtatatatagcactgggccctgtggttcagtgcagaccttaccacctgctagcagtatgaactcaaccatggcttttaatcttactgagttcatttctttatctgttaagtggataatacattcttcactgggttgctgacagaattgagataatccctgtaaagtatgaagcatagtgcctgacacatagtgctagatatagtgattagtcactgtaatatggtatttgtcacatttaacaatgccacgggagcaaaatctctgcagtttttacatgttaattttatgggtgttatttctgttaacttttaaaaccatttgcacctagtattttatgtggtattttgatcataaaatagtaggttcttttcatagttatgtagaattgaattggctaacttctcagtgttccactacttataattttatagtgacaaagtgggttcaaattggaactaattatcccttacgtggctttcttttattatatgatgcaagatgcttgtatcacaaaatgaattcagaattcctctctctaaatctttaggagtcaaatcagagttaactaccaggtagagaaaagtcatgaaactaaaactgatatatagtttctaagggatacttctaaaataaacttttgtaaatgataaggtatcctgtacaccattttactacctatgcctattcccagatttcacttaagaaacattataaatttatagcctgaccacattgtgtcctaaacattgaaggcaaaccatattgtagggatttcattttaaccacagagaaattctaacaagcgcaaaaccgcagaaccaagtaagtagtagatccgggaatagaattgagaaggctctgattcctcmtcacatactgagaccacagagttctgctccttctgaacataatgacagctcatccaatgcttctagaccaccagtatatgatacattgggagcaaaccatatgacagcactctccaaaggctcacagtctttactttctaaaggcctgcttagaaaccagagaagtagaagagccattacaagcacctcatgattattgactgatatttgtgtttggggtacttagttgctatgaygaagtttgcttctctgctaggttataaaaatgtaataatttgtaaccatagaaatgattttaccagtttttagtaacatttttgtaattattaatacagctagctaaagtgtttccttggaggataaacggcatcatacataaaaggagtagaaaaagwttacgttcccttcagaattgaccccccatcccattttacttttaaattgttgcttctttttgtctttagtgatttacagagcactgaaatggttgttttaaatattttgtcttgcaatatcgttgctgtttagggaatgaatttgccaccttcttcactctgtcatgctagaagtagacttatttttattactattttatatggataaaaattgcttgtatttccctacattttactattttattatacataggccttttaaactgggattatttttgttctttctgaaatataccttttagaagtttctttagtaaaagtcttttgatttttatttatctaaagatgtcttaattttatttatttwttatttatttttttattattatactttaagttctggggtacatgtgctaaatgtgcaggtttgttacataggtatacatgcgccatggtggtttgctgcacccatcaacccatcatctacattaggtatttctcctaatgttatccctcccctagccccacacccccaaacaggccccggtgtgatgatgttcccctccctgtgtccatgtgttctcattgttcagctcccacttatgagtgagaacatgctgtgtttggttttctcttcttgtgttagtttgctgagaatgatggtttccagcttcatccatgtccttgmaaaggacatgaactcatccttttttatggctgcatagtatttcacggcatatatgtgcctcattttctttatccagtctatcactgatgggcatttggtttggtcccaagtctttgctattgtgaatagtcccacaataaacatacatgtgcgtgtgtctttatagtagaatggtttataatcctttgggtatatacccagtaatgggattgctgggtcaaatgggatttctgattctagatccttgaggaaccgtcacactgttttccacyatggttgaactaattaacactcccattaacagtgtaaaagcgttcctatttctccacatcctttgcagcttctgttgtttcctgactttttaatgatcaccattctaactggtgtgagacggtatctcactgtggttttgatttgcatttctgtaatgaccagtgatgatgagcttttttttcatatgtttattggccacataaaccttactgttgaagaatagctttgtctaggatgacagttattttctcttagccctttgagaacattatttacctgcctatggcttctrttgttactattaaataattttttaaaatctgtagatttttaagtggctatagagtactcatgtgccagtcattgcattgagcacttaacatttatcacttcatttaatcctgctaacagccttatggtaataggctgttactattctcatttttctgataggaaatcagaggcacagaacagttaaggatgcacggtatgtaaggaggacaagattgatcccaggagctctgactccagagcctatgcttataaaccagtatgacagccaagtaaatacttaaaaagaaggataaaagatgattaacagtactaaatattaaaattactataaagctgtaggaattaaagcagggaggtatttttttcttgrtagattagtaagactaatcattactgttagactatcattactgagcaataccaatgtggtatacctgtgtgcctgtttcctcatctattggatgagaataataatagtgcttacttcatagagtggttgtgaagagtaagtgtgtgtgtgtaatatcttataaaggaaaacatatttgttgtcatcagcagtagtagaataaaatgggaaagcacagaaacagaccctactatatatcagaatatagtatctaattataggtgatgaggagaaggatggactgttaaataaatggtgctgacatagttgggtgattatatagaaaacagaaattttggtatagcttgtttttttaatctatggcctaacagtaaaagtataccagatttagaggttaactattttctaaatctataatataattagaggaaattttcattaatagttaaataaatatatgtagaggagactgttgtaagcatttcatcaaaggagaaaccataaataaaagaattgaaagatctaaccacataaaaatttaaaatttatttggtgaaaacaattaggaacactgtctaaataattaatggcacagtgtactagattagaaaagccatttgcaatatatataacagaaggtactattcttaatgaaataataaaraaaacaactataacaatggaaaaatgaacaagtgaacatagaatctcccagaaaaaattacaaatgacaaatagacatagaaaaagatgctaggctacactagtaataaaacaaacaaacaaacaaaaaacgttaacaccagttttcacctgtgaattttacagtaatttaaaaagatagtctacccaagataaatatgtaattatatataaattaacataattgaagggaaataacaaacttacagagttttttattgtatcagaagaaaaagagagaaaaatcatctgctttgtratatcagggggtagtggtttgagactgtccttgaattataatgttgacaagaagtgagaaattagtgcaaggtttaacattctctgttctgagaggtttgacatcagagggaagaaagataagtaactatagctttgattttgtcatggccaagggaggtggtcttaaaatcaggtagtcctgaaaatgcttggggacaggaaaggaccagtagtaaaggagaaattgcagctgttagtatagagaggtgcagttgattcagttaggtccatggggaggttcgaaacaaggaagcaagaatcattctcacaagttgaggaagaaaatagacataaaagtacaaaatattttaatgtaggggaaaactgagaaggttaataatgttctctctaccattgattttagtgaggtagtgactggtaagagacttgggagaccaggagaataaaaggtttgtaaaagctgctgctatggtctaatcattactattacatgttacgttgtatatgttgaaatgtagtcaccattgtgaaagtattaagagatggggccttttgggaagtgattaagccatgaggactcaaccttcatgaatgtttcatcagtgccctaataaaagagactgaagaaagcatgtttacccatgaagctagacgggaggaatggaagggccacaatgaagatctggccgtatctttcactacacccttacatttactaccacattatagccaaatagggcttttaaaccattttttaaacaatttttcttttttatctttcagctcagttattttgcttctatttttcctcagcttataaaaccccacatctctacttttgaaattataactattcattaaaactcgttcatttgttgctttgtctttgatcacagccagaagtgatatctatcttcggaacacctatcattccttgtttataccacttttatattacttcttatttacttcaaaaatttttgtttccactaaaagttaaattccttaaggaaagggaacatattttggtcattttatgttatttcacagtgccaacacaatgccttttctgtagtcagcatgtaaatatttgctgaacagatattatattacatatttatacttaagcagcaagatagaacctttaaaaggaaataatgttttcctatttctatgggctaattttaaaagtttatttttaaatagcattttattaacctcttctaatatgaatgtttttgtcccataggtatggcatgaattgccttattcagtttgaagattttgccaatgtgaatgcatttcgtctcctgaacaagtatcgaaaccagtattgcacattcaatgatgatattcaaggtaacaaaattttcactgcatatggatcaataacatgtctgaaattagttcataattgtaataatgattcaaattcaatcaatatatactgagtaccttttaaattccaggaattatgcttgctgatgtcacatactatttctcatctagttgcatatatttgagaaaagtactctctgactgtataatataccatattatcaattagctagaaaatgagctccaagaaatctgacaaaatccctggtgattatggctaaacaaagaatgaaatgtatgagaccatattattcaatgcttaaaagtaaaagtatacatacttctctcttcagcctatcttagccacaatttttatgctttaccccagtaggagctgcctttatgtagtatgctgcattttgctatttgtctttgattgtagatgcttggctacctgcttttgtctaagctgccaaattttttcctctttaagctctagttttttaatcctctccagatccatgcagagcccaccccccaatacacatgtcttactatgagaatcttacagrttctgtttcattattggaaggtagggggaagcacaggtagatgagctgaggagaaataccgtaaagaggttttgcaacttgaaatgagattgcaaatggcttccatttcactaattccaatgaatgtttttcagtgtttatcttatttgaattttcagcagcattccacattgttgactcaccttgtttcttgaaatactcttttctgttggcttccatgtcagggcattctgctggtttcttcttacctctttggctgtttgccttttctttttcttctgcaggttcatcctttcctgtctagctattaaatgacaaaacacttcatttttaaatgacctgctcagtgccagctccttttctttttgttctgctrtatgttcttaggtatatactcaggtccacacattcaattagcaaatttatattgccagcccagacttctttgtattccaggtctatacacccatgtctttatttaaaatctccacttaggcgcctataatcccagcactttgggaggccaaggcaggcagatcgcttgagcgtaggagtttgagaccatcctgggcaacatggcaaaactctgtctctacaagaaaatacaaaaattagcctggcatgatggtgtgtgcctgtagtcccagatactcgggaggctgaggtgggaaggattgaatcccttgagcccaggaggtcgaagttgcagtaagccatgatcatgccactgcactccagcctgtgtgacagagccaggccctgtctcaaacaacaacaacaacagcaacaacaacaacagcaacaacaacaacaacaacaacagaactcctgctggatatctcaaagttatctcctacttaacctactcccaaatcaaactcttatttccccaccaaacctgaccttcttccagtgttctccttttcagtgaattgctgatagctccctcttcagctttcccaccaaatacagtctatcactaaaccttttgcatttcctatcatcaaaatctgtgtttttcatagatttctcctcatcaccccagtgcaaattgctatcatctaagtaatctatccacatttactcttgcttccccttcttatatgttttctgcataatatctctacaatttgtcagatgtagatctaagtgctcaggcttttgtggtgaacagagatagttttctttttgctatagaaatctgatcttattagttcttcctcaaaataatttgatggattttcattgtacttaggataaagatgaaaatcctgaatgtggcccaaaatgcatggtctgatgcatgtttctctcgtcactcattctagccacacttcctttctcaggtcctgaaatgagccaggtttcttcttatttaagggtctagccaaatgttgatctctcatcctagaataccctttcttcccctcttcaaatctcatctcaattatgacattcatcattaaacccttctgaatttctgggtctgggtcaattccacctcataggctgccatagcactaattatttttcttttttccttatcatagtagcatttttatatatttatgcaattttttttttgagacagagtcttgctctattgcccgggctggagtgcagtggtgcaatcttggctcactgcaacctctgctcctgggttccagtgattctcttgcctcagcctgctgagtagctgggattacaggtgcgtgccactgcgcccggctaatttttgtatttttagtagagatgggtttttgccacgttggtcaggctggtctcgagctcctgaatgcaagtgatctgcccgcctcagcctcctaaagtggtgggattacaggcataagccaccatgcctgacctatttatgcaattaaaaaaatcagtgtctccattccaactaaattttaagctctgcgaaggcagagaacrtgggtattttgttcatcactgtatcattaacttgtcattaacatagccccaagcccacagaaagtatttaacgttagtggaacaaatcaatgtaatatgtctaaagcaggggttggcaaagtacagtctgtgagccaaatctagccactgcctgtttttgtaaagttattgcaacaaagccatgcccacttgtttatatattgtttacagtggctttcatgccataatagcagaattaagtctgggatagacactgaatggcacacaagccctaaaatatttactatattgccttctatgaaaagagtttgccaacctttggtctaaagaattaaacatgaaagagttggtgagtgttgaactaaggagttggtaggttgacttgggtaggtttgcatttggaaagattattcacactgtcttcagtctagagaacaggattgaattggagcacatttgaaggctgttgctgaaatctatgatggtggcatcttgctctaagaaagtgccagtgaagttagargtagacaggtaattagttgttgatagtgaaggtgagaaaggagccaaggatggagcctaggcttttgccttgaagaactagaagaatggcagggcagtaactgagatggataaagtgagagacactgttaaatgcagatgttaagagcttrgactrtagagtcacactgatttgctttgccctttactagctatggactttgaccaatttacataacctctctgtgtttaatttcttacctgtggcagaaagttatataacagcttctattttttttctttgaaacaatagatcagaagtttgaggaaaacaaaaaatatatgtaatagcctyaaagaaatatttatttctttgaaataaatgttattttcaaggaaaataacaatcctgttattttctttgaaataacaggattggaagtttgaggaaaataaaaaaaaacagatctgaaagaactattgtagagaactagagagccaacggactatgaaacataaaaggattcagtcagcagacattgcagattcagttgaaattaatactgtaaatgtatcatgatgctggctgagcagcttgagttcaacagttcaggaataggcaaggccacaatgaacagctggattcatctatgttagatattttattgtatttgtgcaaagaaaagacaatgggataaaagctaaggttaaaatgatgaccatgaccctaagctggatagggaagaaagtgaagataaaaagactgttagatgggggaaaggcctagacattccaatggggttgaagaatgggtataataaggatgattgaattagaggcctgggaagataggagactgtacaccatgagtaaagtattctaatgtagtactttcaaggattggttccgagtgatggcaagcacaagatgaaatttagaaggaagtcagtcgaagtggaataaaggtgaatgctattggaaatgaggtgatcaaagaaagtttaaatgtaaaatggggatgataatgtttctctcatggagtttacattgaggacaaaataattatttgtagaaataccctataaactgaaaggtactttataaataataatttttaggccaggcacagtggctcacacctgtaatcccagcactttgggaggccaaggcgggcggatcacgaagtcaggagttcgagaccagcctggccaatatggtgaagccccatctctactaraaatacaaaaattagcccagcatggtggcgcatacccttagtcccagctacttgggaggcccttgaacccgggtgrtggaggtttcagcaagctgagatcrtgccatgcattctagcctgggcaacagagtgagactccatctcaaaaaaaaagaaaaaagaaaaaaagtatatatataataatttttaaaattcaccatgcttaagtatttagtatggcagctatatacatttaacggctttaaaaatcctgagtctttatttcttttgagatacatgaaagtaattggtcaaatctttcttttccccaaattctttgtgatgttaattacattgttccttcagtgccaattttcatgacaaagatgcctaagttaagtaaactgtgttttattcttttttatattaaatttctttttgagtattcatgaaaagcaaatataggatttcagaaatggaataatctggaaatttccaggtgttaagaattgtgagctatagaaagatggcctgattttaatattatttgcattagtctattttcacactgctacagagaactttcctgagactgggtaatttatgtaaaggaaagaggtttaattgactcacactttcttatggctgaggaggcctcaggaaacttacaatcatcgtagaaggcaaagaggaagcaagcaccttcttcacaaggcagcaggagagagatgagtgaaggaagaacttccaaacacttataaaaccattaggtcttgtgagaactcactcactatcacaagaacakcatgggtaaaaccgcccccatgatccaattacctccctccctcaacacgtgggaactacaggtccctccctcaacatgtggagattacaacttgagatgagatttgggtggggacacagagctaaactgtatcagtattgcatactaacttgaagataccatgtataataatgataaagtgcctttggcgctacaaacacatgctttgtagaccagtgtttttaagtcacttgtcaattcattttgcagtgttctctaaaacagccaccagtaaactgttgaacaaaactacagaattcctttaatattgtatatcttctgattttgtgggtctgatgtaaatgtccatacaaagttaaagaccagtattaaataatttctaattatcatgcagagttaataggaaacagagttcagtttaagaaaacgaatgctaaattcaaattatcaaacaaaacaagcaattagggtcaggatttctatccatcaaggccaggaatttagaggtcaggctctggggtacatcagaattaaaggcgggggcacaggatatcagaagcaagagccaagcctaggtcaagagcagtgcaagaaggasccctgaggatccacagcakaatatgccccccaagcaggtcaccacaatggaggcattaaataactagtttttcacgactaattcggcctaaaatataatctgcacatatatagtcttttatttccatataggaattttaaagtattactgccttaggaaataaaaagataggtttgagaaaaatatgtctaatctctgactagagaaaacctttggcaagttattggggttctgactagaaatgaccaaaccgttttgtgcacatcatgcaaaatcgtgcccttatgacacagtttctccgtatggttcttttttacctttttaaccttatgttcttaccattatgcccacagatgtaatactttcctctctgcaggcacagaaattgcattccagtgccaacaaaaataattatctaaccattacagccttaccatgtaaataaatgtgtttacactggacccttgggtggactcttttctttttttttttaaacacatttgttatttaaagataygatttatgaaaagtatttgattaaaattgtatatacttagaattctactgttagttatctaaaataaccttaaataatatagattttgattcaaaatgtattttagacatgaatgcattctcattataaattattttaaactggaaaaaatgcataaattgaatctattaagaaattggccacataattatataatctgaagacaaacagaattcagcaaattcagactgaaaaaaataaggtttcaacctctagtcatttaaaataagctacaaaaagaaatttttcttctcatagtagcctctggaatagttactctgtaacatgacactctaaatattgcacatagaaatttttgccataataaactagtttgacttgttagtatttttaaaaaatacatttaatatattaggctacatttttgtaaatatagtgaaatcttatactgaatgctttgataattgaaaagatcaaaatcagacatggtagaacagataytcacaaaaggataccatggccagtaaacatatttttggagtttagccttactattaagtttttaaaaatttattaaacagcaagtgagaaactgattttctctatcaagctagcaaagatttttgttataaacccaactgttaatgatgcttttagaaaatgagcactcgcatccattgatggtagaagtatagattgatacaacttttggggagccagtttgtgtcaaaaacctaaaaacatgcagatctttacctgatacaattcttttgtacaaatttatcctgaagaaatagtgatgtgcaaattaaatatacaaagtattgcaatgctatttttaatagcaaataatcagaatcctctaaatatctaaaaatagaggtttggttaaatgaattaccatatacccatagtatggaatattataactgtacaaaataatattttaaaatatattatagacatggttaggtattcacaagatatttttaagagataaaaagcatgttaaaatagtaggtatggaatgaggtattttttgtaaattaaaattttttgaatatacacatatcagtatgagacaaaaatttgttaagactaaacatcagaatgttgaaagtggttacagctacacagtgggattacaggtgactttttttgtctttatctggattttaactgtttaatgcatttaccacaatgagcatgtatttatgaataactatttcaactgaaaaagatcaaacatggcacaattgttgagccataatatcaaaaatacctaatatataatctttcattagcaagataacttagtaccaaagctttttacttccattagtattctttccaaagtggtattgttgttgatgttgtaatttggaatttgccatcatctcatatcaatgacattcttcattatgtcaccacttatttgacaaaatactagacataactgatcgtagcagacaagttatacaaagaaagaaagaaaatagcattctgactatacttcttcctcttactcatagatttttctgagttaatactcatttaagacttacaattaatattctgaaacatttttatgtgtagatcctatatttatatgtagatcctgtaagatttctttatattaaaatgcaaaaaaaawttagactatcttattgtattaaaatgtgttttgtcaaatacttatgagaaaaagctcatgaattagaatgtaagaatattttgttgaatatttttattacaaaagaatgtaacatggaagaattttaaaatattactttgcctcggccaggcacggtggctcacgcctgtaatcccagcactttgggatgccaaggcaggtggatcacctaaggtcacgagttcaagaccagcctgaccaacatggagaaaccccgtctctactagaaatacaaaaaaattagccgggcatgatggtgcatgcctgtaatcctagctatttgggacgctgaggcaggagaatygcttgaacctgggaggcagaggttgcrgtgagccgagatcatgccattgcactccagcatgaacaacaagagcgaaaccctgtctcaaaaaaaaaattattttgcctcactaataatgacaccccactactttgggaaagaagttcatggttaaaagatggcttgttttcctgtaacttcaacctctttctctctattgccttcttccctttagtctatgaccatagaccatatttaaattgatttcagtcttaaaattattgcctccattctattttcttccctccatcagtcaatgtctttcttcccttaaaaacataaaaataagatatttgcctcaaccttgtttccctcccaccccatctccatcctcaccccattcttccttttcttatctaagcttctccaaggagtgttccacacctgctctccctgttcttcaccttttatttcttcctcggaatactgccatccatcttcagccctgacatgcatgccactaaaaacggctctttgataggtcacaggtgatgtaattgcaagatccaatagcaatttttcattttctttcttgattgacctttgttctttgtcattacttctctctgttttcaggtaagtatatgctcttttacctcttygataattttttctctgtcaatgtgtgttataacaaaaatgtgttataacacatttttctgccctctgttccttaaatgttcatgttcatttaggttctctcctttagccactcactctgaataatgttatcattccacacgacctcaatacatgttttaaaattctaaatatctgtggcccagattgtatgtaactatttcttgatactgctatcagaataacacatgacaggaagcacaagctttgtgcaaaagctcaaaattgwacctcctaatttgtttgcatacccccagcctcaaatttctcaaaaccatcacccaccrctattctctgaatttaaaatctttaaacaccatctgctacctataatatattataattatatatacccatatatacctataggtactattagtatatagtagaaggccctacatgatctgaccccaaaacttctctagcctcatatcactttgcattctagtaaggtgtgtttgcttcagcaacactgcacacagtttcacatgtgttttatgttctctctccttttatattttagaaggctgggcatgcagatggaggtagtattctgagtctttactgtaaggtgacttggttgggccatttccttaggtaatcttccttttcagtctctttggattccttctcttacactgctgagattccacagaaaagatttttccaatctcgctcctgatactacctttctgccagtgctctttaagtaggagaagattggagggtctccgtattgagtatgtaaacttccagttaagcttgtttctagtatggaatccttgcccccaattatgcctggtgtcttatactccaatgaccctttccagaaaatgagcctcaagttttctttcaaacttccagagtgtggggaagttgactatcttctagaaggagagggggatgcagatctgggttttaactgatatatatatatatatatatacacacacacatatagagagagagttatatataattatatatataatttatattatatattatattatataaatataatatataatatataaatataagataattatatataaatataatataattatataatatataatataatataattatatattatataaatacacaattatttaatagatcaatataatataattataatagattatatcaatataatgtaattataataggttatatcaatataatgtaattataatagattatatcaatataatgtaattataatagattatatcaatataatataattataatagattatatcaatataacataattataatagattatataaatataatataatctaattatataatatattatataaatatataaatataatctaattatataatatattatataaatatataaatataatctattatataatatattatataaatatataaatataatataattatattttatataattacatataattgtatattatatataattaaatatatatatttaattttgagacagtatctctctctgttgcccaggctggactggagtgcagcagagcagtcatagctcactgcagcctcaaactcctgggttcaagtgatcctactgcctcagcctcccaagtagctaggaatacaggcatgtaccatcacacccagctaatttaaaaaaaaaatttttggggggtagagatgggtatctctatgttgcccaggctggtctcaaatccctgggttcaagcaaccctcctgccttggcctcccaaagtcctgaggttacaggacataaacctctgcaccctagccttcttaacagacttttgaccagcttcctgttttcaccctctcctttatccctacttccagaggcacttggtgcctcctatacctgggtttttgagagttttgctgtatcagtctggtcacttattccccactgccggccaacaattcagctttctcaagtctgctaagtcagttgccatttgctcatttagaagcctgtcagcttctaaaatgttgttgctacccttttttgctacccttttctcttagtctttttaatttttttcttttcgaaaaagcagttttctattgttttagtagagtttgttggggaaaggaatactaattgtgtgttcaacttccatttctaacagggagtcatccctgccttcatgtctttgcatatgcttttcctactcattgtgtcctcttgtctgaggttctgaaactcttacattaatcaatactgtgttcagggagtatgcactctaaatgccttgacctttgcctagataaattcaccymtccccctgctacttctagttcttgtattttacccaatctatttagtagcacatgaggattataattatttgattacatattgatctaccttactaaaatatatatggtaattttaaccagatttaacaaattattgcattagtagaggctattctttgataaaaggtgagacttttatttaacaaccatatgttgttatgtttatgtttatgttaaagtcgtaagtttctaaaatgttaagaaaaattcgatctgtttagtatcttgctaacagtgttaagtcctctttaaaactgatagtacaggcggggctcagtggctcatcacgcctgtaatcccagcactttgggaggctgaggcgggcagatcacctgaggtcaggggtgtgagaccagtctggccaacatggcaaaacgctgtctctactaaaaatacaaaaattagccaggcatggtggtgggtgcctgtaatcctagttayttgggaggttgaggcagaagaatcgcttgaacctgggagatggacgctgcagtgagccaggatcgcgccactgcactccagcatgggtgacagagtaagacgctgactcaaaataaaaaaataaaaataaatacaaaaactgatagtatgaagataaacctaagcacgaattctgtctgacttataaaaagcttagttttaaatcttaaagtaaaacttattatggaataatttattgtaaaaatttacagttttatgaaatttcaattttctacatgtattcccttctctgcaatgaaatttaaatcaaggtagtaccaggccatgtacaagaatcatgttcaagttaaatttttgatagtgctaaaaatatctttctgattttattaattaattctataaatggaagattagtgttttcattgtgttctcaggaaatattatgaaatatatctttaaatataatgtatgaacttaacacattttgagttttaagtgatctagcataaccatatgaaattaaggtaccaaataggatattttagaatattttctgtctatctgaccgtaartgtccaattcgatgtaaataaaaataataatacaaatacagtgattgctgatgatacttcaactttgatgcttcaattggttaaatcttatagaaacccttaaaatcatagaatctcagagttggaagggagcttagagttccccagatccaaacttctgggcagtttacttcaaaagaacccaagagagagatagcttgagctactatttctgaataacttcttatttagtaagtggatatctatacctctctttctagtttaaattctctttcatctgtttaatgactctagtgaatatatcttgcatggggaaaatatcattctaatcatgtcatgatatattctctacatacactagccatattttttgcatagattttcaccttaagtaatgtatagaagagtggctttttcataatatatgacttagcacagttcataattattgcaatagtgactctaaattgcatgcattttatttttgtagtacacattgtgatcctaaagaaaaggcacatatgggactaacaggccttcaacaattattgtttattgtgttcttatttgyggctacctaattatacaagaaagaaactaaaagattgaatagaacaaatttactgattgtgaaatgttgattacctttgatacttgacatacataacgcttcatcgttgtgtcattcatcaaacctagtctaatctttgttttaaccataatgttaaataagggtatttaacgtttagctaggctttactacccagctgagtgatgtaggaaacattataggtagaatgttaccttggaggagtaaagtatagatacagctggaaagtgttgcaagaagctgctgctttattagccataaagaagttgagctgtgtaattacacttaaagcaagagaactgctttgtgatctgtgaatgcttatatggtaaagtaatataattggaactggtgaagtttttatgcctatgagacatgatgaggaaaatataatttttatcttaagaaattttgcattagttttgtctagtacctttgggatccaccagtgattttcataggtaaaaagtctattaaatgatacaatataattagattttacttgccattaacattaaattccaaatgtatcaaaaatattatgagcaccaataccatcatcagcaagaatttactatttgtgtcctcctatctcaggttctgaaactcttacattaagagtttctttgtgtgaagaagagtttctttgtgtgaagcctactttgtgtgaagaagagtttctttgtgtgaagccttctttgtgtgaaggggatcattaatagatttcaaaaccccaagagtaattagacrgaagaatctaatagcacttattactcttttatatcataaagtaaaactactttacagatgaggaaactatctatttgatgtacacaataatttctctaaattctttcagctagtcagtgggttgttgagctagaatctgaggaatccagatcccatcctttcattgattatgtcactaagataagtcacagaatcttcttttagggaagttttcaagaatagtagtaagctgctatcttaaaatattgatgtcagtagcctgggaattttaccacgtatgcaagcatgggataagacaaccacaggtttctcttctgtaccagttaacctgttttatgrttatttcaagttgtgaataaaagcttgaaaattggcaggatctgtttgaggattactcaaggatatttattacttgtttcaggaacagcatctgttgcagttgcaggtctccttgcagctcttcgaataaccaagaacaaactgtctgatcaaacaatactattccaaggagctggrgaggtatttgccttgtrtaatacttatgttctcctaaactaacatataattagtgttaattgctcattaactcaagatttgacgtattctttcaaatttttagtatattatgactgtaggctttatggaagattcccaaattaagtactgagacatattaattattcataggataatttagtacagaagtaatgagatatttttcacagttttaaatttgtggtattatcaaatgttgccgtaggtatttgttatgcatatctaaggtgccatacaggaaaactttccaatgtatgtgtatatatgcaagcttttatgtatttaagctggtttatctgatactggcttttagtatactccagtgttacaaaaacaagtttttaaaatttgactcacaattcagtgtgtatgtatgtaactacatatgtgtttttaagaaaaaayattttgaattagggatttgtagtatattattactgttcacatgcaaaaatcccaaaatattttaaattgttggaaagagactgcagsaaaaccaaattatgctttgttattacttgcttaatttaataatctgaaagaagaaaactagactcctgtaataataattcatccccaaactagaaattaaaatgttagttgagtttgagtttcttatgggaaaactrccaaaatctctttagaattatagaatgtaagtaatagagaaatattttgtggctatatatatatatatatatatwtttcaagaaactttaaattttcaaattgaatatgattatgaacamaacaatatgttacactggtagatcattgtttatgtcatattggttttcattttgcttgtttttagataaaacaaaatatgtgaagttagaattcaaatgccacgatacaaatatgtgaaagtattcagaatgtaaatcacaaattcactttcacattgaaataaaaatcaaggctaaatgacagctcattaacatttgagttctctattttgcggattattacatgctgtatttaactttagtaaacctctttgaattttcaaagggtttgatgaatggcacaggccagttcttgatactcaactaggcagaagaattcatggttggatgattcaaaactagcacttgtttgtccctggaaagatattggaaatttcacagataattataaaatttaccaaataccaaggaagttgattcctttaatcttgcaataaatttcacagcacttttggtatccaaattagaagagtaagtagatgcttggaaacacagatcttttatttttcatcagtttcattctgttgcctaattggtcaagttcccatccaaatgaccaagcttctttcttcaaattcaattagagtagcttgaacctaacaataaacaatacagttcaatgagcaaggttgaccagttcattattttgaattcagtattttttcttggagcaaatcttggttgtattaacaggattaaatacactgacaatcaaggatatcaccagtttatctgtggccaaatagcaagccacataatagtggctctgttgtagtaaaaagggtaaataattgttatttggcttaacctaaatgtgacaaaaatattttgttcccactaacaaagacaaaatggggtgaaatgtaacccttaataagatatcatgtagaacaactttaaaattttttcttttcatcactgaggctgccctagggattgcacacctgattgtgatggccttggaaaaagaaggtttaccaaaagagaaagccatcaaaaagatatggctggttgattcaaaaggattaatagttaaggtaagaatttgtcatttttaaccagaataaagataactatgccattctggatggccatctcaaagacaactctgtttctaccacctccctttacactatattaaaagagtagccattaaatacaaatgatcatgtcatacagaatactgatactcttctgaataaagaaaactatgacttaggaacagattccatctgcaatgtgagtcggctccttacacccctttgaattgacagtccatttgaattagtttagttttctttctttctttccttcctttctttcctttctctttctttctttctttctttttctttctttccttccttccttcctttccttccttttctttctttctttctttctttttctttctttccttccttccttcctttccttccttttctttctttctttctttctttttctttcttttcttccttccttcctttccttcctttctttctttytttctttctttctttctttctttctttctttctttctttctttctttctttctttcttttctctctctgtctctctctctctctctgtttttgaggtagggtctcactttgtcactcaggctggagtgcagtgatgcctccatggtcactgtagccttgacctcctgttttcaagtgatccctatcccaccttagctttctgagcagttgggaccacaggccgccatatccggctaattaaaaaaaaaaaactgtacagctttcactgtgtttcccaagctggtctcaaactcctgagctcaagtgatcctcctgcctcagcctcccaaagtgctgggatttacaggcatgaaccactgcacttggccagtttagttttaaatttagcaatttgatattgatacagatgaaacacctagatatatcactttttattgagagttggtgatcaaattgtacattagctagaaagaaatgaggaaagaaatgaaatagctaccctttacctgctacttcctctcaaccaaattcttaagggtttgaatgggaattcctgagagaaaactttgataaatagcttgtttgaatgttatcttacctgagcttgagtttctccatctttaatagtgataatagtatctacttcatagtattattttgagaactaaataaaattaggtttgtggccatattgctatatagttataaggcattattaatacttgtgccacctgtgcatatcaatcattctttaaactgctagaaaaaagtacatataaatccccttcctatgtgaagatgaatgattaggaataaataatggtaagcagtgtcttccggaatttagtatagaagtaaatgtgaatgtgtacatacagactttctggaaagctgttttatgtgtattcaaagcctttaaaagtttatatttttgagccactagtttccattcaaagaatctatctcatggagatagagatgtatacagtattttatgtatgaggatattattgcagcattatttacaataatgatatggtttatcacacattaattataatagtgatatgttacacttacctaaataaaggatgattgtcaaatgaattgtggaatagccacattagtatattgtataggctttaaattgttttcaaagagcaataaatgacatggtaaaggattcataatataatgttaggtgaaaaaaacaaataccatagtatatattattttttatttaaaatacagttgtatatgaaagtcatagaaggaaatatatcaaatgcatattaccttaaaacatttatttctaatgtcttttttatatattttgaatttttagtaatctgttcctttaaagctagaaaaatatttgttttttaaaatyaatatacataaatatgtttctttaaatgaagaaaaaatatatgcataacttttgtagtaaataagtatatataaagacagaggctttcagtatggatttcttggcttaaaaattgctattgctggctgtgcgtggtggctcacgcctataatcccagcactttgggaggccgaggcgggtggatcacgaggtcaggagatcgagaccatcctggctaacagggtgaaaccccgtctctactaaaaatacaaaaaaaattagctgggcatggtggtgggcgcctgtagtcccagccacttgggaggctgaggcaggagaatggtgtaaacccaggaggtggagcttgcagtgagccgagatcgcgccactgcactccatcctgggtgacagagcgagactccatctcaaaaaaaaaaaaaaaaaaaaatagctattgctttgaagaatcagcatagtatgaaaattttgtacactgtcatcatgtgacaagttgtgggcatgaaataagaatgtttattgaataaaaccacctatggatcgggtgttgttctagactctggggattcaataaagcccttgatcttaggaagctgatagcctagtgagaaaaattcaagccactagttacagaactagaaccatatgaaagtattataaaaaatatgttcatggtgtcaaggtgcacaggagatgatgctcccaactgcactaaggaaaaagatgggagtactgaggaagatatcaagacaacgtgtctattaagctaagttggaaagcaagagttaggagtttatctagggtctccatggatatcttaaatttcctatatacaaaactgaaacaaaggaaatatgatggcaagttcactgagagatcttgatagaagctaaagatgatgcctttcatctctttagatcttcaaagttctatacagtgtgtagtacatgcctgacaacaaatattttgttaataaatgagtgaataagtcactttacagacaggagaaccagcatgtacaaaataaaatattttggtataagggacatttacagattatattagaaaggaagcagatgataagagatgaagggctttccgaaccctgaagatgagcaattaaacctgtgcaggggggtttgcctctcctttactctgatggcattgtggaggatggattgcaatgaggggaaactgagaaaaagaactagttacaaagctgttgcaataatccagatagaaattaattggggcataaccagaggtgagtgaaagaaacttaattcagtaggtatttaggaaatagaagtggcatacttagtaactgatgaaatatggaaggaggaatagggtggagtggaggaaggagtctagatggactccttggggtctgtctagtaaggaataaagaacagaccaatttaagggaagtaacaggatcagtttcacacatagaaagtttaaggtgmttgtggagacctcagacagagatgtcccattggcagttggagatacgggactgatacagaggataagtgtctgggttggagatagggatctgggggtcatcaccatgtaaatagtaggaatagtaggagctgtggagaaagctatacaaattgttgtccttagggatataaaatattcaaaagtccaaaaagtggaagtctatgtggttttattttgtkgtctctgatgacatttttacctgaaatctgtgtaaaaatacatagattttagcatcttgaataattttaacacacatttactgagctgagattccagagtccatggatataatacttggaataactgtgaagtagttggctagatctagtcagtctctcttacttcgtgtcttttacttgccaaaataaagaagttcatatattctgcttgccaagataaaattacattttaaaaggttgttatatatttaatagcttgtayactatttaatataaaagatacatattaagtttcactttttctttcatgcttttaaacagtcaaaatccttatattgacttttgttgcagaactaagccttagaataaccagtaaattagtgtaatcccattttcaaatttacatgattcttttgtgttttttatccttcattcttagtacttttatatctcctgagaaccaataataataattttattaattttattaacttataatataattgtttataaaatgtaaaaataccataaagttttaaataaaaaattttcttggtgaaactccactttttaaaaacaccatgtcaaaaactcaaacatgaactgtgaagtcagctcatctttgaagttatatcatcatcacgctagataattattattccagcatattttctctttcaactttcaacatcacaggcatagcattttccatcatttacaccatatccatatgtgcagtggaaagagttaatgctatagaataccaatattgtaaataattcatccatatcaccaaggttaattgaagtcaattacttggttatggatcatactcaaatatctttgtactttatagtaataaacataagatgctttagttttttatagtggaaaataatttatatattaattttgtcaactaatattaatacattttaatgtaaaactaatacttagttttaaaaaaccttccaaaacaaaaattaaagtaagaataaagacagtgaaaagagaatgaaaagggaatgttgcctagtatttgcattttgcagtgaagatttggagcattttcaggaggataagaagccacaaaacaaaccaggtttaatctttgtcttaaataaatattatattttcgctctcactaataaacgaaattaatgctgacagaacttcaaaataaaaagtaggatattaacagaycttacgaaggatcgatttcatctaacccagaatgaagccatagactggtttgaatttcgtttttatttttattttattttgttttgttttaaataattttgctgtactgtatttttctgayttatagttaaatgtttagctcctgtagaaagagatggtcaataaaggtatattgtatgttataaaggtagttttgacaatatagttatttcattcctgaaagtataatctctaggtcgagggcttgaaactacagactatatagtttatctgctattttatcagaatttttgactggtgctgccttcaccctgaatgatggttaatacatttcatacaatgtggtttaataaaaaattctaactccaaatagactatgtaagctggtaaaaagtatctggcttgattgttttctccctcttttttatttcaaatagagtatgatcaatgcatgtaggtattaaaaagaacagaggccaaagattatatgcatgagtcttagaaaattatgaatattgatttttaacatacaaaattaaatactgatggagttcaccacctactatcttacattaaaaacactccatgccccttactatacttttgtcacataatttatcttagtttaatctgtcctgagatgatgaaacacagctctggactcttttagcaagtgcacatacctgatttgcaacaaatgcagtgaaatgctactgactatgtgctgagaaagccctgtccacagatccaaagaggggccaggttcaactctgataaactaatgacatgacagcaaaaacaggccagtaaattgggggtaggtagtccaactggggcttgtggaagagtttttctagtccctgtatgtaggaaggaataaatatttatcactggtaatctagaattaatttacttattcctatcctgggctgtggaataatagcccaaaatcttggcagcctttgcccccattctcctccctatgcccactataaacatgtgcttttgaaaaggtagtaattaaatctggttatatcttctacgatatagtaagaatcatcacaatataaagggataggggagattaaagtaataatatcacaaataaagtttcagctatccataatatgtttgaggtaattagagactcttgaaaaaaacagagagagaaaagatgcatcatagaatttgggatttctgaggtgagaggtgcccacatgcactttgccaaaagaaggcaaaaggatttcagcaagggatcctgaaaagggagaatgaagggaaaagacatctactcatctccataccaactgaagttattggcataacgaatatgtattccaaatcagattttgaaaaataaagaaaaataagccattagtctagaaaatagaagtccaaaggtacaggtagttgcctcagtattaccggatttagaaaaggttgtcacattccagtagtttctttaaactaggtcatcaagtcaattttgaaaatggtagagaacatacttgggagacattttgtgtgtgtgtcttttgcttcttctgttttgtcaagtaagaccttcagtattgctagtattaccatttcgtgattcctggacttttttcagcattctttcagcacttgtaagtcataccaggaatcaagcctttgaaagtgttgccatgggtaatttatgcttcttactagatggaatgtcttctggctaagttctggcttcagtgtctaggagctgccagtgggtatactatgattaataaagatgtttatgattaagtatatatctttttcttttcatacattattcatctgtcttttttattatttgtttcccattctaggcaatttaaatatttttcattatatctcagcttgacagccaaaaaagctgtgacttccaatttatcttattctatagcttttcttctttagactcattattgtatacttttttgaaaacatagcacataacctcttaaaaacgcatgtggtagggatatgatagatcatttagtacactgattctcaaaactggctaatcatttcttttttttattttttatttttttgagacagagtctcgctgtcgcccaggctggagtgcagtggtgtgatcttggcttactgcaagctctgcctcctgggtttatgccattctcctgcctcagcctcctgagtagctgggactacaggctcctgccaccacgcccagctaattttttgtatatttttagtagagacggggtttcaccgtgttaaccaggatggtctcgatctcctgacctcgtgatccgcccgcctcagcctcccaaagtgctgggattacaggcatgagccactgcgcctggcctacagcagattattaataggagaaaatataccaaaactttaagtgctggaattatgatttttttcttcttcacaaaaattttaattgcaacaacaactagcatagagctcttactataaaccaggtacagtcctgagtgttttacatgcattacatttcatttaccccacaaacaacctgatgaggtagaagtccttattatccttatttacagatgaggagacaagcacaaagaggttcatatgtttcaaattttttaataattcagtatattgcttttaaaaacagagcctgtctctactaaaaatataaaattagccgggcacatgcctgtaatcccagctacttggaaggctgaggcaggagaatagctttaacccgggaggcggaggttgcggtgagccgagatcgcgccactgcactccagcctgggcaacatgagcaaaaactctgtctcaaaaaaaaaagacaaacaaaacaaaattaaaaacaacaacaacaacaacaacaacaaaaaaaaacagagcctggcatggtggctcacgcctataatcctagtgactcaggaggctgaagcgaaaagatcactcctgaggccagaagttcgagacaaccctgggcaatatagcgagacccccatctctaaaaaaaaatgataaattagccaagcatggtggtgcatgcctgtagttccagctactagagaggcttaggtgggaggatcccttgaccccaggagttcaaggctgcagtgacctctgatccacagcactccaacttgcatgacaaaatgagacctcatttcaaacaaacaaaagcaacagaaataaaatgataataccctttaaagaaagaaaattgtactatcttcattattaacaatttgcaaagactatgacatactatttgttaagtttttgccyggggtgattctgtgctatattgaaaaggctttgagttctagtacaatctcttgccttgagcaagtcccttaaaacctctgaacatgtttccgcatatgtaaaatgactatacttatacttgtcctgcttctcagaattgttgaggggatcaaatgaaatatgtgaaaacaacttgtaagtcatcaagtaccatataaaattaggcagtgatccattatgtagtcaaatctttaaaatttgcagctagaatattataattagatgtttactagataacacatggcgcattcataatcagaacattaaaaacaaaaacatataaaatgcatacttactgagaaaatctaacaatgacataaatatgacttcaaattyttttcttagtcagtagcataaattggtagggctaaagctgaagccaactccaaattctgagacctgctataaaacacaatgtgtgacgaacaatataattatttaaattatattttgcatggccatttgttaatgctagttctcacatgtctgtaaaattaggatttttaatatcaattaaatgaaggactttgttttgttcactgttacatctccattgcctagaacattgacatataaatatttgttaaaygaatgaatgaaataacattctgacaattgaagaagagattttaagaatagctgtaacacatcatacataaaaatgttaagcataaatatttgtaatatatgtaccgaaatttattgaccctcacatgtttggcagattcttaattttttcttactggctttacttagggacgtgcttccttaacacaagagaaagagaagtttgcccatgaacaygaagaaatgaagaacctagaagccattgttcaagaaataaaaccaactgccctcataggtaagcattttctcctctcccttctcccctaccccttattttgacctgattgttttttttactaccaatttttgaggtataatttagcctttttgaattcaaaaaactacacgttcgctcaagcgacagtaccctgtagagacctagatttttaactttagtcctgtcgtctttctcttactgatctgagatgaagcgtatggccccctcctctaactcagcctgttaatacctggcacgttcagcacttttctaggcttgattactccagatagacagtggttctcaaataagagggatttttgccctgcaggaaacatttggcaatgtctggaagctttgagttgtcttaactagggtagcggggttggaagggagtaaagggaggggctactgacatctagcagatagaggcagcggaatgattctactaaatatcctgtagtgcactggacagcccctgcgacaaggaattatccagcctaaaatgtcaatagtgctgaggttgagaaatactgcagtagataagaccctcctggaagacagggatcacatctcacaaatctttattttccttatagcacttaatacagtacttacacaatgcatgtgcagtgcaagactttaaagtggttttagaaaactcaaaggaatttatgaaactttattctttattttgtgcatatataattttgatttttaccttgtattatactccattcctacaagctcttgtgaaacagatgacaacgttgaaaataatgatgataactacaataaaasaagtacttactccatgacaggaactttactaagtgtttaatattgtttttacaaaatatattctgtcaataatcttattgtttttcatttccattatgctaattgctttattcttctgttaaagttacttcagtgggtggtactttacttttgcagatgaatcagatggttgtcttaagtgatagcgttggtttataaaacttaattgctttgtagcctgacaagactgaaatatactcatagaattgcttataaagaaagtttacacattagatacaaatttccaagtgattggtaactaactcaatgtactatggaagccaaatattatctttagtttttaatagatatttgtagatttgtgaccctaaggattgtaaggattgttggcattaacaaacttgcctctttttgtcactatacttgaatacaaatagtttatatagcattttgtttagggtctattagaaaatgagctgatagatatcattgatttgaggcatggtcttcttgtgtgaattaaccaatgatagtgttaattaccagcttcatatttcttcattaggagttgctgcaattggtggtgcattctcagaacaaattctcaaagatatggctgccttcaatgaacggcctattatttttgctttgagtaatccaactagcaaagcagaatgttctgcagagcagtgctacaaaataaccaaggtaaagtaaaactataacagatattttaataatcaaatttttattcattatagggaggcctaggatatctaaggtgcttactgtttaagtttaaaaattatacaaccaaaatggaaagaaaagcacacaaatcagagggataagaactatttccttttctagaatgttgtataaatcctcttcttcaacaaaataaaatacatattttaatgttttactgataattttccacaagtgatttggaaatagatatctaagatttaaacataaaagttaaatagaaaggaagcagcttggttctagaggcttattaaaatagcttttaactagctattcccaaacactgaagcatacaatgtaaaaccacaaccttatttttgctttgctaaatcctgggtttgggttttggtactatgggtggaacatttgggcaactatcttgacatccagccagactgggataggagtcctcaatgcttcaacattttactatgatttattttataccatgtttgtactaatatgtatttggctgatatgctgaaaggagccttttttcccttcaaagactttaaaatatcattacaacaaaatagaggttgagtcatatctatctaaaatgtttattttggaaagaaatccaaaatgaactagagaggtaaacatgaacgctatgtcactctgcattaactggaacttaatggctctattttaatcatatatccttaaatgctcaatactagaattagtgatttttctttttggcaaggagccactccattgtttatctctcttatttgggatggcatcagtgttctcactgattttaatttttatctcatctctagattggggaatttgcctcacattattcagtagtccttaaatccttaaaggaaaaaaaagtcctttcagcaacaaccaagtcttagcatcatgccttgcacctactaggcatataataaacaagtgtttaattaattattttgtcttaatatatctcaacaggcctcaagggttaagagacttatctataacacacataaacaaaattagccaaatttatgtagttgtattttaaactttgaatgtgtctgatataaatgtatgcctcaactctttcttatcatcttgcctaatgttctatgtttttctacataaaacattgaaagttattttgaggatgaaaatttagacactggtttggctaaaggattggagaaaaaggaaaggtctgcctgttgctggatgtgagtttctgctactgtaggcacaggtgaagataggaaaggttaagttacaatatacagaaagactattgaaccataaaaatataatctaaaaatggtatgggaaggttcccttcaccatgttaataacatatatatatgagaatatttagctagctacagtactgtcatttatttaatgacatttctccttaaaatatggtgattatagaaaggcaggaagagtgggagtgcaggagtgggggagatatatatatatatatatatatatatatataatgttacaggcctctttctcaaatataattttccaaaacctttatatatgaagtaataatttagttacattagaaagttgtttataacaaaatgttttatctgctaaagagcttaaggtatcagacttgtctgaaaacaaaaccgaattctgtgcaaaacataacagtgtcttataaacagctagatgagaatttgtttttctgcctcatctattttcatctttttgtctctcaaagaaggttgaatttctgttatacaactttaagaacaactaaaaggtatattatgacatttgctaaaaataggttaatattaatatcattatttagactctagatccaagagatatgaaagttaaaacccattctgtcatcgtttaaactatgccttggggatttgatgctttagacttttcaaatagatttcttagactgtgatgctttatttgtttagggtttctgattcctactttgaagcctaaatactctcaactagatgtccactctcaccatcacagacaaatgttcttttgattagcaatatgaaatgcagcacctaacaggccctagttaatgcctttttttttttttttttttttttttgagatggagtctcgctctgtcacccaggctggagtgcaatgaatggcacgatctcggctcactgcaacctccgcctcccagtttcaagcagttctcctgcctcagcttcctgagtagctgggattacaggtgcccaccaccacacccagctaatttttgtatttttagtagagatgggctttcaccatgttggccaggctggtctccaactcctgacctcaagtcatccaccctcctcgacctcccaaagtgctgggattacaggcgtgagccaccgcgcccagccaagttcatgcctttttaaagcaagcagtacatgagattcctcaaaacaattatgacaaaatattaatactaggcaaaatgaagacaattgttgaaaaatattgataacttaatcttcttcttccttgccaattctactcctgccaatgagtttgtttcctatgtgattctccacataactattttattttattttatttatttattattattattatttttatttttttttttttttgagctggaatcttgctttgtcgcccaggctggagtgcagtggtgtgatctaggctcactgcaacctctgcctcctgagttcaagcgattctcctgcctcagcctctcaagtagctgggcttacaggcacccaccaccactccccagccactttttatatttttagtagaaatggggtttcaccatgttggccaggctggtctcaaactcctgacttcaagtgatctgccccactcggcctcccaaagtgctgggattgcaggcatgagccactgtgcctagcccacataactctttacaatatagaaatatatatgattttcccagtttttattttggaaatgtgtcgattcctaaaccccaacctaaaatatcattattttcaatacttaaatattagcccatcattttttatcttcagatgtctataattggaagcctatatagaaatggttgatgagcctatcggttgaaccactgcagagaatagagtgatggtcttagggcatcctgtactttgcatgctcctcctggaagtaaagagtaagacagagaatagtaataatcacccattccagaactggttgcacaacatcacaaaagcttgtccagacttattagcaagttaataaaaaactagacttctttctaagtacttataatttaggctgtggggtagttctgttatgatacatttgttttaaaatattctgcttctttttaaagtgagttgtatgtgtctttgttgtagggacgtgcaatttttgccagtggcagtccttttgatccagtcactcttccaaatggacagaccctatatcctggccaaggcaacaattcctaygtgttccctggagttgctcttggtgttgtggcgtgtggattgaggcagatcacagataatattttcctcactactgctgaggtattgtaaaatcctctaagtttaccaagggyttaaaataccaagtgtgctcagcctaggttgtctaatgttttatttatctagcatctcagcttactctctgaaagaagtaaagtctgaagaacttcccagtggagtataaggggtgggtagcatgttcatactgactcacaaacgaaaggttcttcttcagtagtcattagaaaaattgtgtttttgatttcttaagaggaacatttttgtgtcttcacacatcagatcaagttctgtgacagtgatgggacaattaaaaatattgtttccagggctgggtgtggtggctcatgcccctaatcccagcactttgggaggctgaggcaggcagatcacttgagcccaggagttcgaggccagcttggccaacatggtgaaacttcatctctactaaaaatacaaacattagccgggcatggtggtgtgtgcctgtgatcccccctgactcaagaggctgaggcaggagaattgcttgaatccaggaggcagaggttgcagtgagctgcgattgcactactgcactgcatcctgggctacagagctagattgttacctaaaaaaaagcaaaaacaaaattgtttccaaatgatgattaagtggtaaatatttccctgttgagaacagtgcttaataatgaatggcattttgaaggtttaaagtgaaagtctgatatggtatagtggacatgtttattattcagggttcagtacaggagacagaaaccaccctagtatttaagcagaaattagatcaaaataggaaattagttgtttataaaatcattaaaagaataggagaagtgagctctgtctgggccttgaggaaagattctcagaacatcacaaagcaggcccactggggaatcttgtactgtcatgaaactgtgaaagatctgagattttactctacttgcaagctaacaagttagccacaatttcatagatattgacagaagacatgaaactcttaggtcagagacaaaggactttgataattcctggcacaagagatatcatgagctgcatgttcctatcagtttccctcctcctcccaagcctcagcaggatgatacggtgattgggcatatatttataaaatcatgagctttttgataatcatcaggttgatgttcatcaggttgatatcatgtttcagatttgaacaggtaaccatttatggatgagaaacttgagtgaatttcttttcttacgattaaacctttgcagctgaactgatccaaagaacttgattgatattcaaatatttttatcctgcaaatattttttccattgtgaagaggaaccccaagaatgtagacaaagattcttatgttactgatgtgatctaaaggagcataatcttggtggctagcaccyggtgtcattctatgagaacagatgcttggaagcaataatgttctcctgtcrttttcttcactgcattaaaaagcatgccagctgatgtcacaggttttctttaactcagaaaatcttgttaaacataaatggatgtctaattactaagagagcatgtaaaagtagcttttgcattaaggaaaatgtaatcattgtcttttagaataggcacatcagagttttggttacctgcagtagtcagtgttttctttcttaaataactctagcaccctctagtgacaaattccgtgaaaaatattttcagtttactctccaagaaaagtaataatcactaccaaaaaacactttgaaggaaaaaaaaaatgtggtgttgtcaacataccacatcactaattcttatcatagctagtgatctctctggctgcatctcttggcctttctactggttttctcttaggcttcaacacaatattcctgttttttatatcatctaaattatgtcccactcattattttccttgtctccttttcatctcccttttaagtaagagttttttttctagcattcattttttgttaccagttttttcttctctttttcttatgctttcaaagatctcattcattcattcatttctattatcttcattctagtagtggccaaatctgtgtatctctattctcatctttttccatatctccagttgcctgttgggtaattccacagacatgccctactgtgtccttaaacacaacattatgaaagccttccttatctttcctcactgtcagcattcacatttttattagtgataccccctttccaagcaggcagcaaagcttagaagcttgacattcttttcattctccctcatcccatagccttcaaacacaccatgcatatgtatgcctgtgtaactgctttatctcttatcctgtctggaaagacctgagaattattctccaatgatctaagcttctcctttagggtactgcttaaataccaccacatcctggaatctttttgtgacaagtctagctcatcttgatctttctccgtagccatgactgtctttattacacactttgacatttaattttatttctggttatgatacactcctgagagcttcctattgtaaaagattaggtgttgcctttataactaaattgtagattatcttttttttttgagacggagtctcgctctgttgccaagctggagtgtagtggtgtgatcttggcccactgcaacctccaactccctggttcaagcaatactcctgcctcagcctcccaagtatctgggattacaggcacaatgccaatacgcccagctaatttttgtatttttagtagagacggggtttcaccatgttggccagactggtctcgatctcttgaccttgtgatcagcctgactcggcctcccaaagtgctgggattataggcatgagccaccgcgcctggcctgtagattatcttttttaaagacagagagtcttccatatacttcttttaaaacttcagtagtatctagcaccatgctaggcacaaagcagaaaattagtaaatactttttgaataggattaaatagaatgagtcatgtatcttagcaagaggaataaatacaataccacaaacgttcactaccagatggccccaaaaagaagaaaagtacttcttgtctagattatattttgtagttaacaaaagtaacatataggagatatttctgaatattttgttttgcaaccacaaatttaataactgttaggattattgtcaaaatactagttgaatctcttatggaactagaaatgtcatgggttagcaccaatctcaaagaatatttctggacatttttatatcatgaagagatttttggctttcctggcactatagacagtcttctggacctctggtgatcagccctcctggccctgtgtggtctgtagtgtatcctgggaatagactcctcacatcctgttcacacctgggagacaaatctcagcctcctatcttcacaccacttctcctgaatcacaggctggtgtcttctcatctgccttgctccactcctttctgatatctgctcagaggaccctttagataatcatcatggacagtcacacatggagagtaaggattcagaatgattcttctttactcagctatcctgtgactgtctccaatctctttaaaatgacatttgtgtgacatcctagagaagaaacaatgaaattgaatgccagcagtgtcctggtgtttataggtggaatacacatattatgtcatataaatagttgaaaaaacttgaagttgattcgttatagaacttgcccccaaatcaaatagctaacaatctatacactgtagagccagatctgacaccagaagctattttgcttccatttggccatgtgggctgcctattggttcttttttaaaacaaaatagctggccagatgcagtggctcacgtctgtaatcccaacactttggaaagctgaggtaggtggatcgcttgagctcaggagtttgagaccagcctggccaacatggtgaaaccctatctctgctaaaaatacaaaaaaaaaaaaaaaaaattagttgggcatgatggcacacagctgttgtctcagctactcgggagtctgaggcggcagaatcacccaagctaagggagattgcctacactccagcgtaggcaatctgagtgagaccctgtttcacatacatacatacatacatacataaaacaaaatagctaagtttaattgaatacttttctgacagacactgtctgtggtaaattgtttgctggcatttatttcattcaatccttatgaattaggaagtattattagtcctgtattactgatgagaaaactgaggtctaaaaaggttaattaatttgcccaaatacaaaacagacagtaattgatggaattagaattcaaacataggtctacctcacaccagagcctgagccttcaaccaccatgctctgacatctttttaacattgtgctattcattttgttctatccaattaaataccaatacctgacacccagaaaagtttttgctttaacatctaagaaattattatttaaatctgccacatctcctttgcagaacaacaagaattaataaagttttttaaaagtttcaattcagtggagcaattaacataaaatggttttattttgccccagtcattgttttaaatcattctccaccagctctccctcttgtttctcttagtgccatttcggtaagagcccataactttcagttcactcattcttttaatattcttttaattaaatacctaacatatgctaggcattattctgagtgctgagaatacatcagtgaacaacaattaaacatctgtgcagttcaaaatgttatatccaattcaaatgtcatgtcctctccctgcagtaggagaggcctgcagtagcagttagagaaaacccatctgttcttttactctttctctgaagctagcactttgaggaatttggggggaaatgtttggctcgactctgagaaacctcctccctctttttgttaaagactacttcttcaaatacgttggagaaaagaaggaagggcatggaaaagggcaaacatctcttttattaactcgattattaactccactaattctctctggcagggtccaaatctggccctctgatgtaggatgtctggcttcagcctagcttccttacacttcttcaggtccccagggatgcagaggcctcctctgctatggccgcttgaccttggaaactcatgtacccataccagatccactgatgggaatgtatacagcttacagccaycctgtctgtctggctctccctttcccattctcttctctgcttaagtacacatacctataactgctcacgctgagkaggggaaaagaatgccccccagtctttccttgaggacaccataagcctttaagaaggagtagcatgcaccaagaagaggggaggaaaaagccactacattacccagtaggccaaaccatggttccagcaaatttccctgcctctcactagctcagccttctggaagggggtggctgtggtttgtggggttggcagggctgattctactttctgaggtagatggcaagccccacttgtttggtgacttcctgatagtgtggaatagttaacgtatctttgtcctgaagtttgggaccctgatgaccaattctagggcaaacatcctgttacaaaggcaagaaattaatgagttaaatgatgagtttattataaaattatggtcaacaccctacaattatatgttataatattttgtataatatgtagagcaatactaatcaaacaaatagttatactagtaactttacctccttctcctttccatcttacctctgcctaaatgtccctggtcagaagtccttagtcaccgacgggatttaactccaaactccttttttgacattgataatgctccagtccttatttctgtacccagaccctctgctcccccaggtcaggacacttgggcctgctgagtccagctcacacacaactctgcctttggtctgactctgttttttgtctgaaatgcctacctactttctgtttgtctaactccaggctttcctgtaggtttgcctttcaagccactgtgcactataaggccttccagaactgctcttcctctggatttcttagcacccacatttcaccattagcctaagccgtcttctctttcagcgttctctttttcttcccgtactctgttaccttactaaattatacatctctcaaggacaataacacttttcttaagcttctccgtagtgttatgcttgttcagtgcatatatgtttgctgatggcaaagaataatattttggaaataatttcatgatttaaaaatctaaaagatattaagatatactgaaaaataagtatttgattatttaaaatgttacaaaagaggaaggtttcctactccctctctgcatccacattttcatggaacaaaggcctaggtataagctgatttagatttgcccccatctagaaatttaatcaaagtcttagagctggagagaacatcagggttactgagtctccctctctgccttagggttcaatacaaaatttaacactgtttgatttggaactagggaatggtttggggacagtaaatgttgaggctaattaggtgatttagataatccagagtctgtgtaaaattaaaatcctatttgtagtgagactctgaactagctttctcagccttttgctctacctcctgcacaagaatatgactcagagctgggagtaatggcatgcttagccttggatagctgtcctcctctgctttcaggatccattttcattactctatcatcttcctctttctttcttttcttttcccttgttcccctaatgtatcaattggaaagtatctagcatttcatggtacaatagaaaaggaagtggactaaaaggaaacctagattctattcccatctttttcaccaattatgtgatctcaaccaccaccacaccactctgggcttatttctttgttgatagaagtggggatgaaattaggtaatcatattaatgtcactggtttttgtatagaccattatatgtaaccgttcacttagttattggcgtacccaccacattgtatcgtgtgaagtataaacactttttttctttctttttttcataaggttatagctcagcaagtgtcagataaacacttggaagagggtcggctttatcctcctttgaataccattagagatgtttctctgaaaattgcagaaaaggtaaaaccactcttgttcaagcttcattatttttccttccttttcttgctaaatatgcatttttaaatattaaaaatctgcttccttgaaatgtatatctgtatcaacttactatgtcagaagtcagagaaatgaggcacactgacactgtagagcttaggagctacattygcttctcagagaagaatggaagtattgggccgaataattaatttccctctctatcgttctttttttctcctaaaatttaaataattcattagggcttcctgtcagccagatttctcccatttcacctttttaaagttgttcttttctatatcacattagtgataattaaccaaaatattacagatatgttagagtaacatttagaccttgaaccaccttccatatccatgtcactatgatgtgtggcatcataaatgacagatcacaactgataatactgggcggaaggcaaaataaagaggtcaaagaacttgaaagctgtttgggtggcagatgagctactgaaggagttagccaagaagaacccaaaggcagagaaattttctgtaactaaactggaagataagtggactttttttgcagtgtaattgtattagttttcttgggctgggataactacataccacggttatgtagtaactgtttttaartattcaagccacagactgtgtggcttaaacaacagaaaactattttcccataattctgggagctagaagtctaagataaagatgtttgcaggtttggtttcctctgaggcctctctccttggctggcagatggctgccctctttctgtgtccccatatggccttttctctgtgtgtgtacacgcttgtgtgtccaaatttcctcttctcttaaggacacctatcaaattggattatagaccattctaaccgtctcattttaacttaattatctccttaaaggcctatttctaaatacactcacattctgaggtactagtggttagggcttcaacactgaatttggggtgggaggaacacagtttagccatgacagtagttatatgtttaaattggggtttctctacttcagcgttgtggacattttgggtcaataaccatcatgcggctgtcccaggcattgtacaatcttcagcagcattcctggcctctgcccactagatgtcagtagcatctgctcagttgtatcaaccaaagctgtttccagacattgtcaagtatccccttgggggccaaattgctccagattgaaaatcactagcttaagctattagcaagttatctaaacaacaccatttaagagtcacatatcattatttatctcgttgactgaaggcagtctcttaaaaaaagaagtaattctctaaaaacctttacataataatctgcttggttatctatgaaaaagtatgttcatatattctactaatatgtatctgctagtttttaagtagtttaaactattaatatactgaatagcatattatcattttaagttcattttggagatttaaatgaaaaagagttagcttatgattagaggggaaaaaaagcaggggacagcaggggagtgccaaaagattcagatatcacacctagaataatggaagaatacagagtgcatacacagaaattgagaaactagaacaaagaaccaacttcagagagggagatcatgtaagtggactgcaagtttgaggtatcaatggcacattcaaatgtaccattttatcaagtagatagaaatgactgaaacttaaagagaggctagataaaagacctgggcatcttctgcatgtggtaactggtgaatrtctaggagtgggtgaggttgccaagaaagcaagtatagaaaggaaataaaaatgagaatagaatatagtttattattctgtctagaagacagaagaaagatgccagttaagaagagaagtggtcaggattttaagagactccaaactgagcagcatgtcaataattaggaaagagacaatttcagaatgggagtggaaattgtgaccaacacagccaaatcctggagagaaaaacagatgcagacttttatttggtacttaacaagttatcagagacttttacaaaagaaatttcaagatgtacaggaggttcagaaggcagagaattaggaaagcaataaaatataagccactctgtcagagagtttggcattgacaggacagagagagtgaagatttcattgggagaagggattatttctatggtataactgggagcagaaagaggagatgaatttccacatagtctatgtcagtaatgaaacaatgtgttttattataaaattaacatagccatcttaagtaggcatgagggatctttttggggtgatggaaatattctaaaactgaatgtggtaatattgttgcacagctcagtaaatttacaaaaataatttagttgtacacttaaaatgcttgaattttgtgtgaattatatctcaataaatctgtttaaaaagtaatamtaccatattatgggcactttggaaaacaaatagagaaaaggaaaataaccaatatcctatttttctaatataagtattattttttttcctgtgtttgttttgagtctttcgtttgtttattttctaacattattataattatgaaatatacatattgtttcctgctttttcatagacatttcataatacagcacagtattcataaccttaattgttcataaatgcatagttttacattgagatgagataatcattctgatattctttgaaatcagacttatcaaaataagtcagtcatataaatattgttttaagaactgatgtgaattcggctgggcacggtggctcacacctgtaatyccagcacttcgggaggccaaggcaggtggatcacctcaggtcaggagtttgagaccagactggccaacatggcgaaaccccttctcttctaaaaaagtacagaaattagccgggtgtggtggcaggagcctgttaacccttgggaggctgaggcaggagaatcgcttgtttttttgttgttgttgttttttgttttgttttgtttcgtttttgagatggagttttgctcttgttgcccaggctagagtacaatggtgtgatctcggctcactgcaacctctgcctcccgggttcaagtgattctcttgcctcagcctcccgagtagctagggttacaggcatgcaccaccacacccggctaattttgtatttttagtagagatggggtttctccatgttggtcaggctggtcttgaactcctgacctcaggtgatccacctgcctcggcctcccaaagtgctgggattacaggcatgagccactgtgccagccagagaatcgcttgaacccaggaggcagaggttgcagtgagctgagatcgtgccactgcactccaacctgggtgacagagtaagactccatctcaaaaaaaaaaaaaaactggtgtgaattaaatagtatatatgaagtgattaattttgatgaagagaatccatttaaagaaagtagggaaagagaagatgtatgaagacactgaggagatagtctgagttggtcaaaagggaaattaaggtcattttctctgagtagttgaaattttctcccatgatgtgatatgatgatgtgattctccagtgagtgatgagagtcaaatggaagcttgaagatgggggaaggtttggaattgctttttgggaaccacaagaggaagttttaagtaaagagagaaaaaagtataatgtgcagactagaaaaaaatatagcaccacagaaagtttactgcatcgttctaggatgcacagccacaaaaggagaaagccagctctgaggggtccccagacgagggactagaattatgcatgaaacacagggcgtgatgaccagagaatctgtgacgctggcaaagagtgctcatcctgactgtggtgtctagatgattagctgagcaagatcaggagaccctggggtacaggaagagattttgtaggaggctgtggtgagaatagggattcttgaaaattcaaggttcaagtttagcaggactatttaggtatttatttcaagttaattgtcagtcaggtcatgtcaagactttgaacactggcttctctgagaaatccagatgtgatagtacttgaatcagtctcacctggtcacactttccttagttgctgatgtcatttttctctctcactatatgatttataattgcattttcattttatatcttcattgcttatatgtgcttttattataatacacttaatgtttttgcaaacataggatacagtgtttttgaaatggataaaaacttccactcacatgggctcatgattacctctatttattaaaataattaatattcttttcttatatctagattgtgaaagatgcataccaagaaaagacagccacagtttatcctgaaccgcaaaacaaagaagcatttgtccgctcccagatgtatagtactgattatgaccagattctacctgattgttattcttggcctgaagaggtgcagaaaatacagaccaaagttgaccagtaggataatagcaaacatttctaactctattaatgaggtctttaaacctttcataatttttaaaggttggaatcttttataatgattcataagacacttagattaagattttactttaacagtctaaaaattgatagaagaatatcgatataaattgggataaacatcacatgagacaattttgcttcactttgccttctggttatttatggtttctgtctgaattattctgcctacgttctctttaaaagctgttgtacgtactacggagaaactcatcatttttatacaggacactaatgggaagaccaaaattactaataaattgacataaccaacattaaaactcataattattttgttgaccattttgttaaaatctacttttcaaaaaaaaaaaagctagaaatgaatctaggcgtaggtgaacttttgctaagcagaaataacactactttgttgcctagagaaagataacttctcaagtatttttattccagtcctagatcatatatgttcttttgtgcaacggaattctaacagttctaagagaaagatcactgctgtttacagcgccttgtgcagccttagattttaatattcttttgtcattgttacatctcatagagtaaagctcttattaccttgatcctgagtcagaaatcccacctgaaatcaccttttttcccccttgatcaaacatcccatccttcagctaccatactgttgctacagggattttgtggactgtggcccctgtccygaggttggcaccttcagttcagcacagcctgagcagtgagaaggtctgaaaggagagtatatagttaagatccttgagaaagggctgcctgaggaactgacctcttaaagatctcaggatctttaagacaacaagttaggttcctactggagttacctgccagaatggcctcttaattaactcaggtaatgaagagctaactgtgttataatcatcttgcttttgcctgaatttggagaaagtattataattaagttcccagtatcagaaatgtccttacataagattaaaatatcttgatgactaataccattctatgagaaagagtagttatatgcccagactgtattaatttactttagaaactaatgtttgaagtaatggaaaaaattttaaattataaagctaaggtgcaataacatttgctacttatttatagaattatttgaagaattttgtttttgaagtaatgctttaaggagtataagatattcaagataaattatactataaaatgattttattgaaagttgaaggttacacaaattgttttaggtatgagcagaagaggttaaggtatttctaaaggtaacatatagtcaagagtttcctcaaaatagttatttggagaagaatcagaatgtctgtgtatttcttgtctgtttctatgttgtcttatagctctgactaaatgtgtttacctatgcaaaagatttattaaagcatagaaaaggtgaatgaataaaaatataaaataattgtcctttttcttaaaatgttacattgtaatgcttggtcttggggtcatatgattatgtgtgacgaatttctaaaatattctaataactgctaatttcagtataaacatcattcatttaaaacatatgtggctgggcacagtggctcacgcctgtaatcctggcactttgggaggctgagacaggcagatcacctgaggtcaggagttcaagactagcctggccaacctggtgaaaccctatctctactaaaaactataaaaattagctgggcttggtggctcatgcctgtaatcccagctacttgggaggctgaggcacgagaatcgcttgcactggacgttgcagtgaaccaagatcatgccactgcactccagcctgggggatggagtaagactctgtctcagaaaaaaaaaaatatatatatgtaatcacatattctggacactgtgatgtgtgagccacttccttgtcctcagggaaagataatgaaataagcattagatagttacttactaggtgtcaagtatcccacatacattattttaatgtagtcccctcactttccttatgaagttgatattttaagtaacttgccaagtccacagaataactgaagaaagtaagctttacatccatattcatctttctttatagtttgttctcctttccataggctacagtctagaacagcactgtcccatgtgtaattttaaattttgtagtagcatcataaaaaaaagacacaggtggaattcatggtaataatatattttgtttaaaccaatatatccaaaatattaccactgcaacatgtaatcatcataaaattattaagatagtttattttgttcatattttcttcgaaatccagcacatattttacacttacattttaattcagttcagactagccacaggtctcagtagccacatctggcgagtgacactgtattggacagtgcaggtttagaagagacagttatataccaatagctgtaaaactgcatctccatgagagaagtgaagtagaagtctgagggaaatgtttactcaaaaatattttggtaaataatgcctcaataaagtagataaaaaactaatttgtgccagcctctcttcataagccagccatgcatattaggaagggagcacagccccagaacaagaaaattatttaacaattttttatagaacgctcactttgctattaaccaaagaaatgtaaaatgctactggagcacacatggaacaaataaattatatagtgagaaggagatgtcagggaagagaatataataacattaatgttaataaaattagacaaaaagaaaaatggaaaaagataactttatcacaaaaatagaatatctaaagaattaaatgtacattctaaatataaaaaataaaatatctgaaattaagaattcatcagacagatggtttaacagccaactagaggtcatagaggaaaagattaatgacctcaaaggcaggtcattagaaattacctacatttttttaacttttattttaggtttggagttacatgcaaaggttcattatataggtaaacttgtgtcatggggggtttgttgtatggattatttcatcacccaggtattaagcctagtacccaatagttattttttctgcttctctccctcctcccgccctccactgtcaagtagaccccagtgtctgttgttcccttctttgtgttcatgagttcgtatcatttagttcccacttataagcaaggacatgtggtatttggttttctgttcctgtgctagtttgctaaggaaaatagcctccagctccatccatgttcccacaaaagacatgatctcattctttttttatggctgcatagtattctatggagttcatattaccaccttctctttatctgatctggcattaatgggcatttaggttgattccatgtctttggtattgtgaatagtgttgcagtgaacatttgtgtatgtgtgtctgtatggcagattgatttatattcctctgagtatatacccagtaataggattactgggttgaatggtagttctacttttagctctttgaggaatctccatactgctttctacaatagttgaagtaatttgcactctcaccaacagtgtgtaagtgttcccttttctccacaaccttgccaacatctgttatttttttgactttttaataatagccagaatgtcatgaagtcattctcactggtgtcacaatgaaattgtatctcattatggtttttgatttgcatttttctaatgatcagtaatattgagccttttttcatatgtgtgttggccgcatgtatgtcttcttttgaaaagggtcagatcatgtcctttgctcgctttttgatagggttgtttttttcttgtaaatttgtttaagttccatatagatgctggatattagacctttgtcagatgcatagcttgcaaatattttctcccattctgtaggttgtctgtttacttttactctgctgatagcttcttttgctgtgcagaagctaaatttaattagatcttgtttgtcaatttctgcttttgttgcggttgcttttggtgtctttgtcatgaaatctttgcctgttcctatgtcatgaaatctttgcctgttcctatgtcaaggatggtaatgcctaggttgtcttccaggattttcatagttttggattttacatttaagtcttcaatccaccttgagttgatttttgtatatggtataaggaaggggtccagcttcaaccttctacatatggctagccagttatcccaacaccatttattgaatagggagtcttttctccattgcttgcttttgttagctttgtcaaagaccagatggtcataagtgtatggccttatttctgggttctctgttctgttccattggactatgtgtctgtttttgtaccagtaccatgctgttttggttactgtagccctgtgatatagtttgaagttgggtaatgtgatccctccaactttattttttgctttgtattaccttggctattcgggctctgttttggttccatgtgaattttaaaatagtactttctagttctgtcaagaatgtcatcggtagtttgatcagaatattattgaatatgtaaattgctttggacaatatggtcattttaatgctattgattcttctgatctttgagcatgggatgcttttccgtttgtttttgtcttctctgatttatttgagcagtattttttagttctccttgtagagatctttcacttctctgattagctgtgttcctaggtattgtattctttttgcagcaattgtgaatgggattgcattcctgatttggctcttggcttggctgttggtggtgcctaggtatgctagtgatttttgtacattgattttgcatcctgaaacttggctgaagttgcttatcagctgaaggagcttttgggccaagactatgtggttttctagatatagaatcatgtcctctgcaaacaggaatagtttgacttcctctcttcatatgtggatgcccttcatttctttcttttgcctgattgctttggccaggacttccaatactatcttgaataggagtggtgagggacagcatccttgtcttgtgctggttttcaagaagaacgcttccagcttttgcctattcagtatgatgttggctgtgggtttgtcatagagggctcttattattttgaggtatgttcctttaatatctagtttactgagagtttttaatatgaaggtatgttgagttatattgaaagccttttctgcacctgttgagataatcctatggtttttgtctaacataaacagaaaatttccaaatggaagcataaagagagagcaagaaaggaaaagagagagagagatgttggctaaaatgaggtggtctaatatacgtgctactgggtcctgtaaggaaagaagagatactggagtacaaatatttgaagagataatggaaagaaattttctcaaattaatgaaaagcatcaactgatagagctagcaggccccaagtaggatcaatacaaaggacaccatacctagggatatcataatcaaattgcatatcaaaaataaacagaaaaatcttaaaagcagccaaatgaaataggtatacaatgccttcagaagtacaataagaatgacagccaacatctcggcagaaaaatgagataatagacatttttaatgtgccaaaagaataaaatttagcattcttttttttttttttccagacggagtctcgctttgtcgcccaggctggagtgcagtggcgcgatctcagctcactgcaacctccacctcctgggttcaagcaattctcctgcctcagcctcccaagtagtgggactacaggcacccaccaccatgcctggctaatttggtttttttttttgtatttttagtagagacaggttttcaccgtgttagccaggatggtctcaatctcctgacctagtgatccacccacctcggcctcccaaaatgctgggattacaggcgtgagccaccgcgcccagtctaaaacttagcattctatacctagagaaaatatccttcagaaattaaggcaaatagagacatttcagactaatgaaatctgagctaattcatggcctgcagacctacactgctagaagtactaaaggaagttcttcaggctgagggaaaatgatcctagatggaaacgtgcatctgtgggaaaaaatgaaaagcaccagaaagagttgggcccggtggctcatgcctgaatcctagcactttgggaggccaaggtgggctgatcatgaggtcaggagattgagaccatcctggctaacacggtgaaacccccgtctctactaaaaataccaaaaaagaaaaaaaaaaattagccgggcatggtggcaggtacctatcctccgagctacttgggaggctgaggcagaagaattgcttgaacctgggaggcggaggttgcagtgagccgagattgcaccactgcactccagcccgggcaacagagcaaaactctgtctcaaaaaaaaaaaaaagaaagaaagaaagaaaagaaaagcaccagaaaaggtggatgtgtgagaatataaaatactgttttaaaattcatataagactattgactaatacaaataacaatgtatgtggggtttataaaatatgtagaagtaaaatgtatggctagagtaggacaaggggtggaagggggattaataatggaagtatactactgtatgttttatacattattcatgaaatggtacatccattataaaaggaatactgtagcaagtaatataccacttcatgaccaatctaggaacctaacaatttaaaatgtattgcaagaattcaaggaatatagtaataaattaaggaagaatattataacctctaaaacactaaaaataatacaaaaaacatacagtttaaaagctaataggccagacgctgtggctcacacttgtgatcccaacacattgggaggccgaggtgggtggatcacctgaggtcaggagtttgaggccagcccaacatggtgaaaccccatctctactaaaaatacaaaattatccaggtgtggtggcaggtgcctgtaatcccaactacttgggaggctgagacaggcgaattgtttgaacccaggaggtggtggttgcagcgagccgaaattgtactattgcactgcagcctgggcaacaagagtgaaactctgtctcaaaaaaaaaaaaaaaaaaaaaaaaaaagctaatggaagaaatagaataactctgaaatacttgattaatgcaaaagaaagataaaggaggaacaaagaacgtaagagcttaactcctgggataaatataaaactaatagcaagatggtagacataaacccaactttgctggtaattatgttaaatgtaagtgaactaaacactctaatagcaaaaattgtcagattggatttttttaaagctccaattat

SEQ ID NO: 94156 - DNA, 251664 bp, Homo sapiens
  misc_feature (1)...(251664): n = A,T,C or G
tagcttctgttcctgcaaccaagtctctgactgttatgcccctgtcccctgaaagatatgttgagcttgacactcccctacccccaaacccagtacctaacccctggccctcagaatttaagcttatttggaaatagggtcatggcagatgtaattgattaagttaagatgaggttagattggagcagtgtgggcttctaatccaatatgactggtgtccttataaaacgatagctgtgcaaagatatggagacggcatgtggtaacaaacgcacatactggatttatgcaactgcaagccaagggatgacaaagaattccagagaaccaacaaaagggaaaagaagaattttcctacaggtttcagagggcgcatggtcccactgacaccttgatcttggacttgatcagaatcgcagacaatacgttcctgcaaccagtttgtgctgctttgtgacagcatccctaggaaacaaatacattggctttgagtatattctggactttcttttgattccaacaggatcattccacttagtaattcagtgaagtaaggaaaatcagggagcttttccattatcccgagtccttagttgaaaccgatttcatatgaacagagtctgtgaactaatacactggatgttaaacatgctgtagggggaatgaatctcttcatcaacatatttagatgggcaaatataactttatttttctgtaatttaatttttaaataatagtgctactgatatataatttacatatcatgaaattcatccttttaatgtacaattcactggtttttagcatatgagcaaagttgtgcaaccatcaacattacttaattttagaacattttcatcactcaaaaaataaactttaggccgggcgcggtggctcacgcctgtaatcccagcactttgggaggccgaggcgggcggatcacgaggtcaggagatcgagaccatcccggctaaaacggtgaaaccccgtctctactaaaaatacaaaaaattagccgggcgtagtggcgggcgcctgtagtcccagctacttgggaggctgaggcaggagaatggcgtgaacccgggaggcggagcttgcagtgagccgagatcccgccattgcactccagcctgggcgacagagcgagactccgtctcaaaataaataaataaataaataaataaataaataaataaataaactttatatccattagcagtcattccctacctcctgtctctgttgatttgtctattctggactttttataaatgtaattgtataatatatagtattttaaactggcttctttcacttagcgtaatgttttcaaagttcatccatgtaacactacttaattactctttattgacagataatattctatttacagatatatcagttttgtttaaccattcatcatttcatgggtatttggattgtttccacttttttgctattatgaatagtgcagctacgaatatttgtgtactagctttggtgaatacaccttttcatttttctttgttatatacttaggagtggaattgctgggtcataagataattatgtttaaaaaaacaaaaaaggaagagaaatagaagaacaaaattaaaaagataactgtgtttaacattttgcggaactgttttccatagcagctgcatcattttacagtcccaccagtgatgcacaatggttccagttgctatacagcctcaccaacacatgttatagatttctttttattttaatcatcctagtggatatgaagtggtatctcattgtggttttgatttgtatttctttaatgactattgatgttgagaatcttttcttatgttcattggccacttgcatatcttctttggagaaatgtcattcaaatcctttgtccatttctttaaataggctatgttttttagagcagtgttaggttcacaaaaaatttgagaggagggtacagagaatgtccatatgctttccccaaatacagagcttccttaatcatcaacatttgcactgcagtggcacatttgtcaccatcaaggaacctacattaacacacagttgtcaaccaaagcccatagtttacattagggttcactcttggtggtgtacgttctatgcatttggacgaatgtataatgacatatttatatgtccaccattataatatcatacagaatatttttcctaccctaagaatcctctgtgattttccatttatcccttcctgctcccaacccttgcaacccctcatctcttttattctctccataattttgccttttccagaatgtcatatagatggattcatatagtatgtagcctttttagattggcttctttcacttagtcatataaatttaaacttcttccatgtcttctgatggttaaatatttttttttcttttttttcttttttttgagagtctcactctgttgcccaggctggagcacagttgcgtgatctgggcccactgcaacctctgccttctgggttcaagcgattctcctgcctcagcctcctgaatagctgggactacaggtgcacaccaccacgcccagctaatttttgtatttttagtagagacggggtttcaccatgttgaccaggctagtctcaaattcctgacctcaggtgatccgcccgcctcggcctcccaaagtgctgggattacaggcatgagccaccacacccagcttaatatttctttttagtgctgaataatattccattaagtttatttggttgcttccaagtttgggcaattatgaataaagctgctgtaaatattctgcacaggttttaatgtggacatacatttttagcttatttgggcaaataccaagcagcactactgctggatttcatggtgagaatatgttagttttataaaaaactaaactgtgttgcaaagtggctataccattttgcattgccacaatcaatgaatgagaattctttgcccattttctaattgggtaatttttcttttctattgttgcgtttaagactttcaatcagtatattctagacacaagtccttatcattctgattgctgggtctcctcaagttccctggatcttgttgccatagctgcatctctcttggccacatgggagaagcatcctgctgtttcaaatgccatgacatgctgggtagcctgaggatttagtgatacttttctaggttcatctacaaaggaggatacctacaggtctttctaatctatagctgtacctccatggaaggtgagacaaaccatctcttatactggtatgtgatttacaatcttttcttttagccctaagctttgtttcctaactcattcaggtttttgaggtttaatactcagaaaccagtctgtagaattcaaacttttctctcaaattattgtctctgctatcaagtttaaaatctattttaaaattcaaaagcaataatttgatttcttttttttctgcctccatgatacctctgtttgagtttgaaaggaggcagatgccaggatgtaatactgcaaaactatcatcttgctatataaaatggtcgtctaaaagcaagctgagactaaacaggtacaagttgcacaggtagtgaagctcagtgagagcaagtgatgcaagagtcattctgaagggtgaagagcaactttgctttgtattccaactccatagtcatgggttctgcaattggaaatagcttaaacaaagaggggaatacattttaaggatacggtgatgtctcatagaaccccaggaccagaaagcagttaggccttgggaataaatggaatcaggaactcaaatataatcacactcttcaccttttctggttcacgaaattactgaaaactcccattttttgcagttcctagtggcatttaaagataatctgatctttctttctaaactacacttccaaaattcccagaaaaggacagtttcccaaattgagtaaatgtggccagggcaaggggaatggaggaaagtcccactgtaataacatagacattttcatggttaccaggcaaatggtgtggtagagatggggaaaatttaaaaaatcagtttgcaaaacaggtgaatctggcaggtgctctgtttgtttttcctggctgcatgtagttgaaagttcaaacctcttagaccttcaaaatctccctttaatctgtttttcctactttttctgttaaccctgtatcattccctacaccctgaatctagaagcaccaagctattttctcttcctggaatgcactgtgctcttcatgcctatcagcctttatacaggtttcttcttagtttggaatgccattttctccctagtctgcctggtaacttctagtcatcttttaggtctagctcagagttatatctggaaacacttgactttcaaataagagtttattgctctttttgtgtttcactttgtttgcactattctaggacccctatcacattggattgtagttgcctaatctgtctcttttctctaccaccttggacattttagaagtaaaactatgccttgatcttatttgtctcaatggtggcttgtcattgggttgtacgtagcagaggttcaataaaattctcatcagttattatttttctctttttctccccgacctaaataatctcagtacccccagctccctaaactatcaacaaatagaaaaaaagctctattcatttttatccttgttctttactctccttagtttaaacccaaatttgactatgtaaatgtaatttcattttgttaccccttccttcattaaaacaaaaatacccttcatgcacatgcaaaacactctaccccacactattaaaacagcagaaatgaacactaacaaaagccaagataaaaaatttccccaatgttgaatttttggacttagtgtgggggtaggaaaaatggagacataattctggttctccctttggcagttttcaattgctgtttcttaatctcagtcagaaaacacatttctctgcctctccttttgccccatttctaccctctcctcccttgcccctgtgcaaaaccaaagatgggttaagaggcaaggcataatggaagaggaatgttcttttcctccactcccactttcttcttcaaattctgttttgggaccatccttccccaccctcccattttcatctgatggacacactgtctctgttgtctcttgtcatatttgattttatgatatttcatgttttatgtgcttttttttttttttagtaaattcatggacagagaatgtatcctggtaaacacttagattaaaacaaatttacatagttgattactataaatgaaaattagtgactcaaattctccaggtttctaagctacttagactaagccaatcaggtaatttttgctacttctgggcaaaatgtatctgaattcctattcagtggatttgcaggatgaaatctaagtttacctctttcatctctcatttaaatgtggaaaaacgaaatcaataaaaatctatatatgcttattaagcattttaaggagggtgtgaataaggagtgaaagctttgagcagtgactacagcagtttttcgaaagtcaaaacaataaccaatgccaatcagtagctctcttcacctctcacacaataatagagacaggacaggataaaaaagggttacatttaaaaaaaagtatggatgttaaaccattggaaatggcactgtaaatgacaccggaaaagatcgcctccaggcactgtgtggaactttgcaaactcgggtcctcacccgaggaccgcacggccgacctcggggaggctccaccccagaaactatttcattggcgccacctctagcccacacttcccctcttccgcatgcgcacaaggagcagaagccgaccagctcgtcacgtcgccttccccgcccctaaatttccagttccgattggtcygtttcatgggaccgcccctctggcccgaccaatgtggaagcctyctcgggtgctccgccctccccgcaggcggcgtgcggctgcatagcctgagaatcccggtggtgagcggggatggcggttgtagcggcggctgccggctggctactcaggctcagggcggcaggggctgaggggcactggcgtcggcttcctggcgcggggctggcgcggggctttttgcaccccgccgcgaytgtcgaggatgcggcccagaggcggcaggtggctcattttactttccagccagatccggagccccgggagtacggtgagccctgggactgcccactcggtcccgctgcagcccggactcccaggctcgcaggcgcccgcgaggggcaggggccggcaggctgcaatccttgcatcccagcttattaacttcctgactctctggaacctccttgccycagggtctaactgtggttcacttcttgctctatttttgtgactgttcagccctcgagacgcagtcccccctcccccgcaactttgagatgggtgagagggcatactgccacctggaagagcctgagggtggaggggtggtgcccagggaacgcctcccttttctctgtcctccgtccttgctttctcaacccaggccttaggtgttgttccagcctgsccaggactgggccactagcttaggtagaggcatttaaaagatatatatatawgtttatatatatatattttaaatgtatattatatatattatatataaaatatatatatgtatataaaatcaattcagttactcagtcccttggtttcttcttacatacagaaattgtgtgtrtgtgtgtgtgtgtgtgtgtgtgtgtgtgtatatatccacacacatatatatatgtgtggatatatatacgcgcatatatatgcatatatatgtgcgcatatatatatatgcatatatatatgcatatatatatatgcacacatatatatgcatatatatatatgcatatatgtatatatgtcccttggtttcttcttacctacagaattctgagtaattgaactgattttcccaaggtcacagaacaggtccttcctagagatgtgaaagaattcagactttctacttgagcttagtactgagcttgtcctgggctatgctgccacttagccaaggaggtgaaggggatgagaggaggaagccataggaagggcatgtrgcaaactcctcatagtatgactgttgcatgatttttaccatttctgcaagtttcatgtaatgtctctcatcagaatatcagatccagtgtctctcttcagaatatcaggaaactgtagggaaacatgtattgcttccttgtctaataacttctcatgtgcatgctagagctgacatttttggaagtgtgtcttgtggataagaatgaacagttattgagtgcttaccagggtcaggtgctgtgtgtatgtttcatcatctcatttaagggttaggacaaccttaaaaggttagtaaagtttttattcccattttgcagttaggttaatggagtcttgagacagtttgaccaagattacacaggtaagttagtggtagctccaaagctccagctttggaatctaattgatcagattccagagcttccattctaaacaatgtactaagatgcgtgtagatataatttacttggagggcgtcccagtattgtgaaacagtaggtaccataaaggttaatagtaggtgtttttttttttttttccaccaccaagatgagccctcaattctgtcttcaaagcaaattctgtcttcaaagcaaagaaattttggtctaatacttgagaaatagtccaactttccatagttgtaaacttactaaaatctaagtaaaatgatatcatgttatcatgatatatatcatgatatatataaacttgttcttattttaaaaataatacaaacatattaacagataatttggataatggataaaaagtaaaaaaaaaaaaaaaaaatctgccgggcgcagtggctcacgtctgtaatcccagcactttgggaggcggaggcaggcggatcaccaggtcaagagatcgagaccatcctggccaacatggtgaaacccggtctctaccaaaaatacaaaaattagctgggcgtggcagcgcatgcctgtagtcccagctactcgggaggctgagggaggagaatcgcttgaacctgggaggcagaggttgcagtgagctgatatygtgccactgcactccagcctggtgacagagcaagactctgtctcaaaaaaaccccaaaaaaccaaaaaacaaaaatcaccacccactgcagtaaatattgctaacattttgggtgtatccttacaggtatttccttttagtttcgtattttccatacttttagttttaatacaaatacaacttatttagtcggaagaattatcctacaattcactggagtttttataaccttcttgagaatttagaagaactgttccatggagtagagatgctacaagtcttttacaagttaaattcttgaccccggaatcagattgtcctaagtttgatcttgccttggctgtctataactttggagttactacttatcctctgtaagcctcagtttctttatatgtaaggggttaataataatacctacttcagaaggttgttgtgagggctacataaaacaatgtctataatatacttaacactgtttgacaactgagaatcaagcattcagtcaataagtggaacctttaaataattaccattatgtttttgttgttaaaattttgcaattttgtaaataatgcagatacaagcatttcatgcatatgggttttatgtatctgagattatttctttaggatagagtcctgaatactttaatggattttaagtgcatagttcaaatttatacccatttataccccataatatgtataatagtgtgagtattggatattaatgctaaaattaggtgtgttcatgtacactcttggatattttgtgctaactgtactttgttttaatttttgtttcatttctgttgaggaatattttcccatgtttttgttaaattgatttatttttacttaagaattgaatattagatgtatttacatatttttaaaagtatactcagtatttttcctatcaatactatctacsattattgcatagctgctcttttccaggtgttgtgttagacatcagtttataatcctcacagtaaccttgtgaactagacaatattatgctcattttaaagatgagaaaattgaggctcagaaatgttagtacttacccaagtctggtaagtagcagagccagagtttgaatcctgatgtgtcttactccaaagcctcccacactacttatatactaagattttgtctgttaaaaaatattgaagaacatactaactttctgcttttcacatgtcctgcaaatacttttcactcttttattttggttgttttgacatataaaaggtactgcttaaaaggaggtagtcagattagactctgagttggtgacacttatgctgctttatgctggcatgtttgctccctttattacactgtgttgttctctgagaacagttcatcctggcttctccatgcccctgattcttgggcattgtatgsatgtgagtttgtttattcagtcattctctgcatttttattttctcctggatgccatactctctgctagctgctaaggatgtgatcatggacctgtcggagggtaatctgaaccttcgttttggacacttggtatcccctatctgccaggaaattcaaactttttgtagttttttcatccaggatttggctatacacaaggaggtcatccatatactggagtatactcccatttcttaattaattgcagacccctcagattcctctctaaggcccaggcaaagcaatgggggctatcctgaaaaccctgagggagaactgtccaagtgtattattgtttttctctggyattaggattttcccattcaaaggcaaaaaggtattgggattctggggccagaggaatggaaaatgaagcatcttctaggtctaggactgagaaccatttagcatcccttggcacctgagccaggagggtatatggatctgccaccaatgggtggacctaccagtgggtcttaagagcccaggggtaagtaataccttagctgtggatgcttggcctttccttgcttccagcttaattgggtattgtttttgattgggaaaataaatagctaggggtctttaagctgtattttggctggcactgctgttttagccttccttggttttccagtataccatgccagtgtgttaacctgtttattaatgtggtctgggacagtgtctgtatttttgactattagcaatttcaccagatgatgcttaaattgtagtagtgcccctattttaaccataatatctctttttaacagggggcctgggcagcttgatactactagaaattactgttggaagatttgtttctcaatttgacaaatcaaakgaggaataaaggatcttacttgtggctttccttccattcccataatggtcgtggactgggaggaaagttttcctacataagtagtaaggaaagaaactgaatttgtattgaaaagaaactgaatttgggtgcccatgacgtccagagttacctgggggctcctcagtagtaattacgatgttcctgaacaggggcagtgaggaagaccctgggtcgcttcagtcttcatctaatttctcttttgcactgctagagttttgccttattgaaccccttggtgggagcagggccagtcaatcttccagtgccaggggttgtaactgatgctctcgcatttttggcaggggactggcaggggcttaatatagtcctttatccaattctcgtttttcttgcatttgaagcaagagtctttgttgtgcagattatcagaggcaagccaaatcaaccaaattccaagtggctggtgtgctccatcaattcctgcaggcctgaaataggtagcctaggaattccaaataaatagaacacatgatgacttgttggaaattcgcaggaaacaaaataactattctcagaaccaaataaaagccttccactagaaactaaaaaatgtctatggttttatatatatgcatacacaagtaaaacccaaaggagaacaaatagcaaacaaatgaaaattagaagcaaaaacaaatagacaggaaaccatctctaaatttttcctacttagtctacccggggggctacagtgttacccagagccccccagaaaaccacataatgaatattttattcctgatacacaactcaatatccttaattccaccagtatcaccatacatactgtgcaatgaagaaattcactctaggcacatgaccagtaagtactccagtgccagcttgtttagtaaagttatacttaagtcatgtgaacttgaaaattgcttagacttatttacttaatttatgagcgctcctttaattataagccaatctgrtagacacaacatataacagtaagtgtacatacaaataaacacatctagacatgtatacacaaacacaaatgaagatccaatagctttttaccttggaactctagccatgagatagcaatataagtccactggttttactgtttgacccaatgggtaatccagtgaaggctgtgaaccaaaatttcaggtcaagcagtttccatggtagtttgatttttaaaggccaaacctccccagactccaaacactggggccaaacagcaccaaaggagaacaccacatgctaaccaggccaaccctacttagaacagcagcacaaaagcctggatacatgcacctccatcccaccttcccattcaacagcaaactccagaattccaagcaatactgggccaaacagtattgcaaaagaatatcaagtttactgaatccttatttcccattactatatcaaacacacacaaacaatgactgcagcacagtccaactgctgcagcaacaaacaagccccaagagtgtccagactgtcccattgtcacctgtgagagaaaattccaaggaggcctttgtgctagacctcagaacctctgccgagggcgtcccctttggagaggttcaggtctggagttggattccccggggtgttcccctttgggatccaatcttagagtgtcagacgtctctgaccttagttaggcatgggtgctgctttgtatgttttccctccagaggtgatggcgtactatgaaatttgttttgtccctggatgaaagcctcaacttctagcatacttatgatttgataagaccatgctttcccttgcttcccgttccactagagtgttagccatgaactttaatgataggaaccggaggtgggtgcatttcttttgtccttagcaagtcagatagaataggagaaaggtcaaaactcctaagagacatcattgtttgccattactggttaacctataggataatttggcataagaaccctgtaggagaatttaacataagaaaacaaagtttaagtcacctgaaacgtgtgaattcaccctggatgagctgccatggccaactgcaacacacgtaaggatcatggactatagctggaaaagatagaaaagagtcctctccttccccctcctggtatgggcagctatcccccttggccttcaggtaacactggaaagtggccctggccagttgcccacaattatcagggagctactaggaaatggccactgaaagactgaaaaagaaaaaaaggaaaggactcaggcctctcacccaaactgggcggtggtggtcaggtgcttccacatagaaaactcttggtttcactggagtgtggccccggccagaaacctgcagttgcctctgtgcttaggcattgtgcgctgaagggcccaagttggaaagggaaaagagaaaaaagcattcccctgtatggagcagagaggaaaacgwgaagaaaaataaatctccaattttgggcttacctcctggctggctttccaaaatacgttactggtggaggatgtccaggttcttggcattttgaacaaagaattggacaaaaggcacaaagaaaacaaggaaaaaatgaagcaacaaaagccgagatttattgaaaatgaaaaatgcactccacagggtgggagccggctggagcaagtggctgaagattgcaggttacagaattgtctggggttggtcactttccrcaaccaatcagaagctgaagttacaaatttacaccctatgcaaatgtctaattggtcatagaaagcaaccattcagaggctgaagtgaagttacaaagttatactcctatgcaaatgaagacttggcccatgactagcctgattggttgtgggaggggatcaatcaaaggtacttcgaattttttcatctgccacgcagaaaaggggcargagggttgcaaagggagtggcttctggtccttttgttacttgggcatgggaagttggggttggggttttccttttgatttagttctaggaagtcagcatgagttggccttaggttccctgcctccagaccctattctgcctcaaaggaaagaaatggcaagctctggaatagaatatagtagtgctagattttttttttttttttaattaaatacagggtctcactctcttgtctaggctggagtgcagtggctcaatcatggctcactgcagtctctacttcccaggctcaggtgatcctcatactcagcctccagggtagctgggactacaggcatgcaccaccatgcctggctaattttttgtagtttttgtagagacagggtttcaccatgttgcccaggctggttttgaactcctgggctcaagcagtcctcttgctttggcctcccgaagtgctgggataaaaggcatgagccaccacgcctggctagtgatgctagatttaagctatattttggaagtaggatttgataggttggatgtgaaggatgaaaaaaaggaagacattgtgaagatacctcactggtttgtggcacgggaacctgggtggagggtagtgccgtttgctaagatggaaaagattagttttgggagcygacacaagaattcagtttgtgcttgttgaaaagctcaagaaactcaagtggagaactgatgactgttggatataaaagtcaggagttcagaggagaggcctggctgggttggagataaccatttgggagtcaccaacatataaagggggttttaaaaccacttagagattgagtagaggaactagcttaaaggaagggaagcaccattgtttcttgacagaagttaccaggtgccctgagatggggcaacccagggactctagacccagtctcttcaactttacagttttgttcctgtcacttttgttgtctttagttgacccttcctcatcctctgccaataccatttacttcctttcttatcatggatatgtgatacacactggtaccttacaaaggcaattgcctttatggatctttcatttcattttttttaagagaaggggtcttgctatgttgcccaggctgaagtgcagtggctattcacagccacaatcatcatgtagtacaaccctgaactctcctgggctcaagtgatcctcctgcctcagcctcttgagtagttgggactatcgtcacrtactactgtgcctggcccatttacattttaatacaaaatgttctgtccctgacatttgggttctccctcagtcttattttatgaagtagatgctggctaactcttagtagagtttagaataagatagaggtacatacctggtcaatagaaagggattcctggagaatagggtatctggatggagggtagaggttttgttggggaaaacaggtagtttcttagtatcctgttatttcatgatgtgaattagtgccagattgtttcattgacatcattcatcatacttcaccaggcatatactgattgtcacttgtgtgttacgcactgcgataaatgctggggtttctttttttttttttgagacagagtctcgctctgtcacccaggctggagtgcagtggcgcgatcttggcccactgcaggctctgcctcccagattctcaccattctcctgcctcagcctcccaagtagctggaactacaggcgcctgccaccacgcctggctaattttttgtatttttagtagagacggagttttaccgtgttagcaaggatggtctcaatctcctgacctcatgatccacccccctcggcctcccaatgctggagtttctaaggaatatgatgaggatgtgctgtaacacacaggtctatatcaataactaggcagtacagaggaaagccagtgcygaacgtattggcacaaccttcactttctgcaagtagtccctaattttctgtatcatagctgtatatttttatgtgtttgggtctaagctataaatccactcactgaccgtgtgctctgctcttggccttatttatttctggagattgctgacatttgcccttttcctcagatgctctatccctgtgggaggcttctcttttcctttaacactgctgcatactgcatagttattaaagacctaccccatcagactgttgatgcaataacacctctcatttgcccccctcctgcagtttgtctttgaatgtgacattggtaggtcttttttcttagacatttctttctctttaagttgttggttaatatttttcttttagtttccttaaacgtttattgaaatagtgtttgcatgtgttcattcattcattcaacaaatatttatttagcacctattacatgtcaggccctgttgtgagcactgaagacacagctctgatcaaaagcatttaaggataccagtcctcttggagcttatgttccattatggtctttacattctgcctatatgtcacctcattttttcagcartgctgatgacctgcatattcatgattctttacttagtacaatttcaattaaacaactcaatgccagccacagagccctgttttaacaataggcaaccattaacttgcatccttgatatagaagaaagtgtgctgctgtattttgttgttgtttgttttgctatacctttttatcttgaaaaagaattaccagtctggttttaaaatgtagcagtcatttattagtactgtgtgattgcataattaggtaactgtgcttaataaatttttagtgatgtatatagattattttttaacagtcttaccagcagtacagctttggttagcacatgctataagtaggtttatcttactatggcagacataagcatagtctatgaatagtctttgatgtaacctctaggagaataaataactctaaggaaaatatatattaaaaaaaattacctgtgaataacttgtgatttcttcttgccttgtccacaaatcatgctgtaactttaaaaaagaaatgaaaagtaaatgctgctccattaaaatttgtaatttaaaacttagaaaagtatctggtagaatagcaattaatccaaaaccctaaaattttgaatstgtttgaaaaactattcaggagtgaaagtttaggtattcacatggaaataattacctttaaatacccttactggtaaattattttatacaagacgaatagattctttgtggttatcagacaataattgaaatgtttactttgtatgatttttattattaaagtctttgcttcctccctactaataacttgctgagcatcagtgcaataagatatcatgtcattcagtattaatctgaatgttcagcagacttgaaataaatagcaacttagatatttagacattttgttgggaataggcccccaaatctggccataaactggccccaaaactggccataaagagaatctctgcagcactgtgacatgttcttgatgaccatgacacccacgctgcaaagttgtgggtttacggggatgagggcaaggaacacctggcccacccagggcggaaaaccgcttaaaggcattcttaaaccacaaacaatagcatgagcgatctgtgccttaaggacatgctcctgctgcagatagctagcccagcccatccctttgtttcctgtaaggaatacttttagttaatctataatctatagaaacaatgcttatcactggcttgctgtcaataaatatgtgggtaaatctctgttcgaggctctcagctctgaaggctgtgagacccctgatttcccactccacaactctatatttctgtgtgtgtgtgtctttaattcctctaacaccgctgggttagtgtctccccaaccaagctggtgtcagtacatttttattctggctaggttcttagctatggaaatcctcatagacaagtcaagatcttactttatgaaatgtatgcaataggagagtcagtgggatgtcactgtgattgggaaaaatgtttacccaagactattatcttctgaagctgggcaccaatatatacttgaagaatatttataaaatcgagaaggatttaaggaaagtacaggcctacctcggacatattgtgggtttggctccagaccactacaataaaatgaatgttgcaatatagtgaatattacaataaagtgagtcacacaaatgtattggtttcccagtgcatattaacatgtttacattgtactgtagtctagtaagtgtgcaatagcattatatctaaaagatcaatgtacatactttaattaagaaatactttatcgataaaaattgccaacaatcatctgaaactttggcaagtcataatctttttgctggtggagggtcttgccttgatgttgatagctactgactgatcagggtagtggttgctgaaggttgtggtggctgtggcaacttcattaaaaaaaaaaaagacaacaatgaagtttgctgcattgatagaatcttcctttcatgacagatttctctgtagcatgagatgccgtttgatagcattttaccacagtagaacttttttcagaattgaaatcaattctcccaaaccctgccacttctttatcagctaagtttgtgtaatattgtaagtcctttgttgtcatttcacagtgttcatggcatcttcattagcaatggatttcatctcaaggatccacttttttttttgaattcatagaaagtaatagattccatctcaaggctccactttctttgagttcttcaggttgcatacgtaaagagcaactcctcatccrttgaagttttatcatgagattgtagcaattcagtcacatcttcaggctgcacttctagttctcttgctatttctaccacgtctgcagttatgttcttctctgaagttttgaatccctcaaagtcatccatgaggctgggcatggtggctcacgcgtgtagtcctaccactttgggaggccaaggctggcggatcatctgagctaaggagtttgagaccagcctgggcagcatgtgagacctgggctctactaaaaatacaaaaaaattagcaggcatgctagcgcatgcctgtaatccctggggtggctgtggtgtgagaattggttgatcctgggaggtggaggttgcaaaaaaaataaaatgaacgaatgaatgaatgaataaatgaagtcatccatgagggttgaaatcaatttatttcaaactcctataaatgttgacttcttttttactgttttttgagacagagtctcactctgtcacgcaggctggagtgcagtggcataatcttggctggctgcaacctctacctcctgggttcaagtgattcttgtgccttagcctcctgagtagctgggattacaggtgtgcaccaccatactgggctaattttttgtatttttggtagaggatggggtttcrccatgttagccaggctggtctcgaactcctggcctcaagtgatccgcaccccccttggcctcacaaagtgctgggatttcaagtgtgagccatcacgcctggccaatgttgacattttgaaatttcatgaaccatgaacattctaaatggcatctagaatagtccttcccagaagattttcaatttactttgcccagatccatcagagtaatcatttatggcagatatagctttacaaaatgtatttcttaaataataagacttgaaagtagaaattattccttgatctgtgaggcacagaattgatgtattagcaggcatgaaaacaatgttaatcttttttttcctattttttttttcattatactttaagttctagggtacatgtacacaacgtgcaggtttgatacataggtatgtgccatgttgttttgctgcacccatcgactcatcatttacattaggtatttcttctaatgctatccctcccccagcttcccaatccccgacaggccctggtgtgtgatgttccccgccctgtgtccaagtgatctcattgttcatttcccacttatgagtgagaacatgtggtgtttggttttctgtccttgtgatagtttgctgagaatgatggtttccagcttcatccaygtccctgcaaaggacatgaactcatcattttgtatggctgcatagtattccatggtgtatatgtgccacattttcttaatctagtctatcattgatagacatttgggttggttccaagtctttgctattgtgaatagtgccacaataaacatacatgtgcatgtgtctttatagtagcatgatttataatcctttggatatatacccagtaatgggattgttgggtcaaatggtaattctagttctagatccttgaggaatctccacactgttttccacaatggttgaaccaatttacactcccaccaagagtgtaaaagtgttcctatttctccacatcctctccagcatctgttgtttcttgactttttaatgattgccattctaaatggtgtgagatggtatctcattgtgattttgatttgcatttctctgatgaccggtgatgataagcattttctcatgtgtctgttggctgcatagatgtcttgttttgagcagtatctgttcatattctttgcccactttttgatgggtttgtttgtctttttcttgtaaatttgtttgagttctttgtagattctggatattagccctttgtcagatgggtagattgcgaaaattttctcccattctgtaggttgcccgttcactctgatgatagtttattttgccgtgcagaagctctttagtttaattagatcccctttgtctattttgtcttttgttgccattgcttttgatgttttagtcatgaagtccttgcctatacctatgtcctgaatggtattgcctaggttttcttctagggattttatggttttaggtctaacatttaagtctttaatccatcttgagttaatttttgtataaggtgtaaggaagggatccagtttcagctttctacatatggctagccagttttcccagcaccatttattaaatagggaatcctttccccatttcttatttttgtcaggtttattaaagatcagatggttgtagatttgtggcattatttttgaggcctctgttctgttccattgatctatatctctgttttggtaccagtaccatgctgttttggttactgtagccttgtagtatagtttgaagtcaggtagtgtgatacctttagctttgttctttttgtttaggattatcttggctatgtgtgctcttttttggttccatatgaactttaaagtagttttttccaattctgtgaagaaagtcattggtagcttgatggggatggcactgaatctataagttactttggacagtatggccattttcacaaacagattcttcttatccatgagcatggaatattcttccatttgtttgtgtcctcttttattttgttgagcagtggtttgtagttcyccttgaagaggtccttcacattccttgtaaattggattcctaggtattttattttgtttgtagcaattgtgaatgggagttcactcatgatttggctctctgttaatggtgtataggaatgcttgtgatttttgcacattgattttgtatcttgaaactttgcagaatttgcttatcagcttaaggagattttgggctgagacgatggggttttctaaatatacaatmatctcatctgcaaacagggacaattttacttcctcttttcctaattgaaaaccctttatttgtttctcttgcctgattgcggctagaacttccaacactatgttgaataggagtggtgagagagggcatccttgtctcgtgccagttttcaaagggaatgcttccagtttttgccaatttagtatgatatcggctgtgggtttgtcataaatagctcttattattttgagatatgttccatcaatacctagtttattgagagtttttagcatgaagggctgttgaattttgtcgaaggccttttctgcatctattgagataatcatgtggtttttgtcattggttctgtttatgtgatggattacgtttattgatttgcatatgttgaaccagccttgcatcccagggatgaagttgacttgatcgtggtggataagattttttatgtgctgctggatttggtttgccagtattttactgagaatttttgcattgatgttcatcagggatattagtctaaaattctcttyttttgttgtgtctgtcaggctttggtatcaggatgatgttagcctcataaaatgagttagggaggattccttctttttctattgattggaatagttccagaaggtgtcgggggaacccrcccccaatattttaacgtaggttctttctgttttccataagtgtcatctggctgagaaataaagagaaagagtacaaagtgaggaattttacagctgggccgccgggggtgacatcccatattggtaggaccatgatgcccacctgaggctcaaaccaacaagttttttattaagggtttcaaaattggagggggtttaaaacagggagtaggtacaaagatcacatgcttcaaagggcaaaaagcagagcaaagatcacatgcttctgacctaacaggacaaaaggcaaaacagaactactgataagggtctatcttcagctttgcacatattgtcttgataaacatcttaaacaacagaaaacagggtttgagagcagagaaccagtctgaccacaaatttaccagcttggagtttttccccaccctaataagcctgagggtactgcaggagaccagggcgtatctcagtccttatctcaaccacataagacagacgctcccagagcggatgtttataggccttccccccctcccccccggcccccccaggaatgcattcctttccctgggtattaatattaatattccttgctaggaaaagaatttagcaatatctctcctacttgcatgtccgtttataggctctctgcaagaagaaaaatatggctctttttgcctgaccccacaggcagtcagaccttatggttgtcttcccttgttccctaaaaattgctgttattctgttgtttttcaaggtgcactgatttcatattgttcaaacacacatgttttacaatcaatttgtacagttaacacarttatcacagtggtcctgaggtgatgtacatcctcagcttacgaagataacagaattaagagattaaagtaaaacaggtgtaagaaattataaaagtattatttgggaactgttaaatgtccatgaaattttcacgatttatgttcctctgtcatggctccagccagtccctccatttgggatccctgacttcctgcaagaagaaggaatggtaccagcaactctttgtatctctggtagaattcagctgtgaatccatctggtcctggactttttttggttggtaggctattaattattgcctcaatttcagagcctgttattgttctattcagagattcaacttcttcctggtttagtcttgggagggtgtatgtgtccaggaatttatccatttcttctagattttctagtttatttgcatagaggtgtttatagtattctctgatggtagtttgtatttctgtgggattggtggtgatatctcctttatcattttttattgcatctatttgattcttctctgttttcttctttattaatctttctagtggtctatcaattttgttgatcttttcaaaaaaccagctcctggattcattgatttttttgaagggtttttttgtctctatctctttcagttctgctctgatcttagttatttcttgccttctgctagcttttgaatttatttgctcttgcttctctagttcttttaattgtgatgttagggtgtcaattttagatctttcctgttttctcttgtgggcatttagagctataaatttccctctccacactgctttaaatgtgtcccagagattctggtacgttgtgtctttgctctcattgatttcaaagaacttctttatttctgccttcttttccttatttacccagtagtcattcaggagcaggttgttcagtttccatgtagttgtgcggttttgagtgagtttcttaatcctgagttctaatttgattgcactgcggtttgagagacagtttgttgttatttctgttcttttacatttgctgaaaagtgctttacttccagttatgtggtcaattttagaataagtgtgatgtagtgctgagaagaatgtgtattctgttgatttggggtggagagttctgtagatgtctattaggtccacttggtgcagagctgagttcaggtcctggatatccttgttaaccttgtttctcgttgttctgtctaatattgacattggrgtgttaaagtctcccaatattattgtatgggagtctctttgtaggtctctaaggacttgctttatgaatctgggtgctcctgtattgggtgcatatatttaggatagttagctcttctttttgaattgatccctttaccattatgtaatggccttctttgtctcttttgatctgtggaaaacaacgttaatcttatacatctccgtcagagcgcttgggtgaccaaggcgcattgtcaatgagcagtaatattttgaaaggaatctttttttttcctgagcagtaggtttcaacagtgggcttaaaatattcaggaaaccctgatataaatagatgtgctatcattcagggtttgttgtttcattgaaagagaacaggcagagtggatttagcataattctcaagggtgctaggactttcagaatggtgaatgaacattggcttcaacttcaaatcaccagctacattagccccttacaaaagagtccacctgtcctttgaagccaggcattgacttctctttagctatgaaaatccaagatagcatcttccaatagaagctgttttgtctccattgaaaatcttttgtttagtatagccaccttcatcaatgatcttagtgagatcttctggataatttactgcagcttctccatcagcactttatgcttcactttgccgttttatgtactgagatggcttctcttcttaaacctcatgaaccaagctctgctatcttcagatttttcttcggcagcttcctcacctctgtcagctttcatagaattgaaaagagttaggaacttgccctggattaggctttgacttaagggaatgtcgtgtgtgatttggttttctattcagaccactaaaattttcttcatatcagcaataaggctattttgctttcttatcatttgtgtgcttactggaataacagtttacattttcttcaagaacttttcctttgcattcacaactaggctatttggtgcaagaagcctagctttcagactctctggactttcagcatgccttccgtacttagcttagtcatttctaacttacgatttaaagtgagagatatgcagctcctcctttcacttgaaaacttagagatcactgtaggtctaattttcatattattatgtctcagggaatagggaagcctgaagaaagggagagataaaggagaatgactggtcagtggatcagtgagaacacatacaacatttattgaggttactaatgtaattgtcttggggtgccatggcagaatgtcagaaggctgtggcaccccaagacactataacctcaaagatcattgatcagagatcatgataacagatgtaatagtaatgaaaaagtttgaaatattgtgagaattatgaaaatgtgattctgatgctgatagacttgctagatacagggttgctacaaagtttccatttgtaaaaattgcaatatctgtagggcaaaataaagtgaagcacagtaagacaaagtatgcctgtatctattaagtgttatagccctagcctgaagaaaaataaatttttaagtaatcatggacatgtggtatgattgtatatcttttgccataagtgatataaaataatatttgagtaaattcgtattatctccaccaaatataagagtagaaacaggctatgattgtgggcacagagggcagaggacgtatctgactggggattgccaagacctgaaccctgggcattcagtactgttgaaaggatcagagagacattagatgccagagtaggcagaacgtcagaagtctggagtatcggtggataatggaaggaggaaagatgtcatatgtcagaacctgctgtggagcaatgccaggctagggaagaaaatgggtctccaggaaaaggacaagtgaccaatgtcccatggtcagacagttgaaggcaacagcagtagctgttgtgacccacactgggaattagatcttgactgttgggacacactaggctaatgaatagcatggaggttaggtgggcagtgatcagggtaagcaacaggtatcgaaatgatttgttatcagcatgctgtgggttaaggcgactaccagcgtgtagatcaggcactaggataaagagtgggcctttcgatcgggagatttaggctgaagccgttctgtgctctgaattgtaattttgcagaggagttgacttaaagttttgggatgactgtgggcattgggcagcacctgagcttgaatcgaagctctaatgtcatgatgtttctgaattctaacatttagaactttatcaaatgaagctttcctataccattcagaagagtactaaggtgaagatagaaggacatggacagagtccagaacctaacaatgaatagctaatatttattcagcactcactgtgtcaggtactgttctgagtgtattacatgtactgcttcatttattcctcctaaaaaatccatttagggaatggacactggctcacagatattctatttaagtaataagacaataagaaggactaaatatgatgtggttaggcataagattatggtatgttccaaactccagcagttccgggtaccaaagtttatctttacccttccttattgttttatggtccatgaccatttgctgttgacgtatttagcacatgccactggtcatgcacattccttatggcttaggttcctaacacctgtctgtgcttcttcccagaccactcactttgacgggtctccctttctgactttccataggtcttattgtctacacgcatttagtcacttggttatattccttcttcctgttttatacttttacaaaaaattgtttartatgggtaaattttgccccattaacaagcttctccaggtctgtattgcttttgtatcttatagtattattgtaaataattcagcaatttgcataatatctttctttgtaccttgattttagtcaagttgtaattaactgttaagaaactggttgtttttatgtattttacaacacacgaartgattttttttttkattttcacagggcaaactcagaaaatgaatcttttccagtctgtaacaagtgccttggataactcattggccaaagatcctactgcaggtaaccctgatatgtgcctgaattgtggtagctgtgttaattccagaattgaagatttgcttaaaatatttatgtggagctcaatggttaacattgtatctacctgacattttcaaaggtatgattggggctaaataatcaaattgcaatattagtccacttattaccagttagttctcatgtatatttaacatcaagtcagctttctcttacagtgtgtgtggtcctgatattgtattaataacttctggattaaaacctgctgtgtactcctgtttctttggcacatagaagaaaacaaaataccttttcattcagctatttatttataaaatgaagacttgattttatgcttccctttggaatacattgtcattcaacttgtaatatgttttggaaataattgtaatatttatatataattttataagtatcttaatcttcatcttattaaatcattgatacaaaaccaattgttcttccactgtatgttttcaaatttgattggctttacttcatatatgtatatacatatatatttaacatatatctatatatacagtttatatatgtgtgtgtgtgcatatatgttgactatacattgggcttccaccttccacctgataatctgtagttttaaggttaaatgaaaaacaggttattttttagggagaagtgggagctggactaaaggatgattagatcttgatttgttttgaatgctacttgcggatgattgaactagagaagtaaattcaaacatagagaagggtgagttttttcttggggtcgataaaaactggttaggtacgtttatgagactagcattcagctctatgaataccccttattttaaagctcctgccaatttccacctacaccattctttgccttgcttactgtgtccttcgtgcttgcctcctttctgcttcacacagtctaaatccctttcctatttgtgactgttcccttagcttggaatgctcttctgatggcttacttactgtatgctgtgtctcaggaaaaaccacaggcctggaagtctggagcatgagtcatagttctgcctctagctttctgacttggccagtcaatttaccacttctctggtctcgttttcttcatggataaaacaaatgagattctagatcagtggttctttctcaactggggatgatcttagtctccactcccacaactctgtttacatttaacaatgtaagtgaagacactttttgttgtctcaactgtgtgtgtgtgtgtgtgtgtgtgtgtgtgtgtgtggtaactgtcatccagtgggtagagaccagggttgctgctatgtatctacagtgcacaggacagaccctcacaacaaaagaatcatctagtctaaaatgtcaataatgtagaagttgagaaaccttgatcgagatctatggtccatttatcttttgtgatttaaaatgtaaacatttaaattacttatttctcattgttagtattatttagagattattaaataaaatgtattatttaaatactgtttttcagtaatatttggtgaagatgttgcctttggtggagtctttagatgcactgttggcttgcgagacaaatatggtaagtaaatacctatatgaatagtattctgatagaacttttactaaaagatcttaaaaatacaaaatatgcctactaaattttttgtcatatccccattrtatggatgaattccttttcatttccaacgccacccgcagaatcctttggcctatattttctcaaatgtcttctagtatccctctgatctagttcatattacacatacagtgtaaatgattccaaaataattgtcattaaatgtatattatttattgtgtcattcttctgtccaagaacctttggtgttttattgctagctgcctkagccaatttcaattccattgcctccagttggagattctgcctgttgggtctttattagcaaaytttatcttttcgggaagagagagagagagagagggagagggatttagtttttaaggaactggctcatgtgagtttagttttaaggaactggctggcaagtccatagggcaaactggttgacttgaaactcaggcagggtttctgttttagccttgaggctgaatttctttttgctcgggaacctgcagtcttttctcttaaggccttaaattgattgtatgaagcctacccacattataaaaggtaatctgctttattcaaaatctactgatttaaacgctaatcacatctaaaaaataccttcacaacaacttctacacctgtgtttgaccaaatattaataattgggtgccatagcctggtcaagttgacatataatgaaccatcacattatccttcttacatgttttatcccagctgatgtctttaattggcatgtgattgatttctgcccattgcttttattaatttcatttgactcagttaaaataatcagaatrcattttggtccatctttgaattcccactcttctgacttgcagtgtaaggaatgtgttttgacctcctattgttagggatacctttgaaatgcttttgacattttattttttgtcttagtcttacctgatttagaattcagcaaagcagttcacgtgagggctggcaggagctgatatctccctctcttctttcctttggcattgctctatattgcttgtgtattcatacggggcaagaggagtgagggtctttaaaatttttttttaaattgttgtctctttttctgttccactctttctgaggttatgttatacttaaatccaagaacccatacatgttccatctcacttattgggaacttccagcttagtcttttcttttccatttatagcaggttgagtttctggatccagtccgtctgctttctcctacttctaatacctgcttagagcttgaggtagttgggcaaaagattatttttcctgatcatttagactcctgctacaaacttttagatctttaataaacagttaaaaatctttacacatttgatttcaaaagtaatgcatatacattgtagaaaatttggaaaatatagaaaagcataaagaaaataaaaattgctcatgttttcagagataacttggagataaccactgtacacgtcttggtatatatacttctagactgtatttgaatatgtttgtatatattaactaatatttcaaacacagaattatacttctgtaactgagtcttctctgtatccagtataactatgctgtggagcagtgtctagacctcacaattccatcttgcctgactcagtgtagtagcatgccatgtgctttctgaatagctaatatttattcaactcactgcgtcaggtactgttctgagtgtattacatgtactgcttcatttattcctcccaaaaaatctargggtttgtgtaggctgttgagtcctctgctgcctgtctgcccaggttctcatccataacactctgcttaccccttctgtctggggcattttatcgatgccatctgctgctcatacactggtgactcctgaatttctgtctctagttcagacttccgttctgagcttcagatctgtgtattcagtttctactgcacatcttcacctcagtgttccacagtcacttcaaactcagcatttccacacctaaggctgctacatgcacccagcaaatrtatgcctcctagtgcatttcctattttggtgaatatatcaccatccatttagttacctaagccagacactggggaaattctaagtgtcttccttctttctagttccccacatccagtgaagttgtataattatatctaatctggcccctcctttccattcttactgccctgatacttaagatctttcatttttctctgcctgcagagttttatttcttttcttagcagtcaccactcctttagtcttaccctccctccaatccattccctatcttgttgccagtgtgatgattttaacatgcatatttcttagcaggacatacaaaatacttttttttttttttgagatggagtctcgctctatcgcccaggctggagtgcagtggtgcgatcttggctcactgcagcctctgcttcctgggttcaagtgattctcctgcctcagcctcctgagtagctgggactacagccgcataccaccatgccctgctaatttttgtatttttagtagagatggaatttcactgtgttggtcaggctggtctcaaactcctgaccttgtgatccacctgcctcggcctccctaagtgctgggattacaggcatgagccactgcgcctggctaccaaagactttgagaactacttaggtagctacctgacctcatctgcttttatttttattttatttattttatctattttttagtttttactctacagacctaggaacttgagctttttaaaatttttattaaaactaatgttgagttactggttgtttctcttaagccccctgttgttttttcttctctcttcctttgcacttgctatctgggtctctctaccctgtctgattacctggtagactcctatttcttcttcagaagattcccctgtgaaactcttccggaccctccaagcagactcaggcagttctttatcactattcacgctgcaccttttaaatcttgaaagttgtactgtaatccataactcccaccagaaagttgtcaaaggcagcagatctttaagctgttccacagaatggatccctaggacctaatattgtatcaggcagtatttatgaagtgcgtgctgttgagtgaatttaccctttgctctcacttagacagtgtcctactgtctcaggaaggggatttccctctctcacattaattatttaggttggtctgattttattttccttaaaaaataggttaaaatggggagaaactaactcttaacttgaaaaagtccagtgctcttagagggtacctgcaaatttatgtttcctgtcatggcaggaggctgagctaactaatggctaagtaactcttttagctttattgtcagcagctgctgtgaatttttacaatagttttagggcagtgaagttacactttattaatttcaggttgaggatgttgatcaagatgaaaaattaaatcgctgatactttctaatgagagtaagtgagcttctgttttcagaagtgaagaataaaggaaagggtgaagagaaatatattaaaatacatttttcttgcatatttaaaaagtaacatatacttaaaaaattatctgcccttttgaatatagggcaggaatttttagctatacagaagcataactgtctgcttaggatttttaaaggataatttgtatttaaaataactaaaagattatgttgatatagttcaatataacaatcaagtcacactgcattaaatgacatagcaaagaaaacccttgtgccagatcagttcgctttctggggagtgctgaatgttgagtgggaaaggatcaagtcagcaggtggcagcctaccctttgaaatgagaacatccctgttggcattgtgccagcacttgaactgctgcaaagcattttatattccatcagaaggcggaatttgaaggattgtgggttactgacatacgttgtaaagctgaatactacttgatatgacaaagaaggaattgcataattagaggcaatgctataagaaaaggaagagaggcatagagcattttgtattccagacgatccagatgagtgtggatttagtaccactaaactgcttctcttccttgtcctttgatagaacaaaatagtatgagtgctttgaaaattagaagaaagaaaatagtatgtcctcatcaacattgcattccaaatggcagctttaaccactgtacgtaatgagatgtattgattaggagcaacagctggacctctggggaagcagggagtgggagagggcagttaaaggtagttgatttgtagggtatgtgtgattttatgttgaatgccacacatgctttctttctttcttttttttttaagacagagtcttgctctgtcacccaggctggagtgcagtaatgcgatcacggctcactgtaacctctctctcccaggttcaagcaattctcctgcctcagcctcccaagtagctgggactacaggtgcccaccaccacacctggctaatttttgtatttttagtrgagacggggtttcatcatgttggctaggctggtctcgaactcctgacctcaggtgatctgcctcccttggcctcccaaagtgctgggattacaggcgtgagccactgtgcctggtgtcacacatgctttcattcatataagtaatgagacagattcctcatggcatataaaaaatccattcgtattgtcattctctgagagagagagaaagagaaagagtgtatgtgtgtgtgtgtgttattaaaataagattttggtgtgtcaggtttaaggtatgtttgtaacattattctatactgatataacttgcctggttgtggttcttagtgtatatttggcccacttattggaggaaatttaggtgaggaaaggaatagctgaggacctcctgaattagtctacaggcctaaacmtgtgccttttcatgggacttgatgtttttccattactgtatccattcctttacaccacaggtgtggcctgtcatagcagcttgggaaaactaatataaccacttacttgttttcttatgtaaacatcactgaaattgtataaccagatactttaatacactgaagtcaggttggaaaactaggacaggcatgcggtgaaggcaagtttttgtctataatatatcaatatttgggagttgactttgggcctcagtatcctcatcagtaaattgaagggaaaggactaggtggtcctctgggattcttccagagcatacatttaggtaagctttatgrttttatttgtttttaaaaagaggaacacagttttttcatgctttgattccctttacatttagaggtttttttgaatatagttgttatagcattttggaaccatggggtaccttaggcatttaatttaattttttcttaagatgtcccttttccagcgttttgttttattttatttatttatttatttatttatttgagttggagtctcactctgtcacccaggctggagtgcagtggcgagatctcagctcactgcaacttccattccccaggttcaagtgattctygtgcctcagcctctgagtagctgggataataggcatacaccactatgcctggctgatttttgtatttttagtagagatggggtttcatcatgttggccaggctggtctcgacctcctgacctcaagtgatccgccagccttggcttcccaaagtgctgggattataggtgtgagccaccacacttggctgcttttccagcataagttttaaatttaggggtgttagcaaaatctttgctctcttacatattttttgtgaattatgaaattaatgtctttaacagagaaagtgatcttccattatatgttcttgttgcaaagaacgggttatttgggtgatactcatactcttggatttagtgtcagggttccattgtagaatggcaatctgtgagatgggggtttggtttctgggttgttgaaactaattttatggaagaaaaaaacaggataaaattcaggaaaattccttagggaaattgaatatgtagaggatttatttcccctattgaagtatacatatttatgacatacaagcagattgaataccagatatagattgtgagatgtctaacaggaatttggagtgaaaacaggtattaataagttggtgtaaatctggtttcctaatatatttattaaaaatatttttaaaggattgttagtagctttaaattgctcttgatattacaaagttcttttgttttccaaaggtgcacatgttggcagaactagatgaacatgtttaatatgccttttttwccccacagtgcttttttcacaaacattaatttatttctaaaaattatggtcaaatatatataacatttactgttttaaccatttttacagttcagtgttattaagtacattcacgttgtggtgcaattattaccaccatccatcaccagaacttttttcatcttacaaaactgaaacactrtaaccatctaacaataactccccattttctctccaacagtccctggcaagaacccattctactttctatctctatgaatttgactrttccttatgtgagtggaatcatttagtatttgtccttttgtgactgccttattcatttataataatgtcctcaaggtttattgatgtttcagcatgtgtcaaagtttcctccctttttaaggctgcataatattgtgttgtatgcrtatactacattttgtttatccattcatttgttgatggatgtttgggttgcttctgccttttgcctattgtgtcctaagactgctataaatactgatgtgcaaatatttgrtagtgtcactgcttttttaattcagaagaacaaagttggaggactcacagttctttttttcaaaacttactgcaaagctgtagttatcaaaacggtgtgacagtggcaaaaagacaaacattgaygaatggaatagaatagagaacccagaaataaacccttgaatatctagtcattaatttttgacaatgatgccaataccattcaacaggggaaaggacagtcttttcaacaaatgatgctgggaaaactggatattcacatgcaaaagaatgaatttggacctttatttaacaccatatacaaaaatgaactcaaaatagatcacagacttaaatgtaaaactataaaactcttagaagaaaatgtaggggaaaagcttcgtgaaattggatttgataatgactttttaaatatggctctaaaggtataggcaacaataaaaatagataaattggactgcatcgaaattaaaaayatgtactttgaaggacactattaacagggaaaaaaggcagttcacagaatgggagaaaatacttgcaaatcatgtatcagataagagattaatatccagaatatatggagaacttctaaaactctacaaaaaaaaccccaatcaattaaaaaaataagcaaaggacttgcatagacatttctcccaaattgataatttatatataaattaccagtatataaattaccagtgaaaagatgctcaacatcatcaattattaggaaatgcaagtcagtatcccagtggaataccacttcgtactcattaggatggctgttatcaagaaaacaggaaataacaagtgttgctgaggatgaaattggaatcattgtgcattgttggtgggaatgtaaagcgacacagccacagtggaaaacagtacggtagttcctcaaaaaattagaatttccatatgatgcagcaatatgcctttctttttatctcatttaaaaaatccagctgaatgagttagcatagaaaatggaatggaaatattgatgcatgcttcatttactttagtttttcttatttattactttgatgaccttttgtgatttttccaaataaggattttagacactactaaaattagaatgggtacaaacggtcactgtattttactttctctaatttataacactgacctctcagaactttagttctatatgacgtggatatagactagataagaatttctcagcctgtcagcactatttatttatttctctatttatttgtttaagagtcagggtcttgctctatttcctatactggagtgtggtggtacaatcatacttcactgcagccttgaactcttgggctcaagcagtccttccgcctctcacagtattctcactgttggcttgttgaccagtggcttaacaaataccatttaagaaaataagatatttaatatattttgtaggatatcagagctggggagaaatggagggtatatctagtctagtggttttcaactgctggtgattttggcaatgtctagagatatttttggttgtcataccttggggggtaccactagaatctggtggatggagacctagaatgctgctaaacatgcacagggcagccccaccaaataactgtccgtaccaaaatgtcaatactgttgaagcyggctgggcatgatggcttacagttgtaatcctagtgctttgggaggccaaggtgggaggattgcttgaggccaagagtttgagaccagcctgggcaacatagcaagatgaccccacccctacaaaaaattaaaaaaaaaaaatagctgagcagggtggcacacagctgtagtccacctgctttggaggctgaagcaggagagcccaggagtttgaggctgcagtgagctgtgatcataccactgcagtctagcctgggtgatagaaggagacccagactctaaaaaaaatagtgcagcraggctgagagactctgatctatttccatgtaatgtggacactgaaattctgagaggtggagttgctcagtggcaagtggtctagggctcacgcttcctaaaacccagttctaggatttttgtactatatatttttccctcatttataaatgaacagctaatttatgtaaaaacataaaaataaggaattctttttttttattattattatactttaagttttagggtacatatgcacaatgtgcaggttagttacatatgtatacatgtgcaatgctggtacactgcacccactaactcgtcatctagcattaggtatatctcccaatgctattcctcccccgtcccccaaccccacaacagtccccagagtgtgatgttccccgtcctgtgtccatgtgttctcattgttcaattcccacctatgagtgagaatatgtggtgtttggttttttgttcttgcgatagtttactgagaatgatgatttccagtttcatccatgtccctacaaaggacatgaactcatcattttttatggctgcatagtattccttggtgtatatgtgccccattttcttaatccagtctatcattgttggacatttgggttggttccaagtctttgctattgtgaatagtgctgcatgtgtgtgaataaacatacgtgtgcatgtgtctttatagcagcatgatttataatcctttgggtatatacccagtaatgggatggctgggtcaaatggtatttctagttctagatccctgaggaatcgccacactgacttccacaatggttgaactagtttatagtcccagcaacagtgtaaaagtgttcctatttctccacatcctctccagcacctgttgtttcctgactttttaatgattgccattctaactgctgtgagatgatatctcattgtggttttgatttgcatttctctgatggccggtgatggtgagcattttttcatgtggtttttggctgcataaatgtcttcttctgagaagtgtctgttcatgtccttcgcccactttttgatggggttgtttgtctttttcttgtaaatttgtttgagttcattgtagattctggatattagccctttgtcagatgagtaagttgtgaaaattttctcccattttgtaggttgcctgttcactctgatggtagtttcttttgctgtgcagaagctctttagtttaattagatcccatttgtcaattttgtcttttgttgccattgcttttggtgttttagacatgaagtccttgcccatgcctatgtcttgaatggtacttcctaggttttcttctagggtttttatggttttaggtctaacatttaagtctttaatccatcttgaattgatttttgtataaggtgtaaggaagggatccagtttcagctttctacatatggctagccagttttcccagcaccatttattaaatagggaatcctttccccattgcttgtttttctcaggtttgtcaaagatcagatagttgtagatatgtggcattatttctgagggctctgttctgttccattgatctatgtctctgttttgggaccagtaccatgctgttttggttactgtagccttgtagtatagtttgaagtcaggtagtgtgatgcctccagctttgttcttttggcttaggattgacttggcgatgtgggctcttttttggttccatatgaactttaaagtcattttttccaattctgtgaagaaagtcattggtagcttgatggggatggcattgaatctataaattaccttgggcagtatggccattttcacgatattgattcttcctatccatgagcatgaaatgttcttccatttgtttgtattctcttttatttcattgagcagtggtttgtagttctccttgaagaggtccttcacttcccttgtaaggtggattcctaagtattttattctctttgaagcaattgtgaatgggagttcactcatgatttggctctctgtttgtcttttattggtgtataagaatgcttgtgatttttgtacattgattttgtatcctgagactttgctgaagttgcttatcagcttaaggagattttgggctgagacaatggggtttctagatatacaatcatgtaatctgcaaacagggacaatttgacttcctcttttcctaattgaataccttttatttccttctcctgcctaattgccctggccagaacttccaacactatgttgaacaggagtggtgagagaggacatccctgtcttgtgccagttttcaaagggaatgcttccagtttttgtccattcagtatgatattggctgtgggtttgtcatcgatagctcttattattttgagatacgtcccatgaataccgaatttattgtgagtttttagcatgaagggttgttgaattttgtcaaaggccttttctgcatctattgagataatcatgtggtttttgtctttggttctgtttatatgctggattacatttattgatttgcrtatattgaaccagccttgcatcccagggatgaagcccacttgatcatggtggataagctttttgatgtgctgctggattcggtttgtcagtatttttttgaggatttttgcatcaatgttcatcaaggatattggtctaaaattctcttttttggttgtgtctctgcctggctttggtatcaggatgttgctggcctcataaaatgagttagagaggattccctctttttctattgattggaatagtttcagaaggaatggtaccagttcctccttgtacctctggtagaattcggctgtgaatccatctggtcctggactctttttggttgataagctgttgattattgccacaatttcagctcctgttattggtctattcagagattcaacttcttcctggtttagtcttgggagagtgtacgtgtccaggaatttatccatttcttctagattttctagtttatttgcgtagaggtgtttgtagtaatctctgacggtagtttgtatttctrtgggatcggtggtgatatcccctttatcatttttaatgcgtctattcgattcttctctcttttcttctttattagtcttgctagcggtctatcaattttgttgatcctttcaaaaaaccagctcctggattcattaattaaaaacccttcaaaaataaggaattctaatgaaacaaaggtcatgggttttgattagtcatgaaataagaggctagcgatcagaaacctatattaaaaagtttgaaaaaaatctatttttgtgattctcttgtgaacgagattttctgagtgcattaggttgttctggggttggagctacttctgtaaccattgttttcaayttaattgattacacaataaatgttagagctaccaacaggtgttctctttgacattttaagtatcagtcagaatgtaatgaccttaagccagtttttctcaatcttatttgacaatggcatgcttttaaaaatgttcaaatgtgagcaccaataggggcttggaagataggcttggattaaagtgaacaaggaaaaatgggattatagataattattgtcagaaagtataaaattgattcatgtatcttttaagcatcacaagaattagaaaatgagaccatgtgtattttattaagaacaatatgtattagaaaagtaaaagatctttgttttatattttcattatcaaatatgacatccacatcctcaagccacacatccacgtaatatgaaagatgttgctaaattagtttcccaaacctgattcttagtcttctgaaaattctcttctagactggtgcctttaacagggggaggaacccagacatttttttcccttcagtatttagaatttcttgaatgagtacaccctagatattttaattgttttatttttgacagctcagtttctaatttttgcacatcaagaccagtgaattttcatttcttatgtatttggagttgcttgttttttgattcagatataatttttggattacaagcctgttcttttgctttaaacttcccatttcaaccatagatcttgaggaaatctatgtacgtagttgaaatttattttattgagtaataagtgttagattataaaatcaaataaaatacaaatatatattgaaattttaagagagtttaacatataatgttatccactaaaaagatgaattatgttaatcctaatatgagttataaatactgtctatctattattgctcaggttgaatgtcaggtaatgtgtgacttgctgccattcctaggtatagctgacccatacgtaaaggtagagtagaacatagaactattaagtactatagctatatatttagcacttttctttcagatctaataataccttttagaaggccataggagtccctttgggacacaggaatgggaataaaaacatataaaaataatacaaagttggggatttttacacatttgaaaaatacagtagtgcttactctgactctctctattcatgcttttgattaccatgctgcaatattggctgtgttgggggaggaggagtattgaaaaacattttgcttttgtgtttctttgacctaactttaagactattaagtttatttatcttttgtcagagtcatttttcttttctaaagaaaaaccacatgcagtgaaggaattaaaaatgggcctgctgccactgctattttggagattcttagattagcttagatcagtccagttatgaaaaaatttttttctctttcaaacagtgccgcatattccttgatttcaatttctcagaagtctgggagattatcagtgtaacatttctaccaaatttctcaaaattaaaaagaaatccagtgaagagtatcaataaatacagacaatttagattcctaaaattatcagggctgaaaaaggatcagtataacaattttatggagcagttcagattggtcaatatctggggatgcttggattctcccatcctgttttgttcatcttaaaacagatcacaaagtccgttaaatttcaactgctcctctttctaggagttgcatgtgtgatagccatagcagctgtatggcaacttcacgttgacactgtgctcagacattgagttgatattgtcacttacctgaagtcacttaactgtctcaggaagtttgaatctaaatgtgtaggttattacacagcaatacattctgtgcctctaattctgtcttggaaatccactgttatcacctttaatgcagttataaagtcacataatcataaagttcactaggaaaagttattttccagtcagactaggaggagccaataaaaacagctctacgtggaggacagtattaatgtcatttgccagatatttgttgagtgagactgcctatgcaaaagtcatagagaattagagcacagtgctttgttttctgttcccatttaacatagatgagatttctcagttgctttgattggcagagttgatgaaggatcagttaggtaaaggttggcaaatgtcatgtgctaagaaatcacttgtgaagcttgttggacaaaaagttttcagtttcctggtgagcagctacacccaaaggcggctttagcagtgaaatgcttgaccttctcttgtggcatcctgccatccttcccctctagatcctctggccaccagccagaagtggtggcatctagccaatcataaattagtcagaggattcttattctgtaatactggctcttggaaactctagtatctttagtaataaggaatttcttctccgtttctgggcatgctgttcatttaacccatcttttctgttttctggtctttgccagcttggagtctagcagaaacaaagaaacttgtttctaagccaaaaggaaacacacaaacctagtagtatatccttaatcaatatcctatagacaatgaatttgagcatttctttctttaaaaaagtggatgttcctcaaaactcaaaaggaaactcaaaatcacttcaggaacatcttaattctgtattcaamggcagaaatacagcatattaaatggcataagcccactggatttattcagatctaaattaagcattgataggatggacctgaaaaggaaaacttatcgtgttcttaacaaattcataagtccagtaaggcaacttaggtatttgcatgaagaaggcactttttcttttgtcaaataaagattctgcaaagtttctgtccaagaactttttagcttttatagtatacaatatgtcagagaaagttacaactctgattacaatgcataactgtttatatgaaaagagaaagtttgatatcttgacatacatttaatgcactagttgtgttctctgtaatgactgaattcatcctgcagtttgatgaaggtgaatcgggaggggaacctggatcttgggaacttccaacctacccagcctcttctgatatctcttagacacttgtaagcagaatttgagccaaatagtctcaatgaagcattcccttcattcatttctggccagattaacttaattcacgctcatttctagctcaccctctttctttcttaaagcatgaagtagaaggtagttcatggctcagcttaaactcccattacaytgaaagatttcagtaaagtaaaatttcagtaaaatttgttcccaattttaccagtctgagtgatcctaagctgcacagtattcattttactaagggagcaacagccaagttactgcacagtcttccactgtttaaattgtcttgtagcagtatagtgccactgctgttgttttttccatcccacgtttcattttccctagaatatctccatgttccagggaagtacaggatcagagaataggcagcgttctttctgagagttgtacgtagttacataacgtatcaggattttcttgttcagttttatctttgtagatccccttctgctattgtttgtgtctgttttggtttctaatttctgccaaactgctaagggatttgatccaactgttagcatttgatgtgttttttcccttccagatcacatggactctatctttctgttgtgaatctctcttgtggaggctttagcagttagttgggcagggtcttgccttgcctgtcctcttctttattgtgcacagccatgagtggactgttgtccatcctctggagcatacacacaaaagcctgtgttgatggtgcagtaacaacatatggatcagtggtccttgcctttgctaacattgtggtatcaggagtgcttgaggggactttcccccaaaccacctcatccatacatcaaatctaagtaaaaacaatgggcttgctatgaacatgtaagtttaacacaagcccactggcttttgtttccaactagaatggttctttaagctgctcttatagatattttggagcttctgctgcctggcaactcaactctgtcagtttcatttagttgggtcagttttatagtttctgcagaactggaagctggccatttaaaatagccttggttccactgacacatgtgatgtgattgctggaccaactgttcacaagttgtgaagagattacaagacagtagtgggctgaaatatgctcagtagagaaaggctggtgttgactgataccattaccacattgaccagtgggtacaggaagtaggtagttactgttgaagtataataaacaccaccaggctttgtctaggctaaggcacttctttagtatgccctgggatctcttgggttattttcctggttacagagaccaatttattagctctaagagcttgttggagatgccatcctaggaaggtagatgccttccagttgtgtgtatgtgtgtatatatgtggaataaatatttgaaatgggtttcagacagctacaacactgtttgcttcacagcactgcttccctaccttgcccatatgctgcaatactgacatgccagtctcaccccagagattaggagttactggtatggaatgtggccagggtgttggaggtttaaaaggtccccaagtgattcaaatgtgcggccaagtttgagaactactgctctggaaggtactaaaattttaaagatgtggtccctgcctttaaggaaatcatagtatacataggccaaagcaaaattacatggaagtaaaataacagtgtaagaatgaaataacaatataaaatgataaaaataacgcctggtaacttcgtttcttttatttaggctagaatttaaatgrcagaattaaattgtgcattgagagttttgatagaaaatggcaactgagacttctggaaaaagaagcaattgaacataggcatctacttttgttcctcccaaaaccccactaaaatatcaagggatcttcttttgtcaaggcctaaatccgcagggatggggagaatgggactggagacaacctgaagaaaatgttggaagctggaaggtaaaggacttaggaggcttggaaaaacagaatctggagtgagcagtggggcagccaagaaccagcctggtttacattaaagaattgcccaaaggcttaggaattggcaacatcaagtacttctgggaatagggatgaatggagtggggctttagaatagggagaattggttgaaaatctttttaagagcccctcagatctctagcttccctctaccacctggaagaatctggaggttaattctccaaggagaatgtattaataaaatacatctagagagaaggaaggctgggaaatgtagtctttgttctgtgtggacatgtgctcagctaaagctctggggttctgttactgcgggagaaggggagaataaatactgggggacaattagcagttggcactatgcttacatacacacatacttgctacattaatataataatattgataatgatattgatggtgataatagtagcagcaaagtcttagagtgctttttacatgcccagcactgttcttagaactttacatatattaactcacttaattctcaacaatcctgtaaagttagttctattcttatcccactttgcagatacagaaactaatgtacaaagaggtaaaataacttccccaggtttcacaactgaaaccaggcctgagacctcatctttctgtgattaaacytgacattgtgattaagtttgaagaaactgattgctaattaatgttgttcattgtattggttttgtgttctctttgaagaaaatagtagtgatatatgtgctcaataaatataaggagttattgctatttttataaaattatatgtttgtacaaattcaagttgcattagattacaaataatttaacctttgatgtctattaactttttatgtttaaaaaaggttcatacattttgaagacaatcagagaaggtggtaagttgagtgattaaattgtaatttaaaacataactgtggtcacagtgtagagaagctgagactaaaagcagggagacgggggtgagatgatgcctgagtccaggcgttgtgaccttcggtgtgcgtcagaggcccctggaatgcttcttagatcatagaatgctggatttcaccctcaagatttctgatttagtaggtttgagatggggcccaacaatctttactgctaagaagtttccagaagcagcagctgctgcaggtctgagaaccacagcacctatctgagaggtaatgagagtctaaattgtggtagtggagggaagggataggtgatgaggcatcagtcagggagaattgacaggattgtgattctttgaagttgaggtgaatggagaggcaaggatccagagcagtggtgaggggttacacattgaatgaaattcctgttggttgttacaattaggaggccattggtacttgctgacctcaataaaagcaattttcatggaaaagtagggtcagacatagattagaaaactgagattttgaggagataggttaaatcctgtaatatattgtagaatacatttagatttctttagttctgaaatgcttgattatactctgtatcccagcttattttagcaggccatctgatactgaccaaactaatgcttccattgtcttcatgatactttctggctttccactcaccttttgcttaaaagtggtcctgacatttttaagaagtgtccatatctactttatttcaagtgaaagtcatccttctgcatatatgcttattagtttcagatcagtgtagaaacctttctgcttgcattttcttctgtatggtgacttttgagctctttctcttagatcctgcttttgggtcctcaaaacagctcagatttaagacgtcagagctgtcaagctctgctggttttactttggggtttctttcactattgttcccattgccactatcatagttcatgctcccagtacttttgatctgaatgattatagcaattatcatgagtctttgttctcactctccttcctagtcttatttaatttaaaaatatctgtgagattgattttccaaaataaagctctgatcataacacttctttgcttaaaatcttctcagtgtttaatagtaaagtccaaataagcaatggggaaacaattccctatttaataaatggtgctgggaaaactggctagccatatgtagaaagctgaaactggatcccttccttacaccttatacaaaaattaattcaagatggattaaagacttaaatgttagacctaaaaccataaaaaccctagaagaaagcctaggcattaccattcaggacataggcatggacaaggacttcatgtctaaaacaccaaaatcaatggcaacaaaaaaccaaaattgacaaatgggatctaattaaactaaagagcttctgcacagcaaaagaaactaccatcagagtgaacaggcaacctacaaaatgggagaaaatttttgcaacctactcatctgacaaagggctaatatccagaatctacaaagaactcaaacaaatttacaagaaaaagacaaacaaccccatcaaaaagtgggcgaaggacatgaacagacacttctcaaaagaagacatttatgcagccaaaaacacatgaaagaatgctcaccatcactggccatcagaggaatgcaaatcaaaaccacagtgagataccatctcacaccagttagaatggcaatcattaaaaagtcaggaaacaacaggtgctggagaggatgtggagaaatagaacacttttatactgttgctgggaccgtaaactggttcaaccattgtggaagacagtgtggcgattcctcagggacctagaactagaaataccatttgacccagccatcccattactgggtatatacccaaaggactataaatcatgctgctataaagacacatgcacacrtatgtttattcacacacatgcagcactattcacaatagcaaagacttggaaccaacccaaatgtccaacaatgatagactggattaagaaaatgtggcacatatacaccatggaatactatgcagccataaaaaatgatgagttcatgtcctttgtagggacatggatgaaattggaaatcatcattctcagtaaactatcacaagaacaaaaaaccaaacaccacatattctcactcataggtgggaattgaacaatgagaacacatggacacaggaaggggaacattacactctggggactgttatgggatggggggaggggggagggatagcattaggagatatacctaatgctaaatgacgagttaatgggtgcagcataccagcatggcacatatatacatatgtaactaacctgcacattgtgcacatgtaccctaaaacttaaagcataataataataaaaaaaaatagtaaagtccagttttcatagcttagtataagacttttgtttctagcttcaagttttttcccccatattcttggctgcacccacactacccaccagttgtccccagtcttctctgcctgtctgccttccttatgctgctctgtccctcagaaggccctctctttccacttcaaatccaacctctattctggaccctgctcatcttcttatagcccttgctatctagaattccttttaactattgtctatttccatctagtactgtacctgtaactcagtatacttattttcaaccatgtatttacttatatataatattcaccttcttgtctcccacgatgcccataatagtgccaaacayaaagattggttgaatgaatgaagaatgggaaaccagctaggatatagtgcaaataaaggaaataaaatgatgattcatttaactgatacagtaaatatattgcatatcagtgaatgatgtctaatggaattttctaaagctaatatgagtgacagtaggaacctcttttaagtatagtcaatcaagtttgtcatcttttttttttttttttttttttgtgagatggagccttgctctgtcatccaggctggagtgcagtggtgcgatcttggctcactacaacctctgctttctgggttcaagtgattctcctgcctcagcctcccaagtagctgggattacaggcgtgcaccaccacacacagctaattgttgtatttttagtagagatggagtttcaccatgttggccacactggtctttttctcctgacctcaggtgaccagcctgccttagcctcccaaagtgctaggattacaggcgtgagccaccacacccagcctcatcttttttgattgttcagaaatcttttttatttaacttcttagcttttaattgagtcctagatatttcagtgagctgaatactgtccttaatatatgtgaaatgtcactgttatattatgccatttttaataagcttgttaagcatcacttggatgatacatgtgcatatatgtgtacttattcacacatgaattcacatgtattttacctaagattaatatgggccaactgtgttttctatacaatggaatattattagatggactaatggattcactagcctgattaatgatctgtaccagttaatttctgcgttttgatacatcttattgatgtgttttctgattctatttttatttactcattggagtgtgaactagaaaaatactatacacaagtaattagattgtagaagtgatgtgtaagatttgtttgttataattgattttagatgcagaaacatttagagctagcataagaaaagttgatgtaagttatgaaaattagaaaacatttcagatttagaatataatgatattatttaatttttaaaactaactttttttttttttgtttttttgtttttggccaaacattaatcatttggggcttttaaactgtattgcatttgggaccgcctgtatgtgggcctttagttagttccagtagcagtgagactcagatattttgaaagaacaatatcagatatagttagtgaatattgcttattttcaggttaaaactgattcttcattctcttgagctttcttttattaataggtcctcagtttggacttagaattcatttaatgtcaaccttctcttgtttacaaaggggaaagctcatttatttttcatgctttgtcatattgttccctttgtttctgagaaaagggcaccagcctatttagatagagcagtttaggctatttataaagctaggcaggttaattgaaattgacagcttggtaatgtcctccttggtgaatgacgcacaagggttttagatgatgttggcatgctgttttcacttatagtcaggaatcagctggaggaatttgtgtgctttgagctctggtgttgacgtaggtactgggtacagatatgttttaggaaacatctcatttccatataaatgaaggaagattaaaaagaaaaatttcaatggcttgcccttaaattgaagctggtatcacaaggatgatgataatacttcttttgattttctggaaaaacagctttggttgtattcaagcactgtggagtcgttacaggtttattcagaaatatttttgtattcttttttttttaatctgtttattcagcatcagctatgtgtacattaatttgaaaaactacatttttattgtgtattcctccaaactccaactttaatctcttaggttttagattgctccatttaagaaatttgtacaggtacataaataaacttgattttaataaaagatagaagactgaaatagtttttctttcttacatgacaagactgttattctttcttttttaaggacatagtaaatatcagtttgcctgaaatgagtttttgtgtttttctcttcaagtgtcacttaaaggagaggctaacaagcttaaatagtcacttaaatgagagtytaatttaagcttaactggttatgtagtcatattccctgacacccaaacattyaggtcataatcatttgtttcattcatgacagggtgatttccaaagtacagacattttatctcagaatcacattgagcatgcacrgaagcaaattttagcttacataaagttaagaaacactagtagttgatttattattagttgtaatatatcttctatgggcccatagccttatcaaaactagcactgacaattcctgaagatatctggggctcttggcatggtgagttggtcctgtacttccaggttcatgctggtacctttgtggatcatcatgtctgtcatatggaccttagtcaaatgttatggcaaacagcacacagcatatagctcagggacccttgagggggctagtgtagagtgagggcttttaagtggaggcttgcttgaaaagaactgtgatctcttaggatcagttgcccctcatttccaagcagtgcttggagggctttgggcccccttggttgggttcaatccttgacctgtgtagtctgtaagttgctgtagatacacagctgcagcagtaacattgttctttaatccaggagttgcctttgatcttcagcccttcattctcactcttggggtctcttttttgcagaaggtgagccgtggccaggcttcctgtttatagcctccctctgttcagtggtaaacctcaggatttttggatgaagatctttggatgtgtgcctccttggtgcccattcatggtcttgctaatggaacaggatttgggttcatagttttgaattgcctgtcacagccccgctgtcatggctgaacttccttccccaccccacccttcatcccagatagagagataatgcttattgttgagtgattcaaggtactgtagacatcttccagctggagtggatagagtttgaggatagtggatagagtttgaggatgagcacagtacatgcctagtgagatcttccagctgatggtctgggatccttaaagaccatgcaacgtcctcagtacttctcagtgccaattgtcaggggatttttggctgccacgtgcctctcaactaacaactattaagtcctgttggttctatagtgtttctcaaattctttcttcttcttattttcctcaacactatcctgataatagcattatacatcttataaaatgctttatggtttgcagagcacttgaatgtgctttatcttatttgatcctcagatcagctctgattgatagccaggttagttatttttatcctgattttgtggatgaggaaactgaagcacaatccaacaccacacaactggtaaatggtggaaccagatttaaacccatgtatcgtgatgccagagcccatgcttttaagcactgtagtaacttgcttatatacaccaaactttctatctttatctcccactactgtttttaatcctcttatacttcagccttcttggtttgcttcccaactcagagtttgcccttatttcctgcctttggtcacactttaccttctacctgtgcctgtcgaaattctgcccattcttcagtgcctaattcagtgtcttctttttcataaaactttgtatgagtcctccaagcccaaaagaattcccctctcctctaatagcattttatttgtatgtcattttcttacatcataattatatttgacttatcgcattgtaagttgcgtgaggacagatggtgttttatttatccctttatcatttgtagcaactaactacagtgctttgtacatggtcaagtacatatgaaacaaattatatcaagtgatattttttactgggtcagaatcagagcctctggtggtggcaagaggtgatttgagagagcttgatactatctcttacaacatctatctaataagattaggaaggtatatttgagagactattatcttcagtttgctccccctcctaggacacaactaattcattaaagatcttatctaagttgtgacaaacagcactttgttcatcttaagataatttcattccaatgttccatatttttagtagtctctaatctagtaattgataatagtaattgaatttcttggcaaacaaaagaagacctaaattttaggtatcaaaattatttttattttatactttaagatttcttttataatgtattaaaaagtaaaagtacttttaaaaatttgtgcccaacttcaagagcattttaatttttttgataactatgataattcagataatttgttgaactataagattgatatagtaagtttgaaatttcacttgaatctgaactgattcgagggcttctatctatttaattgtttcctttccccatacccatttctttaataagtggattatgtaaaaacagcttggcaccttgttaccagtaacatcttagttttacccacaagtttggakattttacactccctttttgagatagaaacatgtataaatttccacagagtaatagtggaacagtgttaacagtgctatcttgatatgcaatttattattaaatcaaagtttgaagtagccctttttaaaaggactttaaaaacatattcctgattaaggaagttttcctgatcatttttattcctgttttcttaacatgctttttattttatttcattgttggtagctaggtcatgcactgtgacagttttatagtagctatcttatttgcataggtttttggagaacatatgatggaattttaggacattgtcctcaaagacttattacattcagattagctatttaaaactgttttgtatttgtggctgtggtgccagataacaaggtctaatttaatatattttagcatttgtgacttgagtagtttgcaagagacaatgtaggaaataaatttctctagtagaaagaaagggaagcaattgttgattcgggtatcaagctgccagttactggctattgactttgggctaaccacttaagtaacaattcgatttccttatttgaagactatggggttagtgggaaggttttcaatagcactaggattttgtcattttgtaattagtttttctatgtgctcttttcatacccaaccatagtttttacagatcattgaattatcacattgattctatcacattaattcttttgttcttaatttacttaaagaacacgtttttaccccttgtggrattactggtaaatataacattgaatttctttttttccccaatagatgcaatataggaatgtacttatattctccttaatttagaaattcattttaaaataaaagattaatttacctcataataatgcaaagttgtttttttttttttttttaggttttctttttttgagtgcttggttgtttggagcttagttgtttttttggtgggatgcgtgagagatttctaaaatagtgcttttaaacatttgccacagctccatggatagtttgttttaaaaaatactttcccccccaacttagtcttaagtagaatttttcttctaaaattgaacagtggagtcaattattttatttgtccaccttctccctgcctggggtactgtttctttaactggtgttaaccaaccctctgtgtccatgaatgtattctgagagttctcacattttctatgagatttaaaayttggggttttactgtcaacgataatcttgagaaggtaatataagctttttctgggtcatctgaatcatttgccatgcaactagatactaccacatggtaaaattagtgttggtgtttattattgtgttcatggtaatgtgaaggccaactacttcatattatctgaagtgtatgaggctttcactgagattcaaataacaaacagtgctaggagcatccctgcttgccacacccaaaagaacctgcattatagagataacattcaagttgtaggcagaagaaagattacattttttaatagagcaacttgtaacaatcattagaagtaagtgtatcagtaagtacaaaaagaattttctatacttgcttctagtgataattgaataaggcacacatataatgcagaattcaatatggctgtgataccaaccatatctttaagtgacttccttaaattagtgttcaaggactgcttgttagtggttttgtttggaacgaggtctgattatccttaactggttaaggaagccatgaggttatcagtactgttgtgtacagtgcatttaggtgaataggtattcttttcattagaatgattaaagtaaaaacaaaaacagaaagagattaaatatattatcaaactcaaagctttgttggtgttgacatttcagcagaaaaccgttgttcattatgccatattttttactgttaatttgaatttaattggttaggtagttacttttgtatttaatttataaatttgttttggctttgtctttttatcagggtaataaatgctaagttttgttttgtatgtattaaaataacatattaaaagtggtttaagttggcattaggagtgtaagaacacatttttcccttaaaagttgtatatctagtacttggtttgagaaacctcagtctatgatactgaacattattgtatcataatcatgatagctaaccttcaactagatgttttctatttcattttctatgggttgcttaaaattgtgacttttctccttttctgtcattaaaaaaattaatttctctaatacatggctacctaaaatcatgacataatccactgatctgtgtgtgggtagttgcatattcaaaatattgttatctggcctgatttttagtttctgtgatttttgactgtcatttctattttaatattactattttgggttcatttttcattcattcatacattgaacaaatgtttttaaaattccactatgtacaagggattgttctaggcactggagattattgggtgagaatttttttttttttttttttttttgagatggagttttgctcttgttgccaaggctggaatgcaatggcacgatcttggctcaccrcaacctccgcctcccaggttcaagcagttctcctgcctcagcctccgaagtagctgggattacaggcatgtgccaccacacctggctaatttttttttgtatttttttttttttaaatagagacagggtttctccatgttggtcaggctggtcttgaactcctgacctcaggtgatccgcccacctcggcctcccaaagtgctgggattacaggtgtgagccactgcgcccggccaagaatctttatatttgggtgggcctatagtctctcttcactgtcagattttctaattgtttaaatgaaaaatttcatgtttatattacatagtacatatctatttcaactaaactaaatctgtcttgctgacatatctagatatcttagtacttggtgttaccacgtcatgattgccatagacataaatgtctctttagtccaaaatgatgggtcttttaagcttgttcattcaaacgatattactgaaagactggtaaattcaagaggttgtagtaggcactattggactactgatgaaatgaatgagacagtctgtgttcttagcagaggagcttagaaattttaatccagtcactgaacccttgaaactaatttgggctttgctgtgtgttgacattgttgtatctatacccagaattgcagactcattgattacagaggggcttttgcatttaataaacattcattcagtaagcatttactaagcacatacatttgtttctggttgatttttatcttctttaatttgtctcttagccattacgatgacccagatatcttgccttggagtgttcagaataatagggtagaatctgtaggacaaggttcacaaacagctatttctaaacaatgcttcttggaggtaacaatttgaagaatattgttgtaggataattataattataggtaaacttcctaaatctggaaaccttggaacctgtcatattctagaaccataaaaatagtgctgctttaaagcaaaagcagaattagatagagggagatgtccagaagagatgcaagaccaatgacagccttggccaaccctgtgggatctgtgcaatcagaatgactcttttgccaactagttgtccctagttgggctgaaatgaccaggcctttgtactctcacactgatcaatcagtggatgggagatgccaagcatgacctcagtctaggaagttcactgcagataaaacagaccctaaagggtgtgatagctgaagtgctgatatctgtcagccaacagatttcttagtaaccaaggcaacatggtgggtgatcttcacaaatgggtgatctgggcttcatgcatcatagtgttcaccctaggcagtaaactgtgacgattaccttgatgacaggattgcttattcagtgttctttttcattttctacctctggatcatgagtagcctaatttacgatgctaatatgtggtggattaggtgtgagtaaggggaacaccattttccctttactactttcaacttaggtgttaatatttggtaactctaataataaggtgactataacccttggtttacccaggttagtcctgtttgcctagaaatacccagtttaagcctgttgaaaatcagttagcttaggagaaatacctaatgtaaatgatgagttaatgggtgcagcacaccagcatggcacatgtatacatatgtaacaaacctgcacattgtgcacatgtaccctagaacttaaagtataaaaaaacccaaaaaaacaacaaaaaaactatcttctcaactagtacagagactagattaaaaaaaaatcagttagcatctaacatctgttaattatttttagtaactcctcacagtctcagaagtatcccagtttgtatcccaatacaagataaactgtattgtcattctacttagtaattttttaaatttgcgtgcatattcattatttaagcatttttctggcctgtctaatgaatagaatgttctgttttccattttttaagaggcagaaatggtcttctggattagctttgtatttttgctttagttgaccctaaaacaaatgcgttttatctttatcaaatttttcatcatcaagctttaatatattgtgaaatcacaacatattctatcaagtatactatgactgaaattactggatgtattatttatttctgtctcccactgttacaattgtgtctataatgacttttatttccctggtttattttgtagcttagtcacaaatatttatgttcttatttatctttctgctcagagactgggacctgagctgtttccctgatggagtcaatcattttccagaaggatattccgacctattcaaatctaggtcctgaggaaacacaacttgcttagaaatagacagttttaaatctgcttttacagaaatcttttacagaaatccataatggaaagaagaaatttaattttatcccagatagatttaataacttgcagatctactttgttcatagataaactctaaaactaattaaagcttctgaaaaatgtctagggacagaagaaacagattcttagtgattcctttaacctatcaggaggtaataggctgtcaccttaagtcatgctttttcgttttcttttttttttctcattctgtctcccaggctgsaatgcagtggtgtgatctyggctcactgcagcctctgcctcctgggttcaagcgattctcctgcctcagcctcccaagtagctgggtttacaggcatgcaccaccacacctggcagattttttgtatttttagtagagatggggttttgccatgttggccaggctggtttcgaactcctggcctcaagtgatccgcccacctcagcctctcgaagtgctgggattacaggcctgaaccatcacaccggcttctttttcttaattgtttctctgccctcttttccctatttttctggtctatagttgtggctgaatgttagatagggaatagggttcactggtggactcaattttacccatttctaattgcttagcaagaggagtcacctgctgattttaatatgaagtttagtattgtgtaatggacaatatctttaacagatggtgtactgccagtgatgtagaacttcttaatcatgctccctttacaaaagaagaacactattagaaagcgatggtatgattttatacttgatcttcaacaagtgagaaattgataagtcaaatatacagtcagccatctggcattccacacatgttttcattgacttgggagatcatggagttatacaaagcaggagtagcacaatataagaaaatggcatgttatagaaatatttatttcttttattttagttatctatactattgatcagcaacaagtttatcagaaattttcattttattcagctatctgagtttagaaagaagtaattcagatggtatttacttttttttgcccaatcaaagctgctaggcattgaggaactgtttcagagtgggcatagttttttccttcacatgaggtcaaagccactaaccactgaattaaacatttgctgagcttggtttgcagcactttgattgatatagattccttcttgcaacttctttgagcctccgaaacttactgtgtcattatagaccccaactgcctttaaaagataggaatttcaacatcctacaatttagtcatcatttggatgaatgacttaaattattatatattttaggaatattaattttttatactacctgagctaagctgtgtgaaattattatcttatgacatacacactatttaatatattgaatttcagaaagttggttccaaatatcaaatagctgagtagaaagtagaaaaagacaatccagttgctgagaatggggcagaaaaaaaaaatgtgatttctaaatccaaagaaactagctccccttatctaatttatcctttcaaactaaaaatatgttaaatgctgtcagtgtgccgggtaagtaagtgctaagcactgacactccccctccttgtccttatggacctcaggctgatcctctttgttcccagcctggctcactgtcactctctccagcattcctgtcagtgtccacatggatggtcttttcaatattctggcttctcagcttcttatccttttcttctctggtgatcttatcctccatcctacatcagcttttcattcttacagccatactsttgtcattagcaataacagtggtctctgcataatctcagtttgaagcatcctcaactctgattagcattttgaatctcactgtagctcactgcttctagtacctccattccaacaatcttttgaccttattgattcttaaaagccacggattttaccaccttgttgctgtctttcatttccctgattacctttctttcttttacatccagtttaaatttcatgtcaatatttgcttggcaaaatctaattctagttaaatccatctctctgtgtaaatcctgagctgaatgtcactggagcaaaacatgccatgatgcaactggtctttaagttcaaggctgggaagttccggggcactcatgttgcctgccatcatgctgcatgttccgggtccattcggtcttccattctcccagatgactatttcatacttttttccccctcctcaaaacagcttctcccatccttattgttaggtaataatttagttttgcattttactgaaaggatagatgccactaataagaacttggataagctcttatcactgcatatatccatgtaccaccatcaatgcccatatgccttctttcctcctgcactctgaaagaatgtaagggttcctatcaacccctccacagtagatcccttcttctcttgtcaccttttcaaagacacggttccagttattattccttctctccattttattaattttctcaaaataatcagtgttctcttctctactgatcattcccatcagcctgcaaatatgctgttattttttccatcttaaaaacctgtcttgctgggtgcagtggctcacgcctgtaatcccagcactttgggaggctggggcgggtggatcacctgaggtcaggagtttgagacaagcctggccaacatggtgaaaccccatctctacgaaaaatacaaaaattagctgggcgtggtcgtgggcgcctgtaatcccagctactcgggaggctgaggaaggagaatcacttgaacccaggaggtagaggttgcagtgagtggagattgtgccactgcattccagccgggtgacagagcgagactacatctcaaaacaaaaaaacccaaaactctcttgaccccatattcccctctagtgactgctccctttctcttctcttctctctctctcttttttttttaagacagaatttcactctgttgcccagggtggagtgcagtggtgccatctcagctcactgcagccttgacctcctgggttcaaatgatcctcccaccttagcctcctgagtagctgggactacaggcacgtgccaccacacccggctaatgtttttattgtattttttgtagagatggggttttgctgtagggtcttgaactcctgggctcaagtgattctccgaaagtggtgggattacaggtgtgagccatagcgcctggcttcttctctcttttatagcaccgtttctccatataattgtcactactcattgtcttcaatttctctgcttctattctctattctcacttgaagtcactgcaattaagctttttttttttttttctcttctctcctactttgcagaaacggtcatgttaaggtcaccaatgataaaatcctcagtcctcatctcactttttaatagcagtatagacacaagttaatcactcttttcttggaaacacttccttttgggacaacacattctcctcctggttttcctccaaactctggcttgttttccttctcaacttggctgatttatgtctcacctgcttgtcttgttaacattggagtatccaggctacaatcttagatctcttcttttctctctatttaaatttactaggtaatcttatcccatcccttgttattaaatgctgtctttatgctgaagacttccaacttatatccaacagtctaattgatagctctacctgaatatctgagggcatctcaaagtaaacatctccaaacctgagctgctgatctctcacccaacatgcttcttcacagttttccctttctcagttactgggaactctgtccttcaggttacccaggccaaaagactttgaatcatccttagtattgctgtgactcatactgcacatccatttcatcagcaaatccttttagctctatctttagagtatatccagagtctcacaccatttctccaccttctctgctattatgcattgttatctcttactgggattattgcagtagcagataatcaatcttgctgtgtccacccttgctattgacaggctattcaccaaatacgagtcagaaggatcctgttgaaatgcagctcagagaatggcatgaccgtactcaagaacttcctgtttttctcactcacctgctctctgactcgctctcacagtaaaagagggtttacaatgtcctccagggccctgcttgatcatctacccattccatcctgtaactccttgactttatctcctactactctttcttttactctagaccaggcaatctggactccttgcccttcctctgatatmttaaacattttcttaccccatggtttttgtacttgatggtcgctctgcccagaatatttattctctcagatatatgcatggtacacatcctcatttatttaaaccctttgcttaactgtcacctctcagtggggtcttcccaatgtccttaaaaatcatagtagtttccctccctccatcacctactcccctggttcatcatctaacaaactaaatatttccttcatttattttgtttttattgcatttcttgtgactagaatgtaaacattcatgaggaatgttttcgttttgtttgctgctgttaggaaagtgtctgtataatattaagtagtttaaaaacatttgttgaataaatgtatgaattattatagtcttttcagtgttataatttttctattacacataagaaatggagccttagagtgtttagtaatccgtggaggtaacacttaaacccaggtctttcttggctcatagtgcagtcactcatgtattttttcatctatcaggacacttacagggtactacaggaactttacattggatgaattgcattataagatagaggaagtcatcaatattgtgtgtcttatttgtgctcttctcctcaatcagtatctgggagaaaatagaaaccgatttttaacagttcatgttgaagcactttttgctacatcatagaaacttgtcagagagacttgttaaactatttcctcaaatcaaacatgttttggggtaagagagttctgagaaactcacttttttctgctttctattggcaacaaggctatatttcttaccgagatgaaaaatatctaaatcccatgaactagcaaggaatcaataagaatgctgctagtttggttaaggtggttcaggtattccagggctgtgaattccatgggagacagctggaatttacgttcattttctaccactgagtttttggttcactggaatcatagattttcaaagattatcaagctactcacagtcaaatagggaattgatgaggaatagaggtcacaatttcagaagatagtcacagatcatgatgagtatgaatcatgctttcagtttttgcagctgcttatagcctggcaaactacaggatgtgtctggtcggcatttcccaacacctgccccatgtttcgttcatattcaaaggaaatgattaagctaaaagtgaattctatatatgaaaaagaactggtatccttggattatggaagtgaaatatgaataccaggtttctcccaaaacatttggttacatggccagactgtggctattgtctttgtccacccagaatcctgaaattataatttctaatgaaattctggcatgagctgagaggtggtgaaacgtcaagtgagaattgaattatacgctaataaaattgtacctagtggttcgaatggatcgtctaaagggtttatcaaacttctctaatttgaagggtctcaaactccaaaatctgcctccttgttggtgggcacagctcttttaactgggagagattatttgctgctgggcttttggagtgtcctgtgggcacaagtgttggcaaggatttgatcagtttttgcacagattttggggctcctccatgctgtgcccttcttttagggatttagtctctcaattttcaaccactggtagccacagactattttctgacacctcagatcaaccagactgagtctatttgtttgaattttagctgtcctgactcatagactggggagtccttttgcaggacaaggcttatgaacgtcatggtcatccactgggcttaatttctttcaagagtcaagactccagtttatgcctacttttggcccttcaatgcctttaaatagttgtttgttttattttgcccagagtttataatcattaaatgtggaaaggatagtctgaaaaacgcaactctgacattacgttcagaacctcaataagatattttgtatagttttttcattattattcaatttaaaataccactttctaattttcattatagtttcttctttgagctgtgagttayttagctatttattaaaaaaaatttctagccaggcccggtagctcatgcctgtaatcccagcaccgtgggaggtcgaggcgggtggatcacctgaggtcaggagttcgagaccagcctggccaacatggtgaaaccccgtctttcctaaaaatacaaaaattagctgggtgtagtggtgggcgcctataatcccagctactcgggtggctgaggcaggagaatggcttgaactcaggagtcagaggttgcagtgagctgagattgcgccattgcactctagcctgggtgacaagagcaaaactccatctcaaaaaaaaaaaaaattctaacataagaattttttgaatgatctttttattgatttctaacttaattacactatggtcagagaatatatgtaattttcatcttttaaaatttgttgagattggatttgtagtccagtatatggtcaattgatgtcagtgttttctgtttaattgaaaaggatttgtattctttgcttctgggtgcagtgtcctttgtatgtcagttaggccatgtttgttgaacatgtttaaatcatctctatttttcacactccctccttttttttggtatgccttttttgtcagttattaagactagtacattaaaaaatcatctcccactatgtggtgattttgtccatttgtccttttagttgtgttgcttttttccatttatttggagcccattgttagataagtatagatttagaattatttatttcttgtgaattgaaccctttaacagtatgcgttttccctctttatctctggtatgtttttttcctgaaagtctactttgcctgctattaatatagtgacatcaactttcttttggttaggttttttattgtctattttttccttcttttttcttttttttaacaacctttctctgtctttagagtttgtgtttcctttcaaatagttgggttttcctttcttttaaattagtgtgacagtttttattttcattgaaacattagattacttacaattaatacaattattaattggatttaaataattcaccttactatttttttttaatagagacaggttttcactatgttggccaggttggtgttgaactcctggtctcaagtaatcctcttgccttggcctcccaaactgctaggattacaggtgtgagccaccgtggctagccatactctttattttctgtttcctctacctgttctatacttctccatcccattattagtttactgaatttttaaatgtattatgcatgacattactctcatttgccacattaayctttttttcttttctattttaaggaaaagatagagtttttaataccccattgtgtgaacaaggaattgttggatttggaatcggaattgcggtcactggagctactgccattgcggaaattcagttygcagattatattttccctgcatttgatcaggtaagtgaatgaayatttctaaggttgttcaktcattgaaatattcaagtattgccgctacccttccacccacccttacctgcattctaaacattttattatccttttactaatgtattacaattataattttgttatgagcatatatttaaagatctaatagaatagtttaagcagatagattgggattgggtgaagtggctcacatctgcaatcccagcactttgggaggccagggtgggaggatcacttgaggccaagagttcaacaccatcctgggcaacataatgataatgagaacccatatctacaaaaactacaaaaattagcccagtgtggtggcacatacctgtcatcccagttactctggtggctgaggcaggaggataacttaaaccaggagtccaaggctacaatgaactgtgatcgcagcactgcactccctgggtgacagaatgagaccctttctcaaaaagaaaagaagagagaaagaaagaaagagygagagagaggggagagggaagaagggagaggggagagaggagaggagagaggaagggaaagacaagaccctgtctcaaaaagaaagaagggaagggagggagggagggaaggaagaaaaggaagagagggagggagggagggagggagggagtgatgggatcctgtctcaagaaagaaaggaaaggagggagggaaaagctcattgtgctatgggaaaggaaggaaggaagggagggagggaggaaggaaggaagggaaagactcattgtgccatgggaaaggaaggaagaaaggaaggaaggagggagggagggagggagggacgagaccctgtcttaagaaagaaaggaagggagggaaagacttattgtgctatgggaaagaaaggcaggcaggcaggaaggaaggaaggaagagggggagggaggcagggagggagggaaagactcattgtgccttgggaagggaaggaaggaagggagggagggaggaagaacggaaggagattggaagggaaggactcattgtgccatgccccgtctttctttctgaccctcagattgttaatgaagctgccaagtatcgctatcgctctggggatctttttwactgtggaagcctcactatccsgtccccttggggctgtgttggtcatggggctctctatcattctcagagtcctgaagcattttttgcccrttgcccaggaatcaaggtatgttcatttatgtactttatttgatttctatttgatgtttccattttgattcattctatttaatatctatgcttatctagaggaaagaaaacaaacaggattcttggaatttatgtgaacttaactgtatttaagaaggggaggttagcagttcttttaagtatgctatccaatgcccagttttacagcaagttctttttgaaggaggactggttttataaactctggcattgattaattttatagacttcaaagaataagaccaagaacatagttggtttacctcccctctctttcaaagctttatatttctttctaacttaagtctttctcacttaactgatgatggggtgattttaataaatcttttgtttagtctgtatttacctcaaagtcacagggataacacttttgcttttaatgtatttcttacttgttaaaaagactaagagaagactgttacctagattttttttttctgtttaaagttaggtaatacttgctcaaccaattaattttgaagcatctcstttttataacctgtctttcacaaaagcttaggtcttttgatggtaaaaatattttgagttttttatgtcttaattttttgtattatcttttctgtttctgtttactgaataagcttttcaggggatcattgtagaaacccatagatgtgtgaatccagagatgtatatttgttttttgaccacatgaattgattgtgagcatgtgtctatgttttattctttttttcttatttgttttttctaccagatcaaagttataagcttatcttagttgagtagatgttgcctgatttttgaatgtgagctagaagttgtagactgggaaagaagccatgtgcgaggcaagttatttttgtgcttgagctaaacattaattcacatttaatatttataacattatattgtttttaagaacagatcttttctgtctgtcccctgccttctcttttcctccttcattttctttcttcctcttcctttttcctttttttttcagctgaaatgaaaatatacttaaagtacaaaaggctaatatgaagaaagcagatgaagggaacttaaaaagtaggaacataagataaagacattgtgtgatatggttattaatgtgttcagaggtccagaacagaaaataaaattttttatacagaaaatagtgacatttttgctgctcttttatttttaaaataaaacccttcaataaaaatggcataaaaatggctttgaaagccaaatatagtttgcctcagggaatcttaagtctttgtggtaagttcaggtttattttaataactcttcctatataatatttgtctttaaacaattataatcatttaaaattagacaaagtttgtgatttaagtcaacatkagatagaagttaagagcttgagctttggtatcagtgggaattgggtgagactctttgatcaagcaagtcgtgtgaccttaggcaagctacttgttctctctaaacctcagtgtctatttctaaaatgaggaacattataatagctacctagtggggttgctatgaacagatgaattaattcacagagtgcttggccaagtttacacgtgtacttcctactgtcattatcatcttccttgtcatcaccctcattctcgagaaggtcctggagccctttcctgtgagtggaagtgtggactatccacacttttgtttttgctttgctatataactggacactatggtgcctggactgtaaaactcagtggactaatttttcacttatgaaatgaagaccatattttttttcatgggaaaagaagattttgacatgttaaaactggagaagagagttgcatgtactttgaaagtagaaacagattattagtagaagagatttcttcatagataaacacaggtagatattaacaatattacagttttttgctttgatgaatgatctttgcatattctttttattttttttatataggcaagtttagcttcttaagagtagtatcttagttaacagaacatggtagacatctgataaatatctgttgaataagaggcatttttatttttatataatatgtaaacttaataagtgataattaggcttaaaataaatagccaatatctatttttaattagtaacaattgattatttaaatatcagcccttcttagcagcgagtttactgggatatatttttactaaaattgtcttaaaaaaatctgtttttgcaggtggttatacccagaagccctttccaggccaaaggacttcttttgtcatgcatagaggataaaaatccttgtatattttttgaacctaaaatactttacagggcagcaggtaaagattttctttattttatatttgtgaatatctttatatactttgttttttatagctctaaaagttatatcttttttttctatatggttgatttatattttccttgtagaaagaatcttgatttttttggtatttagtttgtcctcaggtgtaaattttatgtttgggaaaaattcatstagccattttatattttgattgtggaaacaaagaggaaatctgaagtggtagcaacrataaagggactatgtttaaccacatagtaggtgcttagtaaatatggattgaacagaaaagtaaatgagctcattttactaaatagtatatgtttccttttaactaaagtgaccataaaggtcttccttcatttaaatcaggatacctttgactgtgaaggaggtgctgttaacaattatgctgtgctgtcaggtctatgctgggatgactgtgtaaagcaaactaaggtgtttggtcatcctctttttagctcaaaatcctgattttataaacatacatctgtgactgctaatttcttcactgtaatggaaattttaaatagcaaatgatttttttctgtctaaagcattttaatcactcctggaagcttcttcctcactcttcacaatggatccattctccctatgccaaaaacagccactttctgattgccatcagattaggtgtacatgtgtttgggcttcatataaatccatgcacactgcatatgttcttttgtgtttgctttcttttactcaacctaatgcttttgagattcattcatgtttttgcttgtatcagtagtttattcacttttctttgctgagtagtagtccattgtatgaatatctgttgttcatttctattacaataatattacaattttgtacaatattagaacatttctacttagtaaggaacatggtcattatattggatgaatattcaytgttcatttctattacaataatatcttacaactgtacaatattagaacattactactaaataatgaacattgtcattacatcataygaatattcattgttcattgatagtattattactactaagtaataataatttttcttgttattcttatttttctaagtattctagttactaaggaaagtagcttggccctcttcatcaaggtaattttttgtgaatagtattagcatattgcaactatgtttctggagccagcctgccaataaatgcttcttggctgtggggaaaagaacacccaaaaatctgaggcgtgtacagtattgtttaataagtagcatttcattgtatgaatagatcacaattaattcatggcccatgcaactgggcttctgtttcaatgtatccattcctctgtgatgagtttttcaaagtggatgtgtcattttacactttcattggagatttttcagagttcctgttgctcttaagtttaaaaacagattttaaattgactctagatttatatggactctattatagtctgtatcccattatgtaataaaaatgaatgtaagaatttaaaattttgaagtgaataggaaaatatcaatgatatattgtgaatagctttttgatgaaaaggatttctaatactttggatawcctgtggctattatagttataatgccagccagctgttatagccaatcagtaaagaaattttgcagtatttaataaatggcaactgagtaagaaagatttgaaaaagtaatatttactttgctgcaaattttgaaaccagaattggtcaggcaaatacatttacaggattctagctaagagaatgcacttgaaaaatttgtcctaggcttggccctgggagagattatgaaagaccctgatgaggttcagtattcaaaaggtttccagaaatttccccatgcttgatcatgtatcatttcaaggattctaactctgaatcccttcttgactcccaggggctcaatagaggtcacagtgatattggctctttcatagctagaaagcttctctgcagaagaaattaggataggaaaaaagggctaaccaccaaagtcttcatattagtcttctctagatggttgtctaagttgttctctgggccagcagaataatcatcactgctagcttattagaaatgaaaattgtcagtttttatccaagacttgcagcattagaacctctgggagcagagcccagctctctttgtgttagtagccctatagattattctgatccatgctcaagtttgcgaaacactgcctgaggtcagttctgaaacaatagctgatgttgcctgtgtccatttatcttattttattcttagttcttatatagagaggatgcttttgacctatggttttcttagatttgacctctggttcagtatcactatgactatattttggtttctacttttcctttttttttttttttggatcttctgaccctgattctgtaattttctagccctgtgtctcagatgtactttacactggtggtgtaaactccaaacatacagttgtttggaatgatataaaaggaatggtgcattgtgattcagcatttgattgaggaggcctctggaagacattctgtattgaaggaatcaaagagacagttaaaagaaggtgctttacattcatttcaaagaccagagcagcctgacaatttctaagtggtagtatacttgcagtatccataagtaaaaatttaatagattgactttttccccyacatcccttctttttaaatttcttgtgtacatttgggaatagttaaaattgaatggatgaaaacacaaaattktacatttaaagttttttagaagagttcatattgggactcataatggttcatggatggactaataaatatggatgtagaattattataaatactggctgacatttatataaaaataattgggagttaattgggagctacatttttacataatggtccattaggttaattatgcagtactatcgttcctcagtatactcaggggatttgttccagcccctctaccccaataccaaaatccagagcatactcaagtcccatggctggcctgtggaacgtgcatgtacaaaaagttggccctccatatatgtgcctttcataggccatgaatggtatattttccacccacatttagttgaaaaaaatttgcgtataagtggacccctccagttcaaactgtgttgttcaaaggttaactgtaatcttaaccaaatggaacatagtcaagtataagtaaggatacaaaaagaggtaagtgaatgccaaagctgggctttttccctaaagttatcttccaggtcctggacacattgatcttctgctttgatgattctatagggcactgaggatgggagataaagtacagagctcactttaggtagagactttgctaggagcccttgattaaagcctgtgggaccacatctgcagtgtgaggtgcaaactttggaatagtctaaggtaatatttacaaaatctatgcatttaagaccttgtattttatttatggaatggtatcttaaacacataaatacatttatgaattatgtaattccataaagttagatatgttaagttatgctaatataaggcctcaagtaatatggaaatttatttatctctaatataaatgtctaagttggcagtccagggctagtgtgatagttcctcagtcatcaaggtaccgggcctcttctctctggttactgtgctgtcttcaacatgtagttttcagttcctggtcctaggtagctgcaccagctcccaatgccacatatgtatttcagctaccaggaagggaggaggaggaaaggaaggtattctccttctctttaaagaataacttgaagattgcacacattaaatttcgcttcccacgggtcacatctaatcatatggccatgaccacacctaaccacagaagaggctgagaaagctagtctttggcttaagtgcctaactaaaaatgttattattacacaatgacaggaaatggatattgagggacaactaccagtctctaccacaattacttgcatggtttccaaaagaagctataaattttaaggagggaagagatctgtttgaaataattcagctgtttaccctttgactcatagtccacttctaggaatccattttggagatacattggcaaaaatttgaagaaaatgttactggtcattgcagtgccctttaaacgaacaagaactggaaacaacacatttgcccatcactagaggattttaggttagttgaataagctaagctccatccatctgatgggttacactgcattgtttaaaggaaggagacagatctctttatattgtggtaatagtcagggtttgattggagaccaaaactagaagaagcaaaactgaaagatataagaaatatattctaagcatctgaccatttgcagctgtaaaaactagttaaacagtttaagaaagattgttgcttctgtgtttgatgctataacctgaagtccacggggaagactgtgaggaaaggaagatggaaataaagtaggggggaacaagaacaaaatagaacttgctacagtggattggaacttaggtccatctctcaccacctccaaggcttagtgtaggaaaaacgttggctgctaggagaccgggtaggcggctgtttgaatagcctgtttatatgatatcatggagaaggcctggattagcagaaggaaatgggttagaaatttttttagattatatgaaatatttggtgtctaaatgaatttaaggaggggaaaggagaaggaggtgttaagagtaagtgtagaataagattttcttttctggtattaatggaggaatagtagattagataacctgaaataaatggtgtgtgattgtgtgtgtgctgattttaaatatatactgagctggcatgaaaattagaacgctgcagagttcaaaagcaaagtggagctcagaattctgggaggtaagtgaatgccaaagctggctttttccttatagtcatcttccaggtcctggacacatttaacttttctttgatgattccatgggggcactgaggacaggagataaagtacagagctcactttaggtagagactttgctaggagcccttgattaaagcctgtgggacccattcacagtgtgaggtgcaaaggtggcaggatggaaacttacctgtcttgctctatcctcttggagaagaaaaaaaaaatctcttctgagagtttttatcacaagatgaaccttacacaggattacaatttgagtatgtgctagtagtgcggtctgaaagcacttaagcagataattaaaagtgattctgtgtggatggtgtccatgaaaactgttggaaggaaacaaaatcctctctggagtcacttcaacttaggttagcaacaacccagatactcccacagataaagctccgagtaaaagatagaatccctttgagcggaaacaagaaaaggaagctataaacccatgtagactttaaatattaaaactattttataagaaatgcaaaatgaaggccacgtgtggtagctcatgcctgtgatcctagcactttgggaggctgaggtgggaggatcgcttgagcccaggagtttgagaccagcctgggcaatatggtaaaaccctgtctctacacaaaaaatgcaaaatgtagccaggtgtcatggcatgcgcctgtggtcctagctacttggaaagctgaggtgggaggatcacctgcgcctggggaggctgaggctgcagtgagccatggtggcaccactgcattctagcctggatgacagtgagaccttgtctcaaaaaaaaaaaaaaaaaaaaaaaaaaaaaagcaaaacatgggtttcatattaaaaaaaaggagacacttgagaatacaagaaggtgacaagcaaagttgaagaaaaacaacagaaggtttaaaaagaaaaatataataaaaatctccaatggtttaagcccagaaatttataaacagataacgggggaattgataaactggaagataaaaccaaagcaataaccagaatataatctagagagataaagagaaaggaaagagaggttgaatgtagagggatactgagaaggtctaaatacatctaaggaaacaaacatgagtgtttttcctaataatatttatcagcaaaattttgctgataaaaaagtgattccctggcatatttttgccattttgcctcatcagaactaaaccagtgcagtaggaaatatttcagggaagcatcaactactgcctgcttttccctcctgtagtactatcaaggtagagatgttattttctcaagtctggagtagtagtccatatataatctctaaaataaagtaggtaaaggatactaggtaaagggttccttagsaagctaaaggtaggcatcaacaagttaacttgtcaactttaaaaacaatttacctgtagtgtataattttaatctgtatccatatcatttatattactaaatcctgtttaagaatgattcacttacagaggtaaatgcaaggcttttgcttatggttgctgggcagagctctcactcactggttaacctgggcacctctgggtttcttcttttccttgtagaacatactctttccatgcttactgcccttatcttacccaatgtggttctgaaggggctgacagtcatctcatctgacctgcatgatctcaggacatggccatgtgcctctatctcagccattctgatttcttttctggtattttctacgtggagtcagagtttaactttctatgggtggtttgcctgggatgatgggagactggggctccaaattactcttactcctttaatcttcctttgattagtaagcttctttcacatctctccatttaatctcattttaagtttaacatactttgagtttcagtctcctgtagatgttactaataggtaattttgacgaatacataatcttggctagagaagagatgcctcttttaagatgaaaatatccttcgttaatagcacaataaactgcagctgtcatgatttaacacagatacttcttttgtcttaataggtgaagtaggaaccccctctatttactcataatcatatttcataaggttgctgagaggatttaagtgagattatccatgtgtgtacctgcctagtctttaagtaccattagaacacttatgtgctagacgctgggctatcttgtgtagacatggggactatgtcatttaattctcacaaccagcatatcaggtaaattctgtcattatygccattttatagatgaggaacctaaggattagggaaattagacaacttgcccaaagtcacacaaccaggattgggcatgtttggcacagatggtgacttttaagaaacttgctcaagctcacagaaataatgagcgatggatttaagttttaaaccaagacattttgacaccagaggctgccgtctttctaatactaccctattttgcatcccacctaattattattgaatggaggacataaatgaaatataacttcctccagtgtcctagtttcatgtcaggaaatagctgtctagtttttaaaagtttcccacataattaaaatgatcttattttttattttttcgagacagggtctccctctgttacccaggatggagtgcagttgtgtgatcacagctcatggcatcctcaagctcctgggctcaggtgattctcccatctcagcctttgaagcagctgggaccacaggcatgtgccaccatgccttgctaattttcgtatttctcaatttttttgagtttttgagaaactcaatttttgagtttctccatgttgcccaggctgataaaatgatctactttttaactgaatggaaatatatacagttggcgctttttatctgtgggttccagagccataagtttaaccaaccatagattgaaaatatttgaaaaaataattacactgaacatgtacaggccttttttcttgtcattattctctaaacaatacagtatagcagccatttacatagaatttacattgtattaggcattataagtaatctagatatgattttaaggataagggaggttgtgcataggttctatgcaaatcctgtgccatttagatcagggttctgagcagctatggatttttgtatcttcaagaagtcctgaaccaaacccccatgcataccaagggatgactgcactattcatagccatgacttaaggtagtacatccctatgtagtatatagtccaaggtttgaatatatatatattgcattaatttctccattggcataggattaatttgcttctttgaaagttataaaaactacatgtcacagtctggtctggttacaggtagggggtttgggaacctttgcaccttgtaatcattagtcattaagggacctagtcatatgtccccagatagaggcaaaggcagctgggaaatgtagtcttcctgcatttgggcaagaagagatgaggtcgtttggcccctgtgcagcattgtgccagtcacagttcctgttgatctctctgactccatcatttctgggcctgatctctctgactccatcatttctgggcctgtgctcataaactgctctctgtgcaaacctctgggctgtggtgactctcccacatgtccagcctttagaaatgatttctttcaattcaaccattaactttataaatcgtacagatgaaaataagtcatatattctttatgcagcaattttcttgaattttatttctccttattttgaatatgcaatcaatatatataaaactttaggtttcctgaacatagaaggagaaagtaacctaataatattttcgatttcctgattatttattgtaattatgacatttgagtgcaatgaatctttttagaaatggagaaggatgtttagaaaaggtagataaggcagaaaaatccagctggtgtaaaaaatgtacaaaatagtgatgattcaaaaagagtgagtcagtgtgacattatcacatataggcatcttgtgaagaagatattctttaatgtcttttggttttacttaattgaatgacacatgacatcagtgatattgaattaaatatgattttcatctgtgattcttctagtgggaaatcaagacagactaaaagactaaaatccttgtattgtttgtcttgtttctaggatttctgrataatccaaaaatacgtaaaaataggacataatgatattgaggaacttttttagcagatgtactaattgtgtatgaattcatatattttgaagagacgaacattatttaaagtagctttttaatggtagaagacttaaaatattttttgccaagtatcagtgtacgtaaagagagaaattaatattttgtattttacattaagcagattaatttgtgcgggttagtatatttaatgctaggtacactcacaagagtaagttggatccattagtgggagaaattgaattcatttgttagatttttaaattagtttctaaattgaaataatacacataatttaaaaagtcaaatgatagcttctaataaaaaatagcagttccttaccttacccttcaccaaatccaagcatctttccccacaggcaacaactttcaactcttttagttgaaagagttgaactccagactttaagaaatgcattttatttataaatcatccagtcttaggtattctgtcctagcaaaacgaagtggactaagacaattaggtttgctaaatgtcagctggatccttaactacagtgaggtagttctgataccctcttgagtttatttaatttcttctttttaaattaaaaatgtatacaactgctgaaaatcagataattttattttgttgtacacaatattataattaaggcattggtttacaatggcttaccttattttcttaaaaatatttatttttctcattataaaggtaacacatactctgwctgtcagccatcgatgcttaacaggccactcctgaaactcagtggctaagtcaacaatgttctttatatagctcatctgcaggtcagcatttaggccggtcacagctcagcaattctggtcttgtctaggcttcctcataggtctatagtcagttgtaggtcaggtgtgggttggatttgctgattttagttgggctatttcaccagttgtggctgataggctttggtctatctgtccctttatcaccctgcgggctggctcaagcttgttcacctggtggaagcagaggttgtaaggcccttgaagcataggcttggagttgacatactgtcacttctgccatagtatgttggccaaaataagtcacaaagtcagcccaagttgaagaggaggacaaatagacaccatctcttcatgggaaaagatgcctactcatattgcagaagggtgtgaatacagggagatttggattctgtctattgcttaatcttttatatatgtttgtactgaaaagtacaaacaaagataaaaggaactcataagtccatcctctaactactgttgactttttgttttatatactgtaagactgttttatctatacttttaaacgtatattattaatttatttcagtttccatttgattacaagtcatgtttgtttatttcatatttcttctatgaagtggtcaagtagatttctattttgttcttaaaatcgcatggtagcatttcttgtaaatctacagttccagatatctaaagccggcaggacttcagctaataggcaattattctattttgtgatgagaaggccctgacttagtattgagtagcaggaagaatcaaaaggtgttcagtcaactgacagtgcarttgcctttgaatttgtttgtatatcttctgtgactgagttaataaactgaactattcatggaataggacccagtgggattttcttatgctatggtatatttttaatattattcacttttcaggctaagtttgaccgtaagcagatatctatttttgatcattagctttaaggtatttacattctcaatgactaagcttaagctatgtggtagagtgatttatttttgttcctgaataaaattttaataccatgagtcatgtgttttctttgtaaaaagttccagcatcacagaactatatagcataatatagtgaaagttcccttttcctactggctcactttgaactcctttccttaagcctttttctgtgcttttatatttacatacatatgtgaatatatagaatacatttacttccatgtaaacagattttgtrtgtgtaacataaaaatattgtattataracattgttttgtaacttgctttgcaaattattttctatccatttagtcaagtatgtgagtgtataaaatgtacacacacaaataatacaaataagagcatgttacaaatattgtataacttgctttttttaccaatatatttttgatatatttctgtatctattcacataggcttagctggtttttatattcataaaaccgtattcattttatagtcataaaatttcttcacatgtaccttcacatgtatcctttccctattatggaacaacgaattgtttctaaattcyggttattttaaaaaatgttgaagaaaacatctctgcttgtatatatatgtgtatgtagaagaagaaaattacgcttgtgttctttattgtaaatattctacaacctgtatctcttaatccctttcttgctttctctaagccccatatattcaatttagccctgagtaatgcatgattgacgaagccagatgctgtgtgtctaaacagcagttaatgaaaaactatggaaggatagggaatcattaccacaggtactgtggggcggcaagactcaataaagtaactgttactaaaatctaaaaatgaaaacaggaaatatttgtcagacatttaacttggcaattgtaagagtgaaaaccttgtgtttttattcacttgtgtatcagaatttgccgttttttaattaagagttattttttaagagcaattttagattcacagcaaaaytgagagatagacatggagattttccacatacccactgacctcaaacaagcatagccttccccattgccaacatccccatcagagttgtacattttttacaattgatgacctatgttaacacattgtcatcactcaaagtccatggtttacatcagtgttcactcttagtgttgtaccttctgtgggttgtatgatgacatgtatctaccactataatatcttgcagagtatttccactgtcctagaaattttctgtgcttcatctgtttgtctcccctcacttcaacccctggcaaacactgatagctttattgtatccatagttttatcttttccagaatgtcatataattggaattatgcagtatgaaaccttttcagattggcttccttcacttagtactatgtatttaagattcctccatgtcttttcatggcttgataactcatttctatttaatgctgaataatactccattgtttggaagtaacacagtttatttattcattcacctgcagaaaggtatcttggttgcttctaagttttgacagttatgaataaagttgctgtaaacatccatgtgcaggttttggtgtgcaaataagtttcaacttattcatctggtagtaattgttttataaatttgggagctccagtgttagatgcatattatttaggattgtgatattttcctgttggagtagtccttttatcattatgtaatatccccctttgactttttaaattgttgttgctttaaagtctgttttgtctgagaatacctactcctgctagctttggtttccatttgcatgaaatatctttctccatccctttaccttaagtttatgtgagtccttaggtgttaagtgagtctcttgaagacagacagtagatacttggttggtagatttttatttattctgtatctcttaagtggagcgtttaagccatatacatttaacattagcattgagatgtgaggtactgttttattcatcatgttgttgcctgaataccttttttttaaagttgtctttttttaataggccttgtgagatttatactttatagggaggttctattttggtatatttcaaggttttgtttcaagatttagaactccttttagaagttcttgtagtgctagcttggtagtggagaattctttcagcatttgtttatctgaaaaagactttatctctcctctatttatgaaggttagttttgcggcatacaaaattcttggctgataattattttrtttaaggaggctaaagataggaccctaatccctcttggcttgtagggtttctgctgagaaatctgctgttaatctgagaggttttcctttataggttacctgatgcttttgcctcacaactctgaagattctttcctttgtcttgactttagataacttgatgaccacgtgcctaggagatgatctttttgcaataaatttcccaggtgttctttgagctttttgtatttgaatgtctagatctctagcaaggacagggaagtttttctctattatcccctctaataagttttctgaactttcagatttttcttcttcctcaggaacaccaattattcttaggtttggtcgtttaacataatcccaaatttcttggaggctttgttcatttttctttgtctttcggttaatttgtaagccttgtctttgagctctgaagttctttcttctacttgttatagtctattgttgaaactttgcagtgtattttttatttctcttagtgtgtctttcatttccagaacttgtgactgttttttctttatgatatttatttctctgtataccttttcatccatatcctgcactgtttttttttaaattttctttaagttgtttttctaccttttctggtacctccttgagtaccttaataatcaaccttctgaattccttatctggcaatcagggatttttttcttcgtttgratctattgttggagagcgagtgtgatcttttgggggtgttacagaaccttgttttgccatattaccataattgcttttctggttccttctcattttggtagtgtttcagtggaaagaactggaactcaagggctgctgttcagattcttttgtcctgtgggctgatcccttgatgtgatgttctccccttcacctggagatgggacttcctgagagagctggactgcagttcttgttattgtctttcttgctttagccactcagcggggctgctgggctctgggctgatgctggggaatgtctgcaaagagtcctgtgaggtgatatgtcttcatatctcctagctgtggatgccagcacctgctccagtataggtggcaagggagttaagtgtactctatgatagtccttggttgtcgttttgtttagtgtgctggttttttcgaatgctggttatgccagcagtgaagttgttatgtggacagacttagaacctctggttagtcaggatgttgtagatggtagaattagctgttttctccttttttggagcagggttattctgttatgtcttgagttggttggcctctacccaggaggtggtgcttttaaaagagtgccagctgtggtagtagaagggggatacaagtttgttctttgttggccaggatgagtacttgggttcttcaggcaatggatggggcyytagagttctcaagggtttatgtattttggctcaggctaccagggtgggtagtgaaaaaccatgaggtgggggcaggcctaggcaggtctgagctcagactctccttgagcagggcttgccgaggccactgtgggtgatgttccggggcattacagctgcctctgctgtgtcatactggtcgccagggaaggggggaaagccggcagtgacaggcctcacctagcttccacgcagccagcaaggccaatctcactcctgccatgccccaccaacagcacacgtttatattcaggcagctggggagagcggatagatcttgccccagactacaagccttcctgctgagaaaacaagcagggctctcaggccttgcccttttccgtctgcctgcaccatcagctgtggcttctgtgcttgtatctgcaagttatatgtgcacttcccatttgccccctggactctgctcaggaaaatttgtactcagttgaacgtattatgaagttcagctagaagcttctttcatcctatggcccctccctaattccactggctgccttccccaaggacccctgtgagataagtcagggatggctttctctggtttgagccgggaactgggagtgcctmcagggcgcttcccgctccttcttctactttgatatttcacttggctgcctaaatccattttaacttcagatgagattaaattcttctcctgtgatctggatttttaggttccccagtggggatgtctgttcagaggcagacttttcccccactcacactttgggaacttacagtttttcagctgtctcatggagtttgcagtgtcaagctacttctttcaaagtaagtagcctgtgaattcttttggttttcctggtaggttcctgtggtggttcttggaggaaaagtttacagtgtgagtctccacacactgttctgtctgtccaaatgggagctacatgttagtcctgtcttgtatctaccattttctccatgttggtaatttagatctttgtatttcctctagcttttaaaattttagtagtataaaattttctttgcagtatcatttgattaaatgtgttaatacatgtatttggaatcatgcctgacacatagtaaatgcttaatacattttaatggtgttattaaaagttgttgctattattatcatataaaaatctcctatgatttattttaatattaacacttaaacctaagcttttatttagaatgttgggggcatgagaactaattagaagaagtattctaactcagtagagagggtaggggtaagggtctgtaaaacattagcaagtggggtcagctgatayttagccagtttcagagttagtctaaaactaccaacagagtaaacaggcaacctatagaaggggagaaaatatttgcaaactatgcatctaacaaaggtctaatatacagaatctgaggaacttgaacaaacttacaacccaaaaacaaccccaagcaaaaaagtgggcaaaggacatgaacagacacttttcagaagaaagacaatcatgtagccaacaagcataygagaaaatgctcaacatcacccatcattagagaaatgcaaatcaaaaccacagtgagataccatctcacaccagtcagaatagctattattaaaaagtcagaaattaagagatgctggtgaagttgtggagaaaagggaacatttatacactgctggtggaaatgtcaactggtttagccattgtggaaagcagttttgtgttttctcaaagaacttaaaaaagaattaccattcaacccagcaatcccattattgaatatatgcccaaaggaatatgagtcattctaccataaagacacatgcacgtttatgttcactgcagcactattcacaatagcaaagacgtaaaatcaacctaaatgcccatcaatgatagactgggtaaagaaaatgtagtatatatacaccatggaaaactctacaggcataaaaaagaatgagatatgtcctttgcaggacatatctggaggccattatccatagcaaaacattatccactatagctggaggccattatccttagcaaactaacacatgaacacaaaaccaaataccacatgttctcacttataagtggaaggtaaacattgagtacacacagaaaagagaacaacagacactggggatctacctgagggtggagggtggaaggagggtgaggatcagaataatacctatcactgaggttggtggatcgcttgagccaagggtttgagaccagcctgggcaacatggtgagacccccgtctctacaaaaaaaatacaaaatttagccaggtgtggtggtgtactcccatagtgccagattcttgcgaggttgagatgggaagatcactcgagcctgggaggtggaggttgcaagtgagccgagattgcaccactgcactccagcctgggcgatagggtgacaccctgtcttaaaaaaccctccaaaaccccaaaacccaaaaaacaaactaccaatcgcttactatgcttattacctgggtgatgaaataatttgtataccaagcccccctgacatgcaatttacctatatggcaaacctgcacatgtacccttgaacataaaataaaaataaaaataaaaaaaggttttctgaaaagagaggaattgtttttgcagtttagtagccattgatggggtggttcagatttagcaagagaggtggatagaaacagttgctgggtctgtggtcatatgagggccactgtggtacatttttagtctttctgagactcttacagattatttagaattatttacaacatattctaacatatttgggagtgtattttatcattttaaatcaagccataatcttccactttttgactacaggccattcctaatgtgtttctcagaatgtgtgcaaagtcaaatatctggaagtcaaatatttacttacatttaataaatagatttctttaccaagagagctaaaataaaattctatttaaacttcaccttttatacacggttgtcagtaatatagtttccaacattttatatatacctttaatttttttctttttgaattgatcagttcaagtgacttaaatgcactgagcatccagctgaggttaaaaatttactgtgtgcaacatagcaaataatttctcacttgacccttacttattctctttggtgataagagtgttttcacttttctgttttttacttataaagtattaagggcaaataagaattctaataatatagaaacattgctatacaggcagtgacattaacaatgcccaaactgaacacttgactagcagaaagggtgttgagcttccattcttacagctagcttatcttcagaatttcaaatttagaataaaaggcatataataagccctttaggagttttcatctacactatatatataactgtgtgttgagcataagttgaaaatatgaaaatttaggtctgcccatacttagaggcagataggtagaaaacactaaactcttaaggccattaggtatttagtaatttttatgtacagttactttttaaagctagaaataaagttgtaggcttataaaaattacagttgagaaaattttctcagtaatatatattttagaacatttattaattttattaataccctttcagcatctctcagtgttgaacttgaatttatgaattckagctaatttatatatctttagcactgaatatagctagggtatgaagtgattaatattggactacaaataatagtttctggctatgtaaataaacttggagttcttcattttttgtagtattaatgcatgatttaatatgaaggaatttatgttcaagaaaaatacagatttctaatggaggagtgatatatagtaatgcactgaggcagatggtggatgataagtatgtatagatcacacctgctttatggaatgtaaagcttgattcgtgtgtaaaaaattaatttgagaaaatggtagggaatggctgggagtctgtgagagaattctagatttaacactttgattagtctcaggaaaaacagccattatataatcttaggttatattttctatttttaaacaaatatggcaagcataacacctccctttttaaaatacacagtttttgcaatttttcaagacttagggaaaggatcaagcttgatatatgtttatatttaatacttctgaaacccattttgggcagatttctatctactataacagtggttatgagcttggaccgctgagtggccacactatctataaccgagttctttaatatgtctttgcctgttttctcatctgtagcattgggataaatctagtagcagtcacattgagttgtaaggataaaaggtgatactttaaaggtgcttaaacgtgcctaatatgttgaaagggctcactaaatattagcttttctcattattgttaatatattggagttttatttcataaaaggtgaccttttcatctaagtgctatttataatttaaatctctgttaggtctttgttagttgtctgtcatcctcacacttgcccttctgtgttttcttctgtaattcatgggttggaagcaagtaaactgtattttcctcacccctttgctagctgagtttcattagagggtgggaggaaggtagaaaggacgccactgaggtttttgaggcacctttggtagtggcagttgaggagacttcgctgtgttgcagtgacsgttgttccacagtgtagatggcagcgatgttggtggcagggcatttaatagggatgggtctgctcagcagcagccaatggtggttccagcactgatagtggctcctgtgggctgttgggtccagctcagagatggtagcagcttcctgatccctggtttgcattgtttaaccatttgttactctagcccttccaaagtctttgtaacagattccctgaattaaattaaatttttctggagaggttgccctcgagaagagggtgctcatcaataaaatcaacagttgtcatttaatgttagatatgcaataaggaattttgcagtctaataaatatagcatgtattccccgtatatctttcttacctgaaaataattgtgttttgtcagtgtgtcccagtgactttttctgtctcctctgcatttaggaagtcagtggacacagctagtgcttggtgtctagggggaattgttgctcctcatgggtaatattggatttatgaaaactgagggacttacattaccaaaagcatgatgtgaaaaatatattaaatatatactaatatttcaatgatttaaagtcatctacccaatagaagccactatatttcattgattctaagctaccccttcsccccctcatgttttaatatctctggtattggattgtgacttaaaaacagtagcatgttgcagtcatctcatccagtggccagtagttgctgttatctgcttatgtgccaatataaaaatcataatacagcttagaataaaattccagagacaccagagaaggtgtctcttttgacaagttgaagactcttttgacaaggagatgctaaatggttgtggtgaggtagaagggtggggaagtgggaaatcacagtagtttaacaacccttggaagcaggagtctaaagtaggctgtgcctaattactgagctagcttgagagcttagcatcaatctttcaattttttaatgaattcatttaaaaaagtgctgcatcactgatgtgcttggtgacacagaaaatgagattctctggagaaatgtggacactgatatatgtcaaagagtgagggagaagaattacatttggatttcttcatgaattttaggaattgattaaaccaacttattttgcttatgttttgtttttatgtctgtgtcagtgtgatagataataaaaacccatatctaattaagtcttttttctttcaataagaataaaataaaagttctaaaaagtgtatcagtttaattagcagttttttttctaatggttcatacaataatgatgccctttattgaaatatttttttctatctctgtataattctttttgttaggtaatattttttcccttttaaactmtatgtgctgatgtagaatggctttaaaatatcgcccttttattcagtgttcaattttttttttgcgccagttttccaatttaccttgtaaaattgacaccctatgaacaaagtttattctatatgtgtagctccttgctatagaaaatgcattggaaaatatttaccaaaggaattcaaatatattaaacatgaaagacaaacaattgccagtaaaactggtgataggagaacttttgctacactattaaatgctgcataccagagagtacagtatacaaacaaacaaaaaaccctaagggtaattgcaaagattgaacaagttgtgttataaatgtggccaaattttaatgtgttgtgtgttaaatatactgatgcatattatggaatatcagtctcatcaaagcttctttttttgtttacattaaatgagacagggaaatgtaatgaagttaatttggaaattttataagaaatatgaaggtgccttatcatatcattacttttgtgatttatatttgccaacttttttttttttttgaaatggagtcttgctctgttgcccaggctggagtgcagtggtgtgatctcagctcactgcaacctccatctcccaggttcaagtgattcttatgcctcagtctcccgagtagctgggattacaggcacgtgccaccatgcctggctaatttttttctatttttagtagatattggatttcaccatattgcccaggctggtctcgaactcctgaccccaaggtgatctgcccatctcggtctccaaaagtgctgggattacagacatgacccactgcacccagcaaatatttggcaactattttgaaaagattcctaatttatctcattatgcaaaagaactggaaatgtgagacttaccagttaattaattattgaagaaaaaaattagactgcatttgagtttaagtgggtccaagactttctgtttcaagttaatattgctgttcatttaaaaataacaggtgatttttttttaattttcagtgttactcagtgataataagaaaacattatcctctgaaacaataacagtataaaacatttacgaccttaaaatcatgttttatatgtacaagtatctcagtttaagaagtctcctggccaggcgtgatggctcacgcctgtaatcccagcactttgggaggccgaggctgacgaatcacctgaggtcaggagttcaaggccagcctggccaacatggcaaaaccctgtatctactaaaaaataaaaaaactagctgggtgtggtggcgggcacctgtaatcccagctactcaggaggctgagacaggakaattgcatgaacccaggaggtggagattgcagtgagccgggactgtgccactgcactctagcctgggcaacagagcgagactctgtctcaaaaaaaaaaaaaaaaaaagtctcctggttacatgaaagatattagctgattatgacttgatatatttagactgttgattggtcattggttttcatttagtggtcaagagtgtctagcaaaatgctgactggcatatgcagacactgaatttacatcttcacatattcatgtctctcaatattcagaactcagttaaatttatccaggaagataaggaggtcataaatagaataccaaatgtggttttgcttcttttacagttagagagctttgttaatatcctcattttcttcatttgtactagcatttccaaacagaatttgtttcacaaggaagtatcaatgtatagtgtctctgtcaggccttgcattaagcccagtttctcatagtcggttttcaatgacatttctaatttggtatactttctgttatatcacaacttattttcccagccatctaagggagacttgttaaggtgggtcaacctcatttttgtttttgattttaatattaaaaattttgttaaaatttttatttcgaaatagttcaaacaaaaagattgcaaaaatagtatgaagaattcatatgtacctttcactcagcattcccccatgttaacctcatacataaccacggtaatattgatcaataccaggacattagcatggatacaatactattaactgctctgttcacttaattccaatttcgttaattgccccactaatgtcctttctttggactgagattctatccagagtctatttatcgttctttctccttagtttcctttattctggggaagacagttcctttgtcttttttgtctgtcatggtcgccacatttggtcagctcttttgtagactgctcctcaaattggatttgtctgatgtttcctcatgattaaactcaagttatgtctttttggcaagaatattatagaagtgatacaagtgacagagtgtccatttcagtgcatcatatgagatgatgtttacttgtttttactcttctgttatgaatatgtaccccactgctaagaatgccagcttttagcctttgtgcagctaattatatttatttttcaagatttgcctttttaaaatggttttctttatttgctgcacttcatttgatctctcacttctttgccttccttttgccataatactcagtaaaaccttgtcatgcttatggcttgaaagtctatattgtgttgtgggagcctcacccactgttgctcccaggagtcctctctggtttattcccttgggacactgagacttattataccaatttattttgtccaaacatgctctcaataatcactgtgggttaagtactaccaaaggttggcacttaattattattttatttattgaaagttaattttatcttctaattagatggtatcttcttgccagcgtggacaattctacagattttttttttgattacttggagacagaaacaaatatttttaatagtatcttgatttastctttctaatatagactgttaatctttagatttttcgataatttaaggtgaagggggaggaaaagattgggtacaactgtgtttagggaataatttaaaagtgattactagaagaaagtgcacttagttttcttgttcatatattctttcttatctctagcatcagtgctaaaagtaacagttggtatagaagtgaaaattgtcaaaaaaagactgattaataacctcaaagctgaaaggagattactaattcagaaaatgacagttgtaatatagaaatccaatattagtttatagttgattatcagttttatacagaaaataatagtgaaaagaataactctttttttagccttaatgactctgtcattgaattacttcaaattgtgatgatattttcttcctaagagctgattaatttaatgtgttcacactttgttccaataatggtcctaagattacaggtggaatactgggacacaaaaataacacaatattttgtcagagatgaccaaactcattagatacagagacaaagccagaattgggtttctggttgggtagatttacgcccctcctacctttccccattagactgaattttaacaaaccagacaggctttctcaggtatggagacttcaaatatgctgctgtaatcagacagcatgagctaacatattttaggaatatacttgacttcattttaaatagagaacatttatgttttctcactatttcatgtgtaatgcaatatgaataaagccctatccgagtttcatgtttgtggggaaactagcattactgcagattagtgacagggcagagaaatgaccttattatctctgtaatggtaatagtgtgcttcacagggaaacttgtgttgttaagagtgagttgttattttgttgcagatgctttctgcacaagttattaatatattgaatcagaaggattggaaagtgctatctagggacttaggaatataatttataagtttcagtattcacctttacttgaaatatgtaaatctgattttgtagatgtatacacaagcataaacatggtttcacgcttgtgtataccttttctttctttatggaatatactctctatttttcttgtgtcaagtacctctgtctctaagacccacagcagttgtatcctccgtgatgaaacctatccctgtaaccgagttgttgcttccctttagattcccagagcaatttgttcccattgctatattatgattttatttgttggcttataaatctatttccatctttgtaactcacagttgagcgtgtgcttctcaatggcaattcagtttttcaattcatattccagcatcttgcatgatgcctgcatatattgagtatgcagcaactattcaatgaaaaatgtatattaaacttggtatatatatatattatttacacacctcacctcttccaaaaatgtgtttaagatggattataagctatatagcaaattagaagaaaactgggagaaaaaaggaggaggatgggaaatagaatggggccaaggatgagcaaattcacagcatgaatctctaagtgaatgtgtagtatgaatgagtgcktttgcatgtacacggaagtgtatatgtggaaacttacaatatacattaaaaaaatctatcctgtttgatatttgcatttttacaattttggccttgaaaagatttcttatttttctgagttgttcattttgtyactatttatctgatgctgaagtgtttctctgaggaatgcttattagtcctaagattctaatgtaatcagcgtgtggtgaaatagagcggtgtcagttagtcccacttctgtgaaaataggaatctgtaatatgactstgtgtggtgctctttagcttctgaagattcgtgctctaactcctgtcacctgctctcttctagaaagcacatagccgtggggtaggaatgcaacaaagctaacttggaataataaccttttcctggaataaatatgttttaaattaaatttaactaagaagtatctatgaattctagcttctctcaggtgacttgtttgccaaatttaaataaatggacatattaaaattaattcttattctcctgttctcaggataatgtttaagcaaatctaagaggaggtttttttttcttattgtaagtatggtgtttttaaaatagagaataaaactttgtttgctttgttattccttagttaattgttaaaataatgaggccttattatttggggtaatttatttaagacaatagagcaattaattgctcattggcaacctgacaaaggaaatgggccaagatgccaacccatttcttgtggtctgccagcccttagaattgtgtgttccagggatttgctaatcaccagctggtaactgatttacaaggctggaaagacaggaggactcttgaatcatggccacttacaagtaagatggaatgtgtactggctttaagccttgtctactggcattcagatgttgctgccaggggaaagacttgatgatggcaaagagcctgtgtgctatctttggtgcatttttccgatgtcatcagcattgttcttgaccctcactttggtttaacaattaagacctgctaagtagaatatactacttcagtgatatgtgtgtgcctctctgtctatttgtccacccgcccgtccattgatctatccatctgttcatccatccatccatccatccatccatchatccatccatccgtctatgcatctatccatgcaatgaatactggggttaagccatcaatgaatgggctagaattaacctctgaaagcattgtttacaattggggctggcaatctttttctgtaaacgaacagatggtaaatattttaggtttgcagaccatactgtctttgttggaactagtcagttctgctgttgtagggtagaaacagccgtagacactgtgtaaatcaatggcatggttgtgagccaacgaaatgctgtttacaaaaaaatcaacttgcagctatagttagcccacccctcatttagacagtggaagtatccgactcaacatagtttgggagctacacaaaaacttttaaagaagtgtatgaatgcttataagttttctaacactgctttatgttccaggtttgttagcttaattattgtctattttgggatttatctaaaaaagtagttttatagattttactgttttttatttaaacatattaatcatttaaatgatattaagctctcactgacactgattatataaatgtcattggattggaaatctacaaaaaaacaaggaataaaattcaccactctatcacccataaagcacccattacatttaatagtttttacttataaacatgattttaaaaactactttgacatggaaatatggtcaagtatattgatgagtgaaaaaaatgcagattgtagaagagttctgaacagtgtgtacaatgtgattctatttgtgaaaagaaaaaatattatatatgcgtacactaacatacggtaaatatctgaatagatatggaatcagttcttagttttcaagcaaatgaaatcaactctccaatataagcggaagaaatttattgaaggataataaattactcacagatttctggagtccttgagaatcaggtttagaggccatatatctagaagcaataccccaaataactggttctgcaaagaggccctggcaactgtcagtctgaatccttgatactactaagcctagatgccggatttgcctccactgttagcagtattccagaatgaattctagacagttactgctcttctgtgtcatcagcttccaattcagagtctgctgtgggtgcattggattgccagagcccaagttttgtgccctggctgcagaggaaccttagcggggaagaatgtggaactcacttctgtagtggacaaagggccctgcctcctaaggtaggggatttaccaaatgtaggaagaggattcagaatcttggatgccagaaagagtgagagccgtccacagcagactcctgggaaattgttaacattggttacttctggacggtggagttggaagggctaactgggagccttccagagggaggcttttactttaattttattcttctgtcctttttgaatatacatatataataaaaaagtccatggggaaaatgaacaaaagggaacaacagttttttccagcatttccactgatagtattttcgcataagaactcaagaatggctaggcgcgatggctcacgcctgtaatcccagcactttgggagcctcggggggcagatcacctgaggttaggagttcaagatcagcctggacaacatgttgaaaccctgtttctattaaaattacaaaaattagcagagcgtggtggtgcgtgcctgtaatcccagctacttgagagtctgaaaatcacttgaacccaggaggcagaggttgcagtgagctataagattgtgccactccactccagcctgggcgacagagtgagactctgtctcaaaaaaaaaaaaaaaaaaaaaaaaaaggccgggcacatgcctgtaatcccagcattttgggaggccaaggtgggtggatcatttgaggtcaggagttcaagaccagcctggccaacatggtgaaaccccatctctactaaaaatacaaaatttagcctggcagtagtggtgtgcacctgtaatcccagctacttgggaggctgaggcaggagaatcacttgagcctgggaggcagaggttgcagatcacaccactgcactccagcctgggtgacagagtgagaccctgtctcaaaaaaaaaaaaaaaaaaaaaaaaaagaactaaagaaggcttctcagcataactgggcagttttatcaacttcgtactcaattttattttgaaattcagtttataattttctcccagattcagtcatctctatataacttggttgggcagagaagttcataaaatggttttctctcagataccagtggcttccttttggcttggtagagctgatttagtttatctttttgaggtctacagtattcagctttgaaaagtaaggtgttgtcagtgactctgattgatgaagtgttcatagatctaaggtgaaaaaatacaatctactttaaaatttttggccctactattttttccaaacccccataaatttgctactttctagaaaattgatctgagaacttaattcagtttaataaagttttatcacatgtaataacaatttttaagaacaattttagatttacagaaaaagtatgaacatagtacaaagttcttagataccacacacagggtttgccttattaacatcttacatacatgtaggatacaattattatagttaataaaccaatattgatacattcttattgactaatgttccttctttattacgatttctttagtttctaaagtttatttttttgttccaagatagctgatatgttttatacatttatattgcatttattcatctgtgcagtaatgtcatggagccatatcataaatgctatttctgttttaagtaatacagaatttagagaaacaaaaaataaaataaagctttgctacagtgagcttcttaaattattttatgcacaagtgtcacctcagaaaaaatgtccttttttttttttcctgttctgtatttagcggaagaagtccctatagaaccatacaacatcccactgtcccaggccgaagtcatacaggaagggagtgatgttactctagttgcctggrgcactcaggtgagtagcattgatcccaactgttaaaacctrcgttgtgcttggaagctctcattttaaatcctgatacatgaaaaattgaaaacgatgttttctttatatctcagattaagtctggtgctactgatgctaatttcttttttccctcaactttattggtgtgtaattgacaaatgaaattatatatcttcaaggtatatatgtgatgatttgatatatgcatacattgtgaaatgattgccataatcaaattaattaatggatccatcaccacacatagttactattttgtgtgtgggggtgggggcgaggacacttcagatctattattttccctagtcactgctgtatattagatcctgagaacttcctcatcttataactgaaagtctgtggtacggatttctgagtgaaggtgaggtgtctatatatattaaaatgtatatgcatgtggtggccataaatatattacaacaatgtattaattagaaacacatatcttttggaatacatgtatacccatgttactttcgctgcaaatggctataatctttttcatcacatttcctgccatctctcatcattactttgctgctcacgtggacccatccactggtcaagcctcaaaattccatatcttcctttttttccagtgaccctctctgctgatccacttcattttccccccgacttgctgtcactttgctctacctcccaactttttctctggccacgaactcctatctcttctacttttctctctccttcttttacagatatggtcagttttaatttttctgtataaaggaaatccttattttaggaaatttagggcaatgcaatataaagaagataacaaaaatagttttcaatatcacaagctcctactctcctttccttttgatttttggcatggagagctagagtccttatggtttctcaccttcagtggggtaactctgctgcttggcgagttgtatcccattgatattgtccttggtgggtgtggcaaacctttttgctatccttctgtccactttttgatccacatctctgtggtcagctcatgaccttacttctctttttaatagggaggttagagtgtattaggtattaattcagataacttgctcttcctcttgcttctaattctttccttcttccctttgtcttgaagaagaggtgtctggtttacttagcaacctctgcaaatcagtttcagactgcgttccattttaccttctccaggactgtagtctattagctagtccakctctctcctgcatcttcagttttccatttcttgttgctcttatttaaaaagtatgtttctcttcactatttaaagattcctttctccttaaatacgattatgtctccctccttttaacactgaacttgaacaactgttttctagtgtctgtatttaatttcttaaattcattatatttttgtagctgtgagttctattcccactaatttactgtttttgtcaacattactgatcttctagttgtttaaattcagctcttattcctgctatggtatgtkatactggctgctatccctatgaaatcttttcctcttaagtttctgcaatacactgtctcctggttttctttctagctctttaaccgttctttttatctcctttttttctttccttccctccatttttccctccctccctccctctctttcttccttcctctcctcttggtccattttttccttaaatgttggtgatttttaccctttacttctccctctacatgctttctacgtatttgtatgacttcatttaccttctacatgccatctttgtaatcagtatctgtggtactgacttctctctctaagcacctctttccatctgttttctagacatctatacttgttattttcgcagaatatgggcttcaacatatttaaaacaaatttataaattctccatgcagatcagttcctgagactttaaatactgtctctaatagtganatcagcattcaactagtttttgaggctagaacctttgtagtcattctctgcatatttttctctttatttcaggttcatgtgatccgagaggtagcttccatggcaaaagaaaagcttggagtgtcttgtgaagtcattgatctgaggactataataccttgggatgtggacacaatttgtaaggtatgaatataatggtgatagaatgtcatttccctgaaacctttggcnaaatatgttgtatwtttgcaaataattcttttgaaattgtgagctatgtgagcattttcaattgatttaaaacttttaaatttgcagcatgaaagaaagttgtataaacagcttcatgctcaaggaaacaaatcactatagaatttatttttcctcctgtagtttcctttgtttaaaatattacaaaatggggtcctttatgcagtcaccttgggttgaattgtgtgagtcatagagcrtatcaaggatgccgaaggcacctgtgtttttgacttcttattagttatggttcagtaagctaggtttaatttagtcaggtaaattaagtgatttggctgaattttcatttatcttctctccaaaagtaatggggatggattttttaaaaacataactctgtatatagtcttaatactgtggattacagtctaagggttatgtggagattctggctcctctaatttacagtttctatctaagtagcctcatgacctttggcctgattacattggtcttgtttttactattaagatttacatagccagttccctcttaagaatatagtttagctctcatttacctctttatatccagtatctttcacaccaatgccaagataatttaagaagcatctattttcatattgatacaaagaaggttaagcactctgtttgtaatagtcttatcaattaagtctagctacatgdaaattatatgtacctagtcttaatagataagtacaatagatatatgtacgattaatagatagatgtacaattacatgtaaaattgtaggaaacaatgacatgtattattttttcttgatatactgctatagtatagggcattttatatttaccacttttaagagctttggcattytcatagcttttacaggctctttcttgggttagttacatgaaaataacctgcagatactactgtaaaagtatagcctaggatgtttttaggtgaagagtgttttataatttagtagaagatgtaagatttgttatagtaaatgtttgtgaagactcacttgacaccatctaaacacttgacatgcttacaaatgatcccgagccattctatttgtagttgctgtaattaagagcaatatttcagattgagttattcatagcttcatgaaaataacgctttttgcaggcattttcaaatcaagtcagacaccgggttttctttcaaatagccagacgttccaaattatagttaaactagagttgtcttcttgtttgcaacatatatccaccacttatcctggggtttgtatttttagtgtagatggtgcttttgtatggggatatgatgttttatgatggcgcagtgcggagggcattcacatatggtcagggcaagcacttttagaactttatttacgtatctatctatatatatataaataataccttaaacattcaaaaagcatttgtagcagcttattgtaaagcacaagtatactaatacttcattttggcaaccgtggaagcaaagagagtagagttaggggcagaaagaagggtgaagttgtttatatttacatcgatagcagtttgcttttgcatcactgtgttaaatctgttggtcgcatctttgtctgatcctagaatgcagatccattttccttagggctctatcctactgggaaagatgaaagaggagacaagcgatctctactgaatgagaaagtgatgcatcagacctctgacttattagcgtcattattttgttttgttttgggatgctttcatccggttgtgacagtgaaagccagcttcttgattgctttgggtctatttgagactctcttcgttgctgatgatggtacctctcctgttttcttttgatgtatcaaaagaggtaaaattttgatacttagctttttcctgctaggatttagagatgattttaaagaagagggccctataaccaaatatttatatggaaaatgagggttttttttcccccagagtgaagcttttttaattcatcttgatgaattctatagtaaccaaaatttatattataatctcttttaattagcygtgttttatcagttgtttttgtcttatgactcattagatcgctgagttttattcgttgtgtgtcaactaaaccccaatatatatcttttggaacgcctgatcaagaaaagaaagcatattaaaggcaaaaacgattcgttgaacacacattatcatactctatacactaaaatgcctctgggacacttgaggaattcatacttcttgcttaatccttgatacatggtttggaagttataaaccaaaataaatatttgctcggggatagagaaaggagcagagtctttgactgttgctcaagggagttaaaaaattagagacttaaatggtcctagaaaccacagctagtttttccactcaattctgaacttgatattaaaaagctaagctggagacttctgaaaagcacagtagaaaattcttgagttttgaagtgcttaagagacagagacctaccctgtgccatgggtgtgtgtgtgtgtgtgtgtgtgtgtgtgtgtgtgtgtgtgkgtaggtggattggcttaagagaatcagctgtgtgagttcaaagccctgaaatgagtggcatgttgacaccgatgacctatagctgctttttagttggctacacttgctatttggtctcaaccaggtgtgtagaatccaggtatatagaactcatattttgtggggctgtagtgacaaaattgawattttgaggggatttaaacacatacttgaccttttatttgccaaattctaaaggtgtgaatggtgaaaggtaagtagaaaatatctggaaagtgaagctatcacttggtaatgaagtgacaaagacccatcatactctcaattgaaagccatggagagttaggtcttacaattagaggcaaaccagatgtagaccaggtcatctcaaacccacaatacagcctctacccctttgaattttttattgaattatgtacttttactctatctgcgcagcagagccaaggagtcaatcctctcattatctggaacttctataaaccagcattcaataaaaaactaagtagatgaagagacaggagtatttgatcaataacaaaggggaaagaaacaataaaaagcagaagcacagctgatccagatattggagttagcagacaagaacatcttgattgttatgcttaggaacatagagaaaataaggaacaaaagaggtaagagggtggagaattaccctagaaagtttgtgtgtgtgtgtgtgtgtgtgtgtgkacatgtatgtatatggatcaagtaaactttgtggagccatcararaaatatatatctgacartaagaactcaatgaataggcttataacatatcggactcagtagatgatagcaataatgaactggaaggctagttaatagaaaatgtccaaattgaagcacaagtcagaaaagaggataaaacacatttgggatctggtcaaaagatctgtcttatatacaatttgaattccagaaaaagaagagagagaaaatctctaacagtatctaaaaaaaaattctcatgaagatttcagaacatcattacacaagctttgttaacttttaagattatattcaaagaaaaccacacctgtatgcacaatggcataacatcttaaattgctgactgtgctagcctacaattctatattcagtgaaaatatcttttaaaaattaagatgaaataaaaatagtttaggcaaacagatattgagagaatttatcactagcaggctctcactaaaagaaggtactgcaagggagctccctttggcagaaggaaaatgattctaaaagaaaatatggaggagagcatacactatagcttagtattgattatccgaaacagtagtcataattttctgtgaaagtttaagtttagtgaagtttaagttaaatatatggaattgaaatgtaagayaataaaaacacaaaagctagggggtcttacatggagttaaaatattctgttgttctaggattattatgaagtgtaatgttctggttaggttataatcaaggatacaagttataatctccagtgtaacaactgaaataacagggaatgaatgcatatctagcaagttaataagagaactataaattaataaaaatatttggttaatccaaaataaataagtatgaaaaatggatgggtcaatagataacagatgataagatgatataaacccaaatatagaagtaattaaattaaatacaaaaagattaaataaacctagyaaaagtctaagatcctcagacttcatgaaaaacaactaccaccaccatgtgtagcttaaaaaaggcatactttaaatayaaggacatcaaaatgttgaaaatgaaaggatggaaaaagaaagctggtgtagatacactaatttcaaataaagcattaaggcaaaaaggactactagaagtgaaaaggagcatttcatwatgccaaagggaccagtccaccttaaatatatcataatcctaagtctatttcatccttaataacatagtttgaaaataaataaagccataaactaaacaaagaaaacacagaactcagaagaggtatgaacatattcacagttacagcaggagactttaagacatccctcttaaatcttgcttaatcaagcagacaaaatctcgtgaagtgtatagaagatctgaacaaagcaatttgtaaagttgtcctaattgtgcaccaaactatcaatagaatatgtagcatttgtcaaaattggccaaatgctggggcataaatataaccttaaaaaattccaaaagcttggagtcattgagattatgttctctaacaatagtggaattcagttagaaatcaagtgaaagaaaaggacaactagaaaagcctcgacttcctacaaattaagtaccttactctaaataaccgtggattacagaagaaactcaaaaattagaaaagaaactggactgaatgttaatgaagatagaatatatcaaaagtttcaagaaccagcttaagccatgctcagaggaaactttatagctgtaaatatataaatttaggaaataggaataagaattaaaaaaattaatgatctgaatttccatctccagaaagaaaatcaaacctagagaaagtagaagaratgaagtaattaagagcagaaattactgaaattgaatctgtagagaaatttaataaagtaaaatttagatctttgaagagattaatgtaattgataaacttttaactaatggaaaaaatagggtagaaacaaaggacaaatatttgtttgtatgatgaagagcccacagacaatggtaagacaaagaggatgttatgaataattttacaaataagttttgagtaaagttgacaattttctggaaaaatataagtcattcaacattgatacaagaggaaktagaaaatctgaatagtcatgatctattaaaaaattaaatttaatgttattaactctcatacagagaaaaccccaggcctaaatggctttattggtgaattctctaaaatatagtccttatgcaaacccttacggagagtggaatcaaagagaaaactttcaaattctttttataaggccagcataatcttaatatcaaacgtatttaggacagtataagaaaggaaaattatagacagcttttaaaataaatgtagagcacataatgttcataaatattcacaaagcagttgatacaattcctcatgttaacagaaaacaggaagaaaaacctgactaccttggtagtgcaagagaagtatttattaaaattcaatatttattcatgattaaaatttcatagcaacctagaaatggaagataattatcttactctggtgaagattagttgcaaaatgcctgcagcaaaaattataattcctagtgaaattttgacagctttcctcttgatattaggactgtctagggaaaaatttcgtgatacgtatgtcagaactttacacagaaaatcacagaatattatttaggaaaattaaaggcccataaactgaagcatatagcatgttagtggattgtaaggccaagaagagccagagcaatcttgaagaagaacaaaactggargacttaattatcaaatgttgagatgtgttattagtgctgtagtaattataacattatataggtataaaaatacacaaatagaccaatggaataaaataagagtctagaaacagacctgctggttatctgattcaggacaaaggtgactttgcaattttgagaggaagaggtagttttctcaatagaggatgttgattcatttgggtactatgaaaaataattatattaactcttaccacacaagcatcagttacagctgagttgcagatctaattgtgaaaggaaaaaataatgctcttgggagaaagcataggtgaatatgttcatgtgatcttgtgcactaataaaacactaacgttaaaaaagggctgataacattgtgcttcattacatttaagaaaatttattcatcaaaagggtgccaataagagagtaaacaggtaattacagatttggagaaactcaaggaaacttatatctggaaatataaagtacttacacaatcaaaaagaaaagaccaatatccaatagaaatatgggtaacagtcttgaaaaggtacactaagtgttggcaataatgtggagcaattcaactctcatagactattgttggtaacataaatttgtacaaccattttggaaaattgtttggcagtatctacctgaaccctataacctagcaattccaatcctgtatgtgtatatgtgaagaaatatacaaaaaaaaaaaaaaaaaaccagaagcgttcataggaacattacttctagtagccccacactgtaaactgccgaagtactcatcaactagagaatggatcaataataagtataatattgttcagygatgagaataaatgaactaaaaatgtaatggaataatgtatattcatctcataaacacaaagaagccagactcaagtaagtacatactgaatgatttattttatatagaggtaaaaaatagacaaaactaattgatgatgttagaagtcaggctagtgattatcatgagagtggttaataattggaagagtgtgtaagggctatgagttgctggtaacagtttcttgttctgagtgctgattattcaggttaaatttttgaaaactgagccgaacactcatttggtgcaccttttttgtatatatgttaaacttgaacaaaatttttaaaaaagaaataaaaagaagcactatcttctgtttaattcatttcctttacttcacattgtagtgagcccttttatggactcagggagagagagccttggtgtccttagccaggaagaktttccttttatcatgcagctctgtccacacccttcgttcagtttctccctgcaactcagctcagctgtcatgctgatgtgaaacaggagctcataagtagggctgttctctctcaagccttcccaggagtaagaacagtggttagggttatgggctttaatggactttcctgctgacatgcagaccacattcaaaatgagttaaaaagtgagctgccgtgttaacaaaacagtggccaggccgaatagctgttgaggtgctgtcaagcttgaaaggaagatttttcttaaataaggagaaattcagagaagstgccttcaaaaataagaacttgattttggcaggagaataaacaaaaggctttgaaagaaactcagattctcaagcatcgttgtcatttaatctagaatcaactacataacaacactgcaaaaaaagaactgaagcacaatcatttacaaggtctaggtgattttcacatatctatagagaagaaaaaactgacacttataattctgacatgtttaaactttacctgaagattaaattatgctaattattaaaatgtataagaatttgcctttataccgtacagtctttttaatttatctttttctggtgtgtcctgcctcccagattaaattccaaagcatatcctgctggctttgcctacataatatgtccaaaatctgaccactgcttgatcctgctgcagactactagcatttctctcctgggttttggccwtagccacctaacaactgtcttgcgcttctgacctttccttgccataggcagagttgatacttttaatctgagtcatatcatgttccttctagtttcaaaaagcctcagtgatttcccattgagagagaagtcaaattccttaccatggcctacaagaatttacctgatttcatcgctttccacctcctaccacccatccaccctttagaaaatgttctttytccagcaagccccttcattcactctgttattctatcaggggaacctgcccccaayatttcaacatagattctttctattttccataagtgttggctggctgagaaataaagagaaagagtacaaagagaggacttttacagctgggccaccgggggtgacatcacatatcagtaggactgtgatgcccacctgagcctcaaatcagcaagttttttatttattaagggcttcaaaaggggagggggtgtaaaacagggagtagatacaaagatcacatgcttcaaaaggcaaaaagcagaactactaataagggtctaacaaagagcacatgcttctgagggaacaggacaaagggaaaaagcagaaccactgacaagggtccaacaaagatcacaaggcaaagggcaaaagcagaactactgataagggtctatgttcagcagtgcacctgttgtcttgataagcatcttaaacaacagaaaacggggttcaagagcagagaaccggtctgaccacaaatttaccagggcggagtttttccccaccctgataagcctgagggtactgcaggagaccagggcgtatctcagtccttatctcaactgcataagacagacattcccagagtggctgttttagaccttcccccaggaatgcattcctttcccagggtattaatattaatattccttaaaagaatttagcgatatctctcctacttgcatgtccatttataggctctctgcaagaagaaaaatgtggctctttttgcccgaccccgcaggtggtcagaccttatggttgtcttcccttgttccctaaaaatcactgttattctgttccttttcaggtgccctgatttcatattgttcaaacacacatgttttacaatcaatttatacagttaacataattatcagagtggtcctgaggtgacatatatcctcagtttacgaagataacaggattaagagattaaagtaaagacaggtgtaagaaattataaaagtattatttgggaactgataaatgtccatgaaatcttcacaatttatgttcctgtgccacagctccagctggcccctccattcgggttccctgacttcctgcaacatcattctgttaggcactactcaaataccattaaggccttccttgaccagcttatktgatactgaatcctatcaagacttcctttcaccttttccttctttcctcttctctgtagtgattagcatgagctaaaatgttacgtactcttgttatttacattgttgatctttcttccaagttctgtgacagcagaaatttttgtcttttggttcaaaaattcccagtacctgcaacaatgactgtgataggattggtgctcaataaatacttgctgaaaagtaataaatattagcaagagaaagtttaacaatgctatgaaaactgttgtaatattaaaatgttttcaatttggtgcttcttcttggtgctcataaaaaagtttaaaaagtaactttagaacagtattctatgaataaatacattagtttattctaaattgaaatatttatttaaaagttttaagttttgctttgaccttgcatttgacttttcttaatggttgtctatgtttcataatggcatatagaaattatttatttgaattcttattagaataggaacaatttatctactttgaaaggcaaagtgaaattgactgtacagtaaacttcagttattcttaatttctaagacatgagttttatggataattacattttctgaatagatgggagttactatttgtatagcagcttttaaaactgggtctgtcctgaatttcgtagccatcacagccactgtgcactgctttagatgagggttcttctctgttcaaatacaccctgttacaagatactgtctcccagtcttccctccccctcactctctgcccaaagcaatctcctacctttttgaagttcttgggaagtgtttttttttgtttttttttttttaattttaacaaaattagaaaatgatagagaaaatatcttcatttctgttccctccatttttctctccagctctttttcctgctttccctttcttttctcttttaaacataggttatgtagtagaagatgaagacatactcatagaaatgaatagttgttctttgggtacatattgggcatctctagtctcaagatattttaggggtagtctatcataggagcaggataaggccttaggggaaaggagctagaagtaattcagctgtggcatgagggagtgacagtagctgggagggagggctcagtgttcttagatttagcattctttcctcccatcctttcaccccaattatttccattcttgctatagaagacttcactgggggaactggataatagcaggacaggcactaaggctggcagagttagtgggaatggagacgatcagggagcagaggtcttcagcaaaaaaggaaagggaaattgtagagctggaatggggaaggagtcaaaccttagtaattggatgaaggaccaagtttgtttactctttgcatttgcacctgggtgttaatcaccaagtatttgtgaatggtgcagaagatgttctgaagacccatagattaaattggaaatttaattctgatttgttagactgaatagctttaaactggttttatggagaagttgaagaatttgtctatagagaatctctaatatttaagtattgccagttaaaatatacattttaaaaattggttacttgaacttaagtgaataattccgtgactgaatactagctattttgtttgaggctgtgtctgtttgaggggagcagagggggacagaaagtgagttaatgaaatcaagaacattctcaaacagttgaggggttgggatggaaagggagctagtaactacctataaccactagaggcctctcttaggccaagtttcatggttaataccactaggtttccacagcggggcctggctctgccattgtaaattaaacatatgttataattctgaataaatagtatgacagtagttttattctagggcattattataatgtaacctaaatggtttagcttatatatcagaataactgatgatctcgtgaattgaaaacaacaaattagaattattttctctcttctttttctctaaacctttagttaaaaatgtaatcaaagactattgctaggtaaaattatatgtcttcttgaccgtacaaggatatrtgggtttaaaattattcttgttacatgttgtgtttaattgttgagagtagtttatatttctgagggtagactataataaagtcattttaagtcatatgttaaaaattatgtgtatttctttcatgcttataataagcctctaatataaaaaaaaactaagaaatgattcaaagatctgttagacttaaatgcttttccttaggcatagggaaaaatggtctcattttgtgtgagtttggaattattttggatatggtttgaccttgcagagaaaacaggtagggcggtgccctcctctcagatgagaatagtttgtttctctgttccaaaacaggatggctgacaatttgaaagttggtccctcctgccaagtcattcttcctgtaggattttctttgtcatgatcacaactagttagttgttgtactaattggaacaagttctaggctgttggatgctatattgggatgtggctactacattgattgtcctgcctgacagcccttggccacttcctttaagtcccatgagggcagggaattttgtgtattatgttcattgctatatctgcaagagtcctgaagagtttagaatatagtagatgctcagtaaatatttgttgaaccatctgaaaaataacgtggcatttggtttttcagtgaaagaaattaaagaactggtaaatcctctaggaagaaaatacactgagattatcagtcatgccatggggtctatttttattatgatttacattttaggtacattttaaagaagattaaaataataactatgggttctgacctaatgttatatatatatactttttgtttttttgagacggagtctcgccgtgccaccagtctggagtgcagtggcacgatctccacactgcaatctccgcctctggggttcaagccattctcctgcctcagcctcctgagtagctggaactacaggcgtgcaccaccatgcccgtctaattttttgtattttagtacagacagggtttcaccatgttggccaggatggtcttgatctcctgacctcgtgatccgcctacctcggcctcccaaagtgctgggattacagacgtgagccaccgtgcccggccaatgtatcttacataataggacttagttcctggtaaatggtaaattaaaaaagttaaaactacatatgttatgcatgtttccttttgtattcaaacagttcttctaattagacatcagtgtcattattttatagggaagaaaactgaggtttggggaaggtggagcagcttacagccagtgggggacagcactggcttcaacccaggttgctggataataaaaattgtcacttgagagttttgctgatcaaatgcttctaaatgtcagcttagaacatattttatcatatgtcaggaattttctttcacatttgcccacctttataatataaagatatgtgttttacaggtgggcaaatgtgacctgtatacaccttgtaaatcacactaccatattttctttcatttagcattttttttccttccacatggaactggagaaagcaagattaaattatataattatattgttccatttcacatcccacctgatgtgtttttggtgtcctcttatacacttaaattatttgagtttgactcaagttttcattttgtttaaactgtttgctttcactgttacgaatagcagtgaaaagaaagaaatccgttacctcatttcataatgaaaaaagattataggtacattatgttcttagtttaacattttaggtgtaatacaagaaatctaaatgtgttgactttctgttctttctttgatggcgtttaactctctcccattaaactggtgctttttttacgaaattgtatttattctgtaatcgttaagaatttcttatcttttctattataacaccctggctttgcagtgctgagcagtgataatttaacttaaaaatttattgaaactgtgatgtacaaaggtttaacaaaaggatattacttttctagtttattccaaaactggggccagctatggtggctcactcctgtaatcctagcactgagcctgaggcgggtggatcacttgaggtcaggagtttgagaccagcctgaccaacatggtgaaaccccacctctactaaaaatacaaaaattgctgggcatggtggctggcacctataatcccagctactcgggaggctggggcagagaaactcttgaacccgggaggcagaggttgcagtgagccgagactgtgccattgtactccagcctgggcagcaagagtgaaattccatctcaaaaagaaaaaagaaaaaaacaaaacaaaactggggctactcttaccagccatgaatagtcaatctttccaaacacgtactttctgtgctttcatttttttcttctaggaacttggtttgtttctttacgtgtttatattttcttttatgtgtttaattaagttatatagtttcttacataactatttcacatctcaagtttatcttttaatattctatatttggcattgtgatcatatcattacagttttttctgtatttccctttcctttttcttttttgaatgtggcagaagagatttaaaaattcaagcaatccattaacatagcactaaaacacacagtacaatggagcttataatgcraagtatcatcttccttccctgcccctactccctaaacacagccacttttaaccatttctgtattttattcttctgaaggccacttccatatctctagcaatacattgcacagatatttctgctataatggagtatatacatttctgcagagtaaattggattctccatgcatgctcactaaaaataacagggtttatggaaagaaaaagtgcgtgtagcaaaccacttaaaacagcttggtaactagagcgaagaagggtttttaaccagagtcaggaaggattgagcctgttgatttatggagttcagggcaaatgcatcaaagttggggagaaagatgtaataaacacttctaaatcagagcagatgggccagcctgagccaagagacatagtgcatggtactatatttctctgaggcttgagtcagcgctgtggctctgctttgcgttttgctttgttcctaagtggcataaaacaatgtgctggggcagattgtacatatgccaacacgactaggttggttgccgccacttctcactggaaacacatttcatacttgtgccaggaaaatggacttttccttgctcagtccattccctcatgtgtttcactgctgagttaggttttgtcggtggagcctgggtcacatctttatcttggctataatggaggctggaaaacatagtttttttatattctaccttgggaaagtggaattcataattaggagaactatcaaaatgtggagaatatgttaaaaagttttagatttttcaggaatcagaagcctaccacacgcacatgcactcatgcacacacatgcatataggtgtatacacgcacacgtatgtgtgtgtttcaatgtctgtaacttttgatttataaattttaacataatttattcaccactatgacacataacagtttagtgggcttgcattccctgctgtcttcatctcatatttcctcagttttgagttatgatattacctgtattttattttttctactgattacctctttattgtaatttattttaatttctatatcttactccattaactttgcttagaatcttttgacctctcactatgtaagaagatgatgttaatgccctctactcctatatccactgttctttcctcccttccaattcccattttctgtcagctgattatttttacattgccaagactgagaacattacattgttttataaccgaaatgaaataattaaacccttgattttaaaagttgaaaagcagtacacactgttaatattattatgataacaaatatttttcaccactgttgggggtaagattttatttttcacttgaggtccagtgcttggtctttgggaccctaaaaggagattctcttggcatctagatcaaatggtttgccttttaaattagtgcattaactgttcaatgtcttgccacattctgaatgtttcatatttgggctgtggcattcttttagatccttttggattttttagttttaattacctttcattttctctttgaaaaatcaagacaagcctttaaaatatcttgaagatcactcatattcttttttggaatttactctttttttttttttctttttttggagacagggtcttgctcttgtcacgcaggctggagtgcatggtgtgatctcagctcactgcaacctctgcctcctgggttcaagctattctcctgcctcagactcccaagtagctgggattgcaggcatgcaccacgatgcaccactaattttgtattttttagtagagacgggatttcaccatgttggtcagtctggtctcaaactcctgacttcgggtgatccacacacctcggcctcccaaagtgctggaattacaggcataagccaccgcacccagggtactcttagttctctaatttccttttccagtcttgactacccttctctatacctgctgcacaacaatcaccagggatgtttctccacttcactcttaaaggcaccatttcctgggtcctgcgatttgctcttccatggttatctttctcattttgttggagtacattcataattaactttttaaagcaaagggcatattgggtgcaggaggttttctgacacttgtgttaggtaaaatgtttttatttggactcaacatttgcttgatatttggctgcgtatagtattctaggttcacagtaacttttacttaggactttgaagataatgcttcattatatactagtgtcacattggggtagaaaattttgatgccaccctgattcttattcttttatacatgatctctctgtgtgtttgtttttctggaagcttttgtgattttttgatacattttatactgaaatattacaggtgtgaatctaaatatgagtctgtttgactcatcttgttttgcctctcatgactttcctctgggaatggcctacatatttaaggataattatattctttcttttttttgtatattttcttttcaaaaaactcttagcagttgtatgatagacctgctaggttgattctgtttctcatttcttctctcctagtttttgtcctgttgtgtttttacagtgttttgcatatttcctttattgtatcatttaattttttttgaatatttcaatctcatcaatcaaaatttcccccttgtactcagttatttttgtatcatgctatttgtttttttttttttttttgtcatgtattttccttcagttgttacgggtatatacatttttttcaagttatgttctatagattatctctgtttctttagtagtgttttttttttttttttttggtcatagttcttttcttcatttgtgattgttgattattctggatacctgactggtgcagctttcctttatgtctctttcttctctaggcttttccactatggaaaaagttgcatagatctgtgcacatggatgagacattgctttagggtaaatgaatgagaagttcatccttaggcagaaggggttgccactaggttagcaaatgggatactcttgattcttggacatcagtgctcataggataagcctgtctttgtaggcaatttgaatgctttttatcagagactagctctttttcttttctttttctttttttttttttttttgagatggagttttgctcttgtcactcaggctggagtgcagtggcaaaatctctactcactgcaatctccacctcttgggttcaagcaattctcctgcctcagcctcccaagtagctgggattacaggtgcccacgaccatgcctggctactttttgtatttttagtagagacagggtttcaccatgttggtcaggatggtctctaactcctcaccttgtgatctacctgccttggcctcccaaagtgctgggattacaggtgtgagccaccgcacctggctatttgcctgattatctctggcatcatgctttttatttgggttttatttgggggaagtggagcaattgatacaactgtgttatttaattctgttgtttttattctcaattcttatactcacctctctacctgctcatgagctcatcttctctctgggagattagctgtttcttccactgtacctccatttatctccgcattggcttcctctactctttgtttatattttcatcacacacccacaaaagacttgttcagtctctcttgtctaataatcactaccccttcccgactttgttgtttttgctgttacaggtttttccttttgtattcatgtcctgtcttgagagaaaagggacatgaaagcgtatactcagtctgtcatcttgaactggaaagttttctctattgcattttcttattttttaataggcagcataatttgtgtatcttagtctgtgtactgtcatttcaccaaaatcttatttattctaatagtttctttattggttttctgagattttctaggtgggtaatcatattctgtaagtaaaacctattttcatctcttcttttctaatctatattcttattttttctcatttgtctagaacgactgaatgatgatgaatgaaaaaaatgatagcagacattaaatgtgatatttataaggcccaatttgaacttattgaattattaagtagaaaattgaaagtatcaacttcattgtatagatttctggcttactgagaaaygtatcagcaattttctgcataattagtgtttttgagtaaaagaatttggcacttacagccaaataccgagtatcttatatgtttctttttccaatagccacaattcagaattgggcttcctaaaacagtgtatccttccaatggcgtttcctaattttattattattttttaaaacgttttattttattttagattcagggggtacacatgcgtgtttgttacctgggtacattgtgtactgttagggattgggcttctagtgtatgtacccattacccaaatactgaacattgtacccagtgggtaatttttcaaccctttccccactctcaggctccctcctttcggagtccccagtgtctattatttccatctttgtgtctgtgtgtacctattgtttagctcctacttataagtcagaacatccagtatttgattttctgttactgagttagttcacttaaaagtttacctaattttatatgacaaagctggcaaatcactgttgggcaacatgattaatgttattgcaataagtcagttaaaaacaagtcatttaattggcagctatgaatcttcaactctaaagccaataaagatccagtgaaacaacgattactagaaagatacctgcatttgaaaaatatgcccctcctgattgacagctaaagaaagactcattgcaaaaacagactcattgctttttcctctgtcccttctttccctggatggatctaagatctgataagtctttcaacactgagtttacaggtttttttcttcatggagctgttcctgatctttttttcccattgtcttttaagtctgccttggagttgtcttcttagtgttcccgtggcattttccatccatctgtttcagagtagatatcccttagtgttgtaatttttaatatccttatctatttctctctaagagattgggtttcttggaatctcagttttttaggatgtggctaagaatcgtgaagtaggtagaagacttctaagcagcttgaggtgctaccataaacccatgtataaaagcacatacatttagtctataagagtggctactaggcccttaatcatatcccatcaactgttactttacatagaattctaacaaactttttacttagtttcttagcccacattagattggaagcaacacattagaagatggggaaaagttatgttgatgaaggtagggatgttggcaagatctaaagatgatatattgatagcctgaaaataagataactgatgggaaaagaaaaatctgttaaaagtacaaaagaatatagttttaaaaatcacagccattcatattcatttaatatagaaacaaggtaaacatctaccttgatagcatagtattataattgatrttccaaattatatctatcattgtgaagagattaatttctgttctatatgctgtgtttgaaatacaatattattgcttaaggtatgagtggggtgaactctcaaatgtgttgaataactcagccccctacagtgctagataaatgagttcttgttggtttctttctaaaagctgcagggtactggtgctttgcttctaatcattaattttcctttggttacattcacattaataataatgtcattaagtcatcttctgttagggcatttttctataaatttctaatttcttatgtcagttttggaaaataataaaatgacccctttctcttggctcttactattttttctttaattattttaatcatggaactacttatgaatttttctggtagaagccttagtataccattaattctgatactattttgcattaactctttgtgatattttctagacattgctttagctggattggtgggcaggaaaaaaggaggcgattaatcctccatttctgtagattgagattttgaggtgtgacagatacgatatgtagtaacagtactgcaaatccctgtgctggggcttgaaactattaatcttgttgtgaatcatatgagacatgtttcgtatgtctctccgtgtggttaaactcttccaggggagcttgggctggtggtgccaaagggtggagggggattgactaatctgttaaatagccttttatctgtgagtctagtttctcattagtatttctgaccagaagaatagatggttggaaatgtggacttttgtttttaattagtccctctagggatgagaggcttatttggaagaatggaattttaaggaagcctgacaacctcagtttccatgtgattgaaaatgtttggcagctgaaaaatgtttcacaattatgagttagagccagattttccactggctaagctgttctttgggagttagatacagggtaactcatatttccactttcaggtctcagtggctccgtttagggtgctgttcatgggactctaatgctccttccttcccaatggcccagaaggctcccatgaggtttattcttctatcatgtataataamctgatgaaataaccatatttcatctcatatttatgcattttaatcaggttggttgatgtttaccacagacatatgtctacaagcatttcattatctataaaagagagatttttttctttccttttttttttaaaacaaggtctcactgtgttgcacaggccgcagtacaatggcacaatctcagctcactgcaacctctgcctcccaggctcaagtgatcccccgacttcagccttctgagtagctggtactataggtgcacaccaccacacccagctaattttgtatttttcttttgtagagaygggctttsgccatgttgcctaggctggtcttgaactcctgagctcaagcaatctgcccacctcagcctcccaagttaagtgctgggattacaggagtgagccactgtgccagacccccaaaaagatattttcttcctcttttatactaccataaaattataatgctactgtattgccacagttttacaactgagtcagttttgcccaagatcctttgatctagccaaagttttgaagtagccaaaagtgcacagactttggaagccacgcagttcatctccctgtgcacttcaaggtgacaccctgacagatggttgctgagcacccactggatttttcccataaagtgaggcaaccagttcttttgttgtgcggttctagttgttacagttttccattgttgaactgaaatttgcctttctctaacttccacctattgattcttattcttccctcttgtatgtaacttgcctttgaatattcgaagacagcctcctcatagtcctcttatatctaggttaagcattccatccgttcctttcaggtgttatttaaatctcctggtttgcagatgcaccactattctgactaccattttttggacatagtctttatctctgatggcctttaacttaaaatggcattaaaatggtcctttagatatggcttgagtagctgaatgcctagtagagctgttttcctagaaggagatatatactttctatacttctgttttggaatacctgaaaagatagtttcttggcattggatatgttaagcagatgcacatatgttagggatgttgtagacaaaaagtgaataaaaagtatgttgggagggtggtgtccttacaagaataaatttaaatggctgttaatttttaacagcactattatgaaatatcaactataaaatatagggcatattacagtatataatgttggtaataatgtctgagtgaatattcttttcttagaaggtcacttaggtgcttttgttttttgaacaattcctgaataaacttgttagagtactttgtatctgtgaaagattgcatcccttgtcaaaaactttcaatttcacaaaaattccatcaacattttcccttcacagcaacatgatagtgctttaattttctcaatgtttggccacattgttaacttatttttttccccacttttcttcattctgctccttcctttgaggcagtgtttacttgttctttatagagttaacatttggtgcaatacaactagattgttagaaacttttaaaaaccctactcagtattgttattagcattgttttgtccattaccaaccattcacctgtttcctttcctaggataatgttaactgtgctttattagatgctctcagatatttaccaatgacatttttgtaaatggaatattgtttactcttaatcctaaagtttactcttaatccttaatcctttggaatgtctgttgaccttactgtaaatttaaggctgtataactgatagatttcagcaaattatggcagtgagagttttgatggtatctattttatgtcaagtaattcttcagtgactatgttaacatttcactgcattgtgtagagtcttattttgtttttccatgaggtaatttttaaaactacagggctattgagagatatttagtccagtaatacattccatataggggcattcaacgagaagattcttgtgttacaaggaaaggatgttaaaaaaccagaatctctcagtaaattgtggtctgtaacaattccatccctggggaagggcggcgcattgaaacttccatgactattaatcttgagagagagcatgcattgtcttgttggactgaagcctctagccatcttatcaagccagagctacaaaagtaggataactttgcatccctttttggcccactggtgaaaatgaaaatggtaggagtggatggacaatagattaggttctttgacaagtaagtgttgagtgacagtcatgaatatttcccatttcttgattttaccaattgtgtctctaaattcactcaccagaaatatacaataagaagctgaattttcttggattacttaacttgttttagtgaatgggtgagaaaggtttccagctgtagctgtcaggtttttttctgcagcaggcgcctgccttcagcgtttttgaggataacacgatacactctttcttcttttgctaccattaagcatattatgctgccttttgtaggcaggccaccaggctataagtcggactccgtagtctggttatgagctctgaggcatggagagggatctctggccctggcttttctactggttgctggatgaccttgggcaagtgagtcaacctcttctttatcttctttccactttgtaaaactgagactttctttttttctctagtcttaaaaaaaagtttgcaaccattaaatataaagggtaaacaagagtttcttgagtaagttaacacctctctggatactttagttaatatagataggattacttcttggattactacagtaaattaaacaaaatactctacatgcatttaacatgtattacagattgtctatattaaataaaagatgtaagtcgtgtctaatttgtagaagttatttcagtttcttttggaggaaagcaatgtagttatttatgttgtccctgtaagttgtattacagcattagagaacttctggggacactgaagaattgtttagtcacttamacccttaaactccctttagggagtccagttgattcatgtggaccctccaaattatctcgtttcccaaattttaaaattgcattgggattatttcatctctttagggcttttttacttttcaatttaattttgctatgttttaaaaaaactagtggatgaattatgctcactctgaaaagtatttgggttccagtttacataaatttaattccagttttgtgtcccagaagtatgctatgtctttaaaattcagttagctcattaacactccagttctcatatttgagtgccctataaatctgtatacttgagtaacctgagctgcaatctgaagttaataatacaatctgttcttaggtatgtgaccrtaaaattccttaaagggagtcctgtgtttatgaatctgaaagtgttgagcttgaggtaacagtggggctaacatcttatgtgagggtttaaaaattataataatctactaatggtagagatgttttctaataagagtaattctgtgactcattttagttcccttgctttttattcctgtgagccatagaaagaacccactgtagggggttaraaatattttttcttatgattgtgggatgaaagagtggttgctttttccaaccaccatatgtggtgattaggcttttcagaatgacattggggtacacactgagcatacagcaacagtcttccaaataacttataataaataaagtatgtaagacgtttcccccagccagatgtaatcttcaatagtagaggaataaatttaaagtgacttcccacaggaaaatttgggaaatgcctggatggaccaagaaggcagtcatgctgttagaaataagcaaactcctttcctcctttcaggtgagaatatatgatggttcatttaaattttgtttttgtgatttctgggatttcttagaaaatgcatggataaaaccaaaaaactccagtgaactaaaagtctatttgaactgtttgaaccttgctttgcatttttgcttccaatattcaaaaacatttaagcagatggtactcagataagtgtggggacatctccctgagtgtgtagtaacagatctaatttttgtaaattgaattgtactttacatctaatagagacagcaccagttcctggggattcttgaaaggtggcaatctaaatcacctttattttctgagcttcctctcaggtgcctaaaacagcagcttcagaatttctgtgaggatgaatrtgggtgttgaagtgggagatagctagagaacttgtcttgaaatggcattttgtttttcacagacagtgctttgagatgggttttatgtttatttaggtgggcttggggtggggggttttgtgatagccagcctttggtgcttgtactactctcaaaccatacccgagccacatgtgcaggcatgtgtgtagagacttgaggtgtactgacccaacttgtyrccagcctgggctctcagaaggtttcagaagtttgttcttctctctgctcgatgggagttaaaaagtatagcrgtggagagatccagtgtgagggcctggacttccaaccttccagggagagctgggcttgggagactaagaactcctcaggtatgcctgaacatgcccagtagtctatagcaaggactggccactgaaacacaacagaagacatcctgccaaactagcatctcctgaaggcattctcgttaaaactgtgtattccttccattgtttttttcatttaacagatactcagtgagcaccttctgggaccatgtgttctagaaatggagaacaaagtaaacagagtagaaaatattttgccctcttggagcttagacactattgcaggaggcaatcagtaaacagatatactaatacatatttaagtcagatcccaataaattttatgaagaaaaatgaagcagcttacagaaatagcagagtgaagggaagggctatgatagatggttagatgatagttgtcactgaccactgctctcaggtggtgccttttgagcagacacttggtatctgagaagaagagttggcagcatgatagcatgtgcaaaaggcctgaggcaggaatatgtttgtcctattggaggaacagcaataagcttggtgtggttgtagtcgggtaagcaaagattgtaagagatgaagtcatgraagtaaccagtggaacaaaatagggatgtccattcttatcattagtaatcaacattatgctggagagtctaaataattagactagaaaattgaagagttgttattaaaaaaaaagaaaaagtaaaattatttgtattttagtgaacatgagtttatgcttttgaaatctagaagactttcactaaataatttagaatcaatgaaataattgagagaagaagcttgaaatacaatgactgtttataaaatctataggttttcctcatattattagtaagaaatagccagaaatggaaaatgacaaagatatcctatttataattgaaactataaaatactttagaataaattttacaagaaagaaagacagtggatacataaagaaaagaataaaatcttaggaaggctgttaaaatcagactaaaatatactgtgttcttaggtattcttaaacagtagcacataacaccatttaatacaaccccaatttgaattccaaaggggtttttaggttgttttttttttttttttttttttttttttgagacrgagtctcactctttcgcccaagctggactgcagtggcgctatccyggctcactgcaagctccgcctcttgggttcatgccattctcctgcctcagcctcccgagtagctgggattacaggcgcccaccaccacgcccggctaattttttgtatttttagtagagacggggtttcaccgtgttagccaggatggtctcgatctcctgacctcgtgatccgcccgcctcggcctcccaaagtgctgggattacaggcgtgagccaccgcgcctggccaggtttttttaaactacctaaaaatatttaaaactatatataaaaaatacatgccccaaatagccaagaaaaaaacagtgaagaagattttctattgcctgaaattaaaatttactgcagtgccatgtaaacaagctatggctgggatttgacatatggaacagggggttagcaattttttttctataaagagccagatagtaaatattttcaactttgtgggctatatggtctgtcttaattattcaactctgcccttaaagcagtgttttagtccattttgtgttgctgtagcagaatgccactgactgggtagtttacaaagcatgagatttatttcttacggttctggaggctaggatgtctaaggttgaggtgcctgcatctggcaaggaccttcttgctgtgccatgatgaaggaaaagagagcacgtgcaagagagagaaggaagggggccaaattcctcctttttcaagaacccactcrtgataaagtcattctgtagtgacatgagggctctgtcatgagagcttcattcatgagggctttgtctaataacctcttaacagtcccaccaaacactattgcactgagaattaagtttccaacacatgaactccagaggacacattcaaaccaatgcaagcgcagaagcagttgtaartaataaataaatcagtggatgtgactggatctcttcattgccagtggttggccaattcatgatgtagatcttaaaacaaaatagtgctcagaaatagataatatatggcaagagtgctatttcaagtcacttgggaaggatagtttactgaataaatggtgctgacagtttatgtaaattctacttaattatacatacttaatgtatgatgctttaaatataaaaaccaaatagtaaaacaatagaaaaaaatttaagagaatattgttataacctagtgttgaagcaaagtttttaaacaaggcagaaaatatagaagctataaagaaagtatagatatttggctacataaaaaaggaatgttattatgtattataaacatttataaacaaaaataaacaaaaataaaaatggtattctgtgaaaaatatttgcaacacatataacagaaaaagggctattttctttacatccagtgtgcctctagaaatgacctagtaaaaacagggcaaagaacagtttctgaaaagaaaagccaagtgggcaatgactgtaggaaaagatgctcagtatcatagaagctgtaaccttttgtaaaatgggatagtaatagtacccacctcttagtgctgttggaaggattaaatcaaatcatacaaataaagtataagaaagtggttggggccaggcgcagtggcttatgcctgtaatcccaacactttgggaggccgaagcaggcggattatgaggtcaggagtttgagaccagcctgaccaacatggtgaaaccccgtctctactaaagatacaaaaattagccgggcctggtggcacgcacctgtagtcccagctacttgggaggctgaggcaggagaattgcttgaacccagcgggcagaggttgcaatgagccgagattgcgccactgcactccagccagggtcacagggcgagagtctgtctggaaatcactgtactgctgcaaactttctaaaaacagagtacatgtagttcactgccttttccaataaaccttttaaaatttattctgttttttcaacttagcgtcattacagcataatcttttggtgtaggttataataccaaaatgctttcagagaattaaagtatagggatatttcctacagcatccctggattttggatatatcctacctgcttattatagtggctcttttctcctttactggtagactgtcacctgtcacttccctgtgctggctgtttagtctaatgcactatagcactttctttaaccctttttttttttaatctctacttctgatagctaaaccagagagctaaaatcgatcaagatcaaccatagaactgttaacagagagaggaaagtaggcattctttacaattaataaactaattatgattttgtagtagatctattttataaatctaaatatgtatcagtatttttccaaacatctcatcttttttcagagaaatttactgtggggctcctttgaatagtagaatcccccttttcagttatatacatacatgtttatattctctctatagcacatatacatttgtatatgtatgtgtatatatatactgtatatatactacatgtattaaattctccttatggtatggttactatgtaaatcacctgtaaataaaattattttataaatataaatatttataaatgtaaatatttaatatatttaatattatattaaagagatatgtatgttctatatagagatatgatatatgttatagatataacatatctatatctgtgttatatatgtatgagagtgtgtgtatgtgtgtttgtgcgttctctttctttatggcaagcatattaaaaaaataacagaaatccaagacaaaaattgcttgagtcttttaatcaagccattatcttcattttcattcatgtcactatgtgaatgcataatttgcatagtaatatgtaggaatatcatgagtagattttaatactttatattttcatttaatgcttttctgctgtcttttgtttttaaagttgtttcttcctttctctcagtactccctgtgcacaattgacatgtccaatactcatgcttaatatgcttgtttttatattttcaggtatgaaagacttttttggacttaatcattgtttccattttggcaccatttttgtccttatctcattarcatagtaagcctaaaatgtcctaattccaggaacggatamaaattccattccattttatattcaaaggtttggatttctaccttaatccatttcttaaagtggctaatgatttttattaccctagttgtctctagggcagtagcctttctcaaatcattttagtataactttacaaaatgaatgctgtaaatatactatgaaaccttcttgagatcattcccaactaagaatcaaaattagtgacttatctaaacattcacattcttttatatgttgggaaagttcacatcattgctcttatctgcctctaaattctttctctctggatcgatagtttcctgctggttttcagaatcaagtgcttcttatttttctgaaccttattaatcttaattaggcctccctggctctggggattatttagaatttcttcaggtaaaggtcacacctatttgtagttcttaatctttgcattttatctactttgcgtgtcaaatgttcaatgaaatggagctctactgtagggactcaatttgttagactgagtactctttcacgatcatctayatacatcaggttttattcagagacttctaaaaggagctatgatttttagtttctgaaattccaaaccccaataagccaaacagaacataaataaaaatagtcgtatagagcagcacttcccaacctttttggcaccagggactggtttcatagaagacagtttttccacagactggaagacaatttttccacagactggaggggtgggaaatggtttcgagatgaaactgttctacctcagatcaccaggcattagattctcataaggagcgtgcaccctagatccctcgcatgcacagttcacaatagtgtttgcacttctatgagaatcgaatgccactgctgctgctctgacaggaggcagagctcaggcagtaatgctcccttgcctgctgctcacctcctgctgagtggccaggttcctaacagggcagggaccatactggtccatggcctgggggttggggacccctggtataatggatgtagtatcagtcaccacagtctcctgccttattattccatgaagaaaccaagaaaatagttttaaaagaagattgcgactatttagtttagaacaatgtgctaggtagagacttaactttttcttggctattatcacagatagaataggaatgtttatgtgctcagctggaggggtggcagtttatatttgtatataaatatagattgggataaaggttttgaacttaataataaatggtgtcttaagcttacatgttttagttttcagagcagattatactaacagcagtaacaatagctatgctgagaagaatgcggagaaagaggaatgctcatacattgttgatgggaacataaattagtacagctattatgggaagcagtatggagactcccagaaaactaaaaatagaactgccatgcgacccagcaatcccactgctggctgtgtatactaaaaaaaagaaatcaacttatggaagagatatctctgctcccatgtgtgttgcagcacaattcataatagccaagatatggaatcaacctaagggctcatcagtggrtgaatgaatgaatgaagacaatgttttatatatatatatwttagactattattcagccatagaaaagaatgaaatcctgtcatttgcagtaacatggccggaaagtcaggccgaggaagacaaatacatgttctcattcatatgtgagagctggaaaaatgatcttatggagctagtgagcagaatagtggtaaccagagtcagcaaatagtagggggagtggagaatgaagagaggttggttaatgggtatcaaaatacagttagaagaaataagttctagtgtccagtaacacagtagggtgactctagttaacaagaatttattgtatatttcaaaatagctagaagatctacaatgttcctaacacaaggaaatgatcagtgtttgagatgatagatgtcccagttaccctgatttgatcagtatgcactgtatgcatgtatccaaatagcatatgtgccccataaatatgtacaactgttatgtgtcaataaaaaacaaacaaaaatagctatttcttctaatatcaggcattggtcaaacaaatatacttgcttctttttataacctcataacctaaagggatagttgctgttaatcatttccattttacttttgaggaaacatgtatttagacaagttaagtaactaacctttggataatcactgaaaacatagaagccagctcccagaataatatcttctacaaagtagaagagattatttttgaattagtgtctgagctgggactaaaaatctaggttaatctgatattaaacccatgttcttgatctttgaggtacatttcttctcacttgattgccacattaattatgtccaaaggccagtggcacttaggttctatagaaatatttgtgtggaataaaaattgtgttctaccaattctccttgcagttgcttgtgtagtggataggataatttaaaatcatggcctggttcttgaacaatcttattttgtcatctttgagttttatgaacagcagatggcaacaggacaatggtcagtcagcttgactgagcagtgaaactttgttcagtgagcaccggcactgggaacaactggtcagtcatatcattcagatgggaatggctctcattagctttgaaactcagatattaatgactaattgccagtaagatcaggcaatgctggtcaaccaggcaacttaacctgtgctccatgtggaaaggctgcttttgyagccttttaagtttggttgtaaaatgtaaaattaatttttcaatctcaagtttattcagaattctattaaaaacaattgttctttagccattttggtatgctgttattctttaataaaatatcagactgtgaattattgcctctttaactttgtgttgctgtgttcccaaagtactttatccatataatgaatgcattacatatattatggttatttgattacatgcatattcccagcttaaccaaggactgtttgaaggcagggctgttttatacaattttgtatttaacaggtaatagacttttaggtratcagtcaatgttgarctaatttgtactgtaaaatgaaagtccactgtttggctctgttgttcataatgtaaatattcatttacttaaatttaactgaacctatagtttagctggaaaagtgaaaattttatctaagaaaataaatgtaagtttaggtttctgaggctgtctattgtttacatgggtaaaaagctaaagccctcactgtacagctatttcaaatgtttaacatatatttactcatttattccttacattagcagaggtagttacattgaaaatactgagtcattgagaggttgagtaactggccccaagacacatactaacaagggttgagctgggatttgaacccaggcagtccaattccagagtctgtgctcttaaccaatattctatgcagcctcatttatctgttatgtgtatgtatgtaagtcaatatgtacagagagattgaaagagactttatcttatattttatagtgaatgttattatcacttcttggaaaaatacagaattttgcagaggaatgtatagttttctaaggtcaactttcaacgtcaagtaaaataatttaaaaaaattttcatgtagatatactttgagagacatttagatgcagtrgaatgggtttggaaaaggaccaacaaaagaataaggaaatataaatcatgctattgtagaagacattgtaaacatttcattctgagagaattttataagggaactgcaagtgtttttcagatatttgaaggtagaaattgagagagtttggctttgttctttatagttttggtggacaaaattaaagtctttggtagatgctttagagcaataggattttacaccatttaaggaggaaatttttgcatggaaggtggccttaggaaataatgagcatttttctatcaggatgcttagatagaggctgaaaacagggatgtcactgaggataatcaagcattcggctgattgagtaactgaactaggtgatcacatttaagttaccttctaaacctgcaacttaaagattctaataacttagaagggattctgttttattaatttactatgtaggtgatttctagtgaaacttatgatcattaataccagtggttgcgaaaaaataatgcctgttacagaattattcataataagctcatggaaattcactcatcatacttagtgtttattatgtgtcagataccttgttaagcactttatcatttattacctttttactcttcacagtaaacttctggagtgagaactattattgtcttctagatgagaggttcagaagtgcccatgttcacattaaccagtaagttggcatggccagagcttgaacccgaggctttctgactccaaaacctatatgcctaactactgcacaacctttcaactttctagttcagatcagaaattgaaaatcaaggtaattaacatgacaaggttctcagaatatgatacttttgttatttacataagtagaaaaggttcaggccatccctatcagctggagcagactgctataaaaaaaaggaagaatgaaatagaagaattagggaaaggaaagagagcaaggatgttgtgtaggaactatttcatgtctagttgaaatgtgttataaaacttaaatakgttttttaaagttctgttttgggtggcataaatttataaagcaaaattccttcctccctccttcgcttccttccttccaaagagtattgaggagattttaatcttttttaaatttttattttattttttgagagtctcgctctgtcacccaggctggagttcagtggcgtgatcttggcttatagcaacctccgcctcctgggttcaagcagttctcctgcctcagcctcctgagtagctggggctacaggcgcatgccaccacacccggctagtttttgtattttttagtatagactgggttttgccatgttggctaggcttgtcttgaactcctgacctcaggtcatctgctggccttggcctcccaaagtgctgggattacaggcgtgagccatcctgcccagccttatctttaaattattcagtaaacaacagtcaaaagaaaaatcttagccacattaagttaatagagttcagttgagcaaataacaactcgtgaatctggcagcctcggaaaccagagtaggctcagagactctccagcgcagccaagtggtggaagattttgttttttcactctttttattttatttttatttatttatatattttttattttttattatactttaagttctacggtacatgtgcacaacatgcaagtttgttacatatgtatacatgtaccatgctggtgtgctgcacccattaactcgtcatttacattaggtgtatctcctaatgctatccctcccccctcctcccatcccatgacaggccccagtgtgtgatgttccccaccctgtgtccaagtattctcattgttcaattcccacctatgagtgagaacatgtggtgtttagtttgctgtccttgtgatagtttgctcagaatgatggtttccagcttcatccatggccctgcaaaggacatgaactcatccttttttatggctgcatagtattccatagtgtatatgtgccacattttcttagtccattctatcattgatagacatttgggttggttccaagtctttgctattgtgaataatgctgcaatgaacatacgtgtgcatgtgtctttatagtagaatgatttataatcctttggatatatacccagtaatgagatcgctaggtcagatggtatttctagttctagatctttgagaaatcaccacactgtcttctacaatggttgaactagtttacactcccaccaacagtgtaaaagtgttcctatttctccacatcctctcaagcacctgttgtttcctgactttttaatgatcaccattctaactggtgtgagatgatatctcaatgtggttttgatttgcatttctctgatggccagtgatgatgagcatttttttcatgtgtctgttgactgcataaatgtcttcttttgagaagtgtctgttcatatccttcgcccactttttgatggggttgtttgattttttcttgtaaatttttttaagttctttgtagattctggatattagccctttgtcagatgagtagattgcaaaatttttctcccattctgtaggttgcctattcactctgatggtagtctcctttgctgtgcagaagctctttagtttaattagatcccatttgacaattttggcttttgttaccattgcttttggtgttttagtcatgaagtccttgcccatgcctacgtcctgaatagtattgcctaggttttcttctagggtttttatggttttaggtctaacatttaagtctttaattcctcttgaattaatttttgtgtaagrtgtaaggaagggatccagtttcagctttctacatacggctagccagttttcccagcaccatttattaaatagggaatcctttccccatttcttgtttatgtcaggtttgtcaaagatcagatggttgtagatgtgtggtgttacttctgagggctctgttctgttccattggtctatatctctgttttggtaccagtaccatgctgttttggttgctgtagccttgtagtatagtttgaagtcaggtagcatgatgcctccagctttgttctttttgcttagaattgtcttgggaatgtgggctcttttttggttccatatgaagtttaaagtagattttttccaatgctgtgaagaaagtcattgtcagcttgatggggatggcattgaatcatgaagaaagtcattgtcagcttgatggggatggcattgaatctataaattaccttgggcagtatggccattttcacgatattgattcctcctatccatgagcatggaatgttcttccatttgtttgtgtattcttttattttgttgagcagtggtttgtagttctccttgaagagttctcctcttcaaggagaatacaactcacatgccttgtaagttggattcctaggtattttattctctttgaagcaattgtgaatgggagttcactcatgatttggctctctgtttgtctgttattggtgtataggaatgcttgtgatttttgcacattgatttttgtatcggactttactgaagttgcttatcagcttaaggagattttgggctgagacgatggggttttctaaatatacaatcatgtcatctgcaaacagggacaatttgacttcctcatttcctaattgaataccctttatttctttctcttgcctgattgccctggccagaacttccaaccctgtgttgaataggagtggtgagagagggcatccctgtcttgtgccagtttttaaagggaatgcttccagtttttgcccatttagtatgatattggcctgtcttgctaggttggggaagttctcctggataatatcctgaagagtgttttccagcttggttcctttctccccgtcactttcaggtacaccaatcagacatagatttggtcttttcacatagtcccatatttcttagaggcttttttcrtttctttttactcttttttctctaaacttctcttctcacttcacttcattcatctgatcttcaatcactgatacccttcttccacttgatcgaatcggccactgaagcttgtgcatgtgtcacgttgttctcatgtcatggttttcatctccatcaggtcatttaaggtcttctctatgctgtttattttagttagccatttgtctaatcttttttcaaggttttagcttccttgcgatggattcgaacatcctcctttagctcagagaagtttgttattactgatcttctgaagcctacttctgtcaactcgtcaaagtcattctccatccagctttgttccgttgctggtgaggagctgcgatcctttgaaggagaagaggcactctgatttttagaattttcagctcttctgctctggtttctccccatctttgtggttttatctacctttcgtctttgatgatggtgacctacagatggagttttggtatgagttgtcctttttgttgatgttgctgctgttcctttgtgcttgttggttttccttctaacagtcaggaccctcagctgcaggtctgttggagtttgctggaggtccactccagaccctgtttgcctgggcatcaccagcggagggtgcagagcagcaaatattgcagaacagcaattttttatacatatttctttatgtatataggcaatatttctggtaaattcctgggaatgaaacttctcattcctacattatcagcattttgaactttagtaggtattgtcaaatgattttacagtagttgtaccatttacacgctcaccagcagtatgtgagatgtcctgttgtgatcaatctgattgtgtgaaatggtatcctactgggtttaaatttgcctttctgtaattgctaatgaggttgaacatcttgtctgtaaatttgcttccacttttctattgggggaaaatttttcttactgatttgtggatttctttttattatttggctaagaaacctttatgagttatatatacattgcaagtatcctttctcagtctgtggcttgtgttttcactcttttaatgttgtcttttgatgcacggaagttttaaatttttctgtggtcaaatttattcatcttttcatttatggattctactttctccgtctcacttaaatccttccttatcacaagatcatgaagatattttaaaatattttgaatagttttaaagttttacctttcaaacttaggtctctagtcacctttaatcatacttgatatatttagggtgatttaaggtaagagctctgttttatttttgaccctacactctgcatcttttaacagtatccactgttcatgtacaygtggatttgttcatgggctgtccattttatgtttctttgtgtctttttagagccttacaatacctctctatcttaacaatatagctttataataaatttgaatatctgatagggcaaatctcccgaacttgctcttcttcagttatttttggtggggtgggagcagggaggagaggtgatatttttagtccttttattttctttaggaatttgaagattaattgttaagtgacacacacacatacacatacacatgtacacacacacacacacagttcacatttttatgggaattgcatttaatttatagataatttgaggaatgtgacatcatggcaatattgattattcctttccatgaatattggattgtctttatttattcaagccttcctgtattcttaattaatctttgcatcatggggaggagtgtggtgctggctgttaaccagggtggggactattgactaacatctttgctacatctggggtataatagtccactggtactggggcatcaggctaaatagatgagaacagataaagtataaaaattgggtaggtttccagagacccaaatctgtttgggttaaaggcaaatctgtagtttgagtgttcagattgccatcagtaggctggtttggcaggcagagaaggttgacatctctcgatygggcaaaggattctatctctcaattggggttaatcgggaaacgactcaggcatagagcatcaggactctatagtcatatctcagccacagactaactggacagtatggccagaatctagtcactgaaagactggacaataggataaaacaaggtacagagagacaaagtaaaagggagtaccacctggtwctgagactagaagtacagggatatcaagagaatgctactgagccagctcattcccaggcaaaggcttattatgtttcattcttcagcaccagcacaaaggctggaatatcagtggagataaacccaaaggtaggagagtcccaatcagggggaagagggaaggagtggggagccctatggttcctgacatgctttgctccctgatgaggtaatagaaagctgaagcagtatatagctgatataagaagattcaatgtagatagaaagaatatcttaaactaatgtctggataaaactatattaaattaagtattgtttgacaacagctaagaattaatgagaaaagtccttaaatatctctctmtmtatattttttgagtgagggtatcactctgtcatccagactggagtgcagtggtgtgatctcagtgcactgaagccttgacctccagagctcaagcagtcttcccacctcagcctcccgagtaactgggaccacaggtgtgcacttctgtgcccagctaatttttgtttacctttttgtagggatagtgtctcatggtgttgcccaaactggtcttgaactcctgagctcaagtgattttccttcttcagcctcccaaagtgctgggattatagatatgagccactgtgcctggccaagtatttacatttaaagaaatctcactttaaaagtgtttctgtgtaagtgtagagcttagaattgtgaaggctatatttatgtttgtctatttcaataaataatttatctaaagatgaatcaacagctcacttacctttttatttcagtaaactgaaaataagaagccacaagctctcaaagtacctaagacaaaatacactatttcttgagggctgatctataatcctgagtctataaaatcatagaagaagccactgggtttttaatgttaggaaactgattgggaaacatgttaagtattgatgtgtaggaaagactgaggtgtttgatgacagatgaaagtgaagaaaggctggtgaagcaggagatggaagggcacagtctggggactgtgtgtgtgtgtgtgcatgtatgtgtgtacacacgtgcgcatgtaggtggatgtcttaaaccacagcacaacctgactagaagtgtatgttgttgtagaagtaataactaggcaatgaatggtttcaaaaacatgttagaaatttaagtttccttttgaggtaatattccatagagattctaaaagaggttgctcataaatcaaattgtgaggagctccaacttaattataagaaaaaaataacacagttaaaattacccttaaagtaattagcataatttttttgttttgttgttatttaaataaagaacagaactgttgttgccctgagggaaaaatggataacaggcagtttgctcatgtggcttatactttatgtatgtgtgcatctattgtaatagtaacagataatgtcttctaatagctcatggaagaaattagtttcttttcgagcaaaatggtagccttgtggaagctgacaaaagtcatattataatgatttttggctcaataaagtaatgatagcttggaaaaagtaaaggagtacggcagcagaagaaagatractgtaacaaaacaaattatttgaacaaaagataactgtttctttaattggattctcatggaatattggtttaaaatatgctgaccaaaggcagtatctggaagacaggaacttaggatttctgaatcatagttctcctagcttggattgaattcaattcaacaaacttttgttgagcatctactctggagccaggtggcctgagtgtggttcttggttctactattctacctctctatcagtttcctcatctataaaacagagatataatagtagtctttatcttctgtgatttttttttttaggataaacagaattttaatgtatgtaaagtacttagaacactgtttgccacttttgcacacacagaaagtcaactgaattagagaccggaaactgaaaggtgcttatactgtcttagtgggagagacagataagaaacccaacaatttcagtagtattttctgataataccaataacatgtttatcaaaaggttgctatgggaacccaggaattgaagaaaaaacgaccttagggggatagttttctggaataaaattcaaaaaaggctttcaataggaaaaaaaaaatcccccaaaagctcaggaaacaaaaagtagacaaagtgagaggctggaacacattcatttgtagctttttgagcttccttccttgctggacctaacactacatctggtcaccttttagatacttggtaaaaacacgatagagatcattttaagttctgatactattttcatgtgtactctcagtcacagcatctagttgagactaatggaattagaataaccagaatagcaaactactattccaaagtgtagtgctctgtgctgttagacaaaatattgacttctgggttgagttagaacaccacgaaggagcagcacttttatgtcatggcccttcttttctactctctgtcaatttgaatgaagcagaagagaggcaagtattatccagttagaaataaaagagagggccgggcacggtggttcatgtctgcaatcccagcacgttgggaggccgaggcaggtggatcacttaagcttaggaatgcgagaccagcctgggcaatatgatgaaacaccatcactacaaaaaaatacaaaaattagccaaacatggtggtatgtgcctgtggtccagctactcgggaggctgctgtgggaggatcacttgagcctggaagggggargttgcagtaatctgagatgactcccctgcactccaatgtgtgtgacagagtgagaccctatctcactaaataaataaatggatgaatgagagaaagacattttaaaccaatatrttaagaatcacactttaggataaccttgatattgtaataatttatgattctctaacctgtgaaaattgtaaattgttaagcaataaagagaaaatacacttgtggatatgcagaaatgtgagtttctcagtgcatgggaagcattgagagaaggaaggtgtccatccagtctgtggtcccctggtcgtccctcgcctcccctatgtatcttgtcttgcttaggttttgacctttgtcttcatgttatcctgcattgctatacaacaattggggcatcttgtggttgaagttttaaggtaaaatraaaccatggttactccttgctgtttcattggctggccctgcagttcttcatgcttactagcycccttcctgccattgctactacaaaagccctccagacctcctttggtgggaggagacatgagaatgttttttkatctcactgacatcctactgaaatcagggaaagacagggcagtgtaaagctttcagctcattctaacctggcagacttcttcaccattgcagctgtatgctgtctacccaacactggcttacagaatccaaaatggctctcccagagggcttcagaagctgggcagaagctcctaatgtttgtggagacacccccttagtctttctgaatgttttaccatcttaccaccccatcttctgtccagccccatgctgacacacacttgtacacacttgcacacacacatacacacatacatagacaaactcacacattcccccacccctctcccccaacatacagacacaccttcaagggcccagacaatgtttaatctctagttagacactttggtccttatttcatcctagaaggcaatcaaacttatatttcttttctttgagccagggaaactgctttaatattctccttttgccatatctatgagtaactttcatataagctctcaattctacagttctgcatggtccaagcaaagtccttttggaccatcaaaacaaaaccgtttctctctcaagctcttagagaatgtgggttgcaaaacaattgcttctgcaaagctaatttttaaattgctatttggaaaattataactgaacaataatgcctttgtccttggctgtatctgtctgtctctcaaagccaaagctttcagctttgctgggtaaagcaacaagattagtaagaataaaaataaatcacataatatttcaaaaatattatcctgttaaatcttattasctagacctgagttatttcacacaagaagaatactcaatcagctacatccttaaggttgtcataacaaatcaggctgatttccacacatatttataaccggaattattagtttttcaaagatatgttacaggtgagctaacattagatgtagaagggaaacttttgatcaaagtttaaattctgattcctcttgttcacttggatgtctttacgattcatttaaactttccaaaatcttatttctaaaacaggcataacaattcactatgacaatgcagcatattgtctgtacttttggatgctttctggaaggttgtcagcagccaactaaattcattattagagacttacagtgaagggaaatggttcttgaggtgacccctgttcagtccagaaatagcagctctttatttaggtaattaccattgtgaattgctgctaatggccacgttagtggaagtctatgttgtgatgaggaccactttaacattggggtggttttgattctttctgctacttaacattcagaatgatccatagctgaagcttagttactattaaaaatctacagtgttttgccagtgggaattccaattattattgcctggtaattaaaagacctgcttgcctcagagtttttgaaagaacaaaataatacatgtgattgtttcaaacttcaactctatttgaatgttaggtggttgttattaatttttactaactctcttactgtactctttttctcccttatctagttttcctgctctcttttcaatgctttgggaaattcatcttcataaagcttgatttttaattgaagcaaatttttctcagagtcagcaccacagtgtccaaggtcatctgttgtcttagcatcttttccactgtttaatctgtgtcttaaggcttctttggttctttttggatctgtgattgtttctgttttctgaacatgggatatagttccagatacactgcttttttatactgaactacattctgcgttgcttggttttgttttactttgcttttctctagtattttttgagcttagggtttatttttatcatttataaattggtttgraaaaagattaattcactcagtgttcaacatttgaatcaagtgacaattatgtgcaaaatacagtggtattgctgggatatggtatgagcccagaatgcccaggcttctggcttgactacaggatcagtggtgctgtcattcaccagggctgggactgctggaggtagagctgaagtggaagggagagttggggcagaatgagtggatgatggacaattgctgttagctttgcatgtgggaaagtttaaggtatccagtggctggtgtggtaccttagagaggctctcactccaagtggcagatctaggtatcattagtataaatacagtaattgaagccaagggagtgaatgaaagagaatggagatgaattctctgttgaatgatcaccagacttgccatgtttttctatagatagataccctggttggaagtttgtgtgtgtgtgtgtatgtgtgtgtgtgtgtgtgtgtgtgtatgtgtattgtgtgtgtgcatcccagaatagccatagtggtgtggaggtgtgtatgtcttcagtgtatttggtaggcttcctggaaactacagttttaaaaatgattgacaaccataggctggaacttcttaaccatgttaacatgaatttatagtttgtttattgtggggctgttctgtgcattgtaggatgtttagcagcattcctgatttctacctactagatgctaataagttcctcccacccaatcctcatccccagttgtggygaccaaaaatgtctttaagcattgctaaatgttccttgggctagataatgccacctgaataagttcttctctgaatttatttacagcattttgggaggagccacattaacttttatgttccagaatgcttgaaaaacacattcatgtctgcagttatcctgactgatatttaggaagcagtttactcctccatcctggaggatcaattgagtaattttaccattaaaaaaaaaatcatttgctgcacataaaagtacagatagctgctagatgcaaattaaattttgttttactttatatgtgtatgatatataaatgaaaaggggtgaccaggacatgttgtactccaaatagtgaaatagcctgtagttatgactcagtcatttcaaaggaattgctgtcacttctttatgtgtcaaatacattttaaggcagaccatcccaaagagtactcttggggtggaggtaagagggtggagtccaagtgcggtgaacatgaattttgtaatagtgatttgaatgtaaaaagttttaaaagagctagtgcttaatatttttaaacttcatttataaattccttaaagcaaaagaatataaaagtaacttaattacctgccatggaagctaaattaacttacaccttgaaaacctcctcttaaaataactcagattttaaagagtcatttgtaaggtaagttgtggcattgttgtaagcacctgcctgtatgtgtgttgctctgaaataatgctattatttattctattatagaatgtagattctgtgagggraagggttttgcccattttcttcacttttctttctccacctcccacacttccttcatgttacagtacacagtggtgtagagtgtgggctgggttgcagcctcagagagtagttagtatcctgttttagttggctctccttcttctctgacctctgccggcctccccaacagccactgccacyacctcacagccaatattcttgatattmtggttgaggagataactgaagcctaggagtttagatcagggtggtatcacttctcacagatgaatctttacttctggcatttactcctaactctcaaaaaattgtggtattaaatattttatatgactcctagaattgtggctgtaaagtcccagcctctgtctcaatcttctgtcaaatgaaggaagaagaaaaagatgaattctagcttttgcaacatgtattcagtccacgctcagaggccaattcctaccttcccaaaccgtgatcacagcccttgattgacagaaatgggagggaaaagggagagggagagaagagaagaggtttttcatcttgaagacaggaagagtcatatctggagagctgaggaaggtgggaggcctcctctgtgtacttctgttgtcacttgattggaatgactaaggacattttgaaaccagaaactgcattttatcactgaatgcagaattgggtttaggatcatccaggcttatacaacatagggggaagatggagtgactatcctgtggtaagaatgaatccatcttatragagtccatggyacagtggatatacagcatgcttatctaagcttaattactggttccatgtatgtacttcggcaagtcacttaacctctctagtcctaaccccacatctgtgaagtccacttagggttatgaagatttaatgtaattatgatataaagtgcttagtagttatagaagcaattgctatggtttaaatggtgaataaacagattgtttattggctcaggaattatgtgataactatttaagaattgtacttctggttgtcccgggagattaggattcttgtttggcttcactactgactagatagtattaatagttaagtcatttaactttgtagaccctggtttccttttattcacaactgttgaagttgaggatctttcatttggtaagcttgggaattctattttgttttgctgtttaaaaacctaggcctcttgttgttaacaatacctctattaactaatttgagttctgactcatctgctagatctaaatagccgtgggaatgtgaagcttttcacaaataatgctatgatttttcagataagtttttgctctccatgcaaatggagcaaattacttaattgacattttacaattaggtattaaagcatcctgttcaaggttggaggacagtataaacttatttaaaatgtctagtgarcacagtctgtcacagggatatgggaaaaaggcaaaattgtattaagatattatttgtaagcaagtgctcttcatttccaagcagtctgtccctgaagggggtgtaaatcatgtgtctgttctgtgcttagaattcatcccttctgccatatgtttattgtataaaccaagaagatcatgtattatcaagagacaacttctactcccggcctaaactttcaaatattattcatactctgttctcataaaaaattattcttagggtctgaaagaccatcattttcttttaggtatttctgtttgtgtatggtatttgcagcaaccaacatcaacagctggtttgttctctcatttttcaaggtaatggtagggatttaagttattaagaatcaaatctaacacacaaaaatactttgaacatgagctgtgtacaaattttttattgagttattaacctattggacattgctgctgctgtggggactttatcacatacatttaaaaactaatataaacaaatggagaatatgagttgacacagaagaaaggctcaattttatgccaaagtaatagctagcactatagcatgcttactgtaggcattacgttragagctttgtgtgcattatttcatttaagcatcccaactttactacttggttgggtgttattacttcatcatttttataggcgaagaagctgtctcagacaggttaagtaagttgcccatgttcacacaactagtgagcagaagtgctaggggttgaatccaagccacctgattgcaaagtctatgctgaagttgcattttaaagtaacagaaatttccttcatacaacactggacttatttttttctatcaaatgatgtggcaaattgagagatttctggagaaattcaggcccaaacaatgttatcgctcagatcattcagatcattttcaacattagcatttaatgaataagactgtgtcttgaaccaaacatatttataaaagaattagaggaaggtaacttaattctccattcactggtgtcttagttgtaaaaccacattttgwcaaggttattggtcataagttattttaatagcttttccaaacttaattttctgaagttaataaaatgctgagaaaaacttagattatgtttaaaagcattgagtgaactaaaacctaagtaaagctatttactttgcatacatatggccaccatctaagatggttacttatccttgaaaggataatgtttaaaataatatttaaaataatctaaacctaatttcttaacattgaaatttttacaaagtatagttatgtataaatctgatactatcttactacaagagatactaaatgagtaacataaatattaagcataaaagatttaattggactgttacaacctactctcacacagtttaaacaaaagtcagttaaataggttgtttgtaaagttctgtatagtctagatttctttcttcttccttctctttcttcaccccctcctcctctcagcatcataatgattatcatcatccccatcaccactgttatcataatcatcatggctatcttttacattgttttcctcacaacatctgcatcagtaatttaattgtaagcaacagaaattaaggagcagtttatttagaaagatatcttgtagtttttagtttgaggacaacctgaagaatgaggccttgtagagctgtgccaagacaggctgctaggcttaagatggggaacagatgtcagcagatattcatcacttagggctaaggtcagttggttgagctttggggcagagagaccagtctrgtcctgtaacaccagcgtgccatgcagaggtaaatttttgtgtgtgcaaagacctacaaacatctgggaagtaccttagaagaggaggaaacagcagatctagagaggaaggttgcaggaagcagtagatggtcttttcaggtttcaccatttaggcaaatgagtttttggaccttgtgcacacatgctgtttaatcatgcgtcgggctttctggagagagttttatttataattcttgggctatgtatccattccttggtcaagggaatgtggtactctttgattgactctttgattgataagataacattttatcttactaggaragcataaacttccaaaggaaaaattacgtaaaggagaagacatggatgatagggaaaaaagcaacatatcatgtcatatcactttaccatgcatagaaatcataaataaaaatatttttcctttgatatagtagtcacaggagatcttttgccccccaaagtcatagctatatttatagtgtttttctgaatattatatagttttttaatgaatcttggtaaaagaagattttttaaccataacttgtttttaatcctataggagaggataataagttttagcttttataggccactaatttttttcatggcttttgtattttaaataagttattattaaaatagaaattaaaaaaatctacagaacttgaattaagttaattaattaagcarcatttcataataaattctgtgctgaaataattatgatcattactttattacaaaataactatctagaatgttgtatcagtattagtgtttatgttttatcgaggcatgtgcaatgtgcctcaggtgtcatcaaggatgggcatcgaatcactgtttcccttttcataatcaactcccaaaaggtgaaaatttcccctctggcttcctagtatcytaatatattattaatttatttactttattattttattattatttactttatttctattttatcctgattgtatctcttaaggtacatattcttcttttttcacatgtcatagttttttaataagattgtttttgagaatttaaatgttttccctctaaattctatattatgaagtgtgattgtaatgtgagtgatttttaaagttgtctgtacactaatttttaaagataattccagcagcctgggtgcgatggctcatgcctgtaatcctagcactttgagaggccgaagcaggaggattgcttgagccctggggttcaagaccagcccaggcaacatagtgagaccccatctctacaaaaataaaaataaaaaaattaaccaggttgatgaagtccacctttggtcccatctactctgtaggttgaggctggaaaattacttgagcccaggagttcgaggttacaatgagctgtgttcacaccactgcactccaggcagactgacagagtaaaatcctgtctcttaaaaaaacacaacacaataaaacaaaaccaaaaactacaagacaaagaaggctaaggaatgccakaaatccccagaaactgagagaatcatagatgatttccctctcagagtctctgataaggaaacaactctgttgacagcttgattttggacttttggcctcctgaactgtgagagaacacatttctgttatcttcagccagatagacagacagacagacagacagataaaattatctctctgtttgtaacaaaaagatcattccccctcaaattccccaaagtgtgtgaaacaacagcttcattgttagaacaatgctttctttgggtgttttgaagaggagtgttcattgtttaaaatgagtctgattacattgtcaccacatgttatatctgctttttctatatactttagaaaatatcttctggattgtatactccttgaagacagagctgaagtcttagttgtattggttttataccttattgtacttttgctaacagtgcattgcacctccataaactgtaatatggaaaagagataagtaccataattatttatgaggactgtaatatacagattgctgttaatattttcaaaacctattagatgtaggaatgtttctactgtttttcaaaaatgagtcatcaatgaaagacttttcataattcattcctttgtttctattgatagtggcttctatttttctccgtttaagaccattttgatattaaattctcaaatacttccatttacaaaaaataaaaggacaaaaattcatcaacacctgtgaaaagaagggaaaaaaaagaaaaaaattcggatcaccgctaacagctgattactaaggaacctgctcttaccgaacagcatgcagtgggagaaactaatgtggagaaaataatcagttttccttgttwtagggatcatacaaccagaaggattttaccactgtcttacaacatacagggatgcaagccatggatttgggtccatgtgtttagagaacaatggaaatttagtttcccaaattggaatttcctctggactatatcttagcctcctgagcataaagaatatacctaatataaaatgtgtttaatgtttcttattttgttactagagaaaatatgaaggacataaagatgtcagatgtactatcctagtcactaaagttctttttgaacaactgataagtcaaaaagccagcagtagaaatttgaytactggttcctggtggcctgactgtaccattagcgaagtgatttgtgccctgaggctatttacctttggttatttccccccaaaggctgaaagttctacaatatgcttgtctctgaattgagaaactgttcatttctctttggatcgtcaaagtagttgcaaataataaacttaagtcaataaaatgcagagttagaaagaaaatgatccatgttatttaacttcctctcttaatgtcrcatttatatgtattggcatgtttctttgtatatacacagtaatgcatcacttaacgacaggagtacattctgagaaacatgttgttaggcaattttgttgtgcaaatattacagagtgtacttacatgaatctagaacctagatagcctactatacacctaggctatatggtatagcctactgctcctagactataaacctgtgcggcatgttgctgtactgaatattgtaggcagttgtaacacaatggtaagtatttgtgtatcaaaacatatctaaacatagaaaaggtacagtcaaaatacggtttataatcttatgaggctactatggtacatgtggtccactgttgaccaaaatttagttatgggcatgactgtatatacacacacatatataaagttgtttgactaaggaaaatatccaaattcataaaatcatccatttttataaagctttttttatactttcattttttatttggaaagttaacagtctcaggtagttcttctttggttcagttgcatagcacttctctctgtgctggtgaaatctagtaactccttattaggctaagctaaatatactctggttgacatyttatgttggcttagctgtttagtcaggaggtataattgttaataatatttagccataataaatgaagttgtctcacagtatgtattttaaaaaatggcaacatatggttcaaaacagagactcctaattagacaattattgagcaacaggaaaggatgttttcaaatttgtatacttatggttgtactctaaaatctagtagtttcctgatgcagttttatagttttctatcattagttacacataccatatccacattattaagaataaatttgctcactggagttacagcttctttaatattatttatgtgagacttctttaaaaagggaagaaataataatgtttagcctttcaacaagttagtctattgagtagctgctatgcactgatgccctgaagcacagcagtgaaaaaacagtctgtcctgtcatagggcttctagtctgatattgggctgattcaccacttttggtttaaaatcctagtttctcttgtctttaatatctgtctgtctytcttcatctttctttttctgtgaatacacacatgctatgtgtgtatatgtatctatatacacacacacacacamttatattgtgtatgtgtatatatacatatatttttaattaaagatatataattcatatatattccttaaagatacatatatatatatawgaatatatattctaataaataatgtaacagtataagtatcttgtttgggataatacatattatgtgttaggcttcttcagagagacagaatcaaaaggagatagatagatgagaggggatttattaaggggttcgttttatgtgcttakcgaggctgagaagtcctgcracaggctgtctgtaagctagagattctgggatgctggtagagaggctcagactaagtctaaaggcctcagaaccggagaagacaatagcgttactctgagaacccagggcgagggagtagggaggcggttctggtgtaagtcccggagtccaaagggctggagcctagagttgttgcccaaggattggagaggaaggatatatcccagcccagcaaatagacgggcacatttaccttttctccttttttccttcggactcccagcagattggatggtgcctgactgcaataaggacagatcttcaagttaacacctcaacttaactatttgacacctcaaattaaccatcacaacatatatatatatatttattataaaaatctataaatcaggacatgaattgtttatatataagaataatacatagtttaagaattttaattctgcctttaaatacgctgtactatgtatcctcagtttcccacttaatgttctggttctgtattatgtctgccatattaatttttatcatagaattttgcttctgtgttgtttaaaacaaaacaaaacacagtgattgacaaggcactgtttctgctgaaaagttcagaagcattcaaagatcactgacaggttctgttttcacctgttcctcatcagcttttcatggttcaggtgcctgaggagaaacggtcatcaagctgagtcagagattcacattttcaggggtttgaaggggcaatgggttgagacactcccctttctgtttagaaggtaccagaggaaatattcaacaaaattttgttattcttccttaaaaagcatcaaccttataaacatcttttcatcactggyctgtagttctgttgaataaaatgttctaaagcagcaaacactgggtctgatgcattgggattaaaggtaaggatcaggggagcagcccaagggggcaggatgcccagatggctctgaggctcccccaggcaccgggagagtgagtacctgccttttcccagccccaggttgctgatgtgggggctagtatctaagcagtgatcctgatgaggggagtagacaatgcaaggtgtgtacatgtattccttgatgtattatttgatgagagttagtaaaaaaaaaaaaagcatccattttagcagcactcatgcattctatcactgatgctcaagttaacaacatgaagacataaattatagttttcacctttacactataactcttrgggttataattttcttccagactcccccccagttctttctttcaagctgtagttagaatgtaggtcttatgcttcaagttactgtttgctactttatttgcaaatgttttttcctcaatatgaggccattgctgtaagatgtcctggcrtggggagtggtatcatattgttgtttctaaaagtggtcctgaaacagttcagtattgaaggcagtgtagatatacttaatattaatctcccyacttgattttgttaaaaaacctgacctttgacattttctagattagatattggactctttgatggttgcagcttattgagaatttggagatttgtcttgaatgcctttcttcagccattcctccctccccactgtcttgctcactgatcagcagcttgctgctgctccaggccagctgcaatattatggtttcagtgtcactgatgcagtcagttgtgttccgatttcagaattacggttggcagtcccagggtaaagtgatacgctttggcatcataaagtwgtaggaccggggagcaataacattgaaagctatgtcaagattccaccctcatggaggtttcctggttacatttgaggctatggtttaaaatacatgaacttcacatagtataggtaaaatgtgtgaaaagggtgcatttataaatacaaccacacatatttataggtcatacaattttatagtagatgtgagaaatggtcatttttctttgagacagatttataaatgatttcttaagttatttgggtctccaggtagccaaaagaataatgataccctaacatgtttcttttaatttattggaaataacgatgacattaatcatcatcagaactaaaggaatactgtaaagtagattcaaaaacaccaatttatatgcttaataaaaattaatttatgatgagtaaagccaaaaacccaattctgaattttatttttgaatgtagttaagatgcaccaagtgaaggtggagatgtaggtaacctctgggaccatgacagtagtgatgatgaggagataaatatccacaactccaaccccacaccatgactctatgaaaagaacttcctatcttatcctcatcatttaggtctttggattttccagcccctattttgtattggtcctgaattaaacctggttactttcatggtatcacctttattttcttcctttgctttaaaacattggttgtggcttttttacttcctcttcatacctgttgatatactggttctagacaccactctcaccgctagttgcctggcccagctgccaatactgatggccaaaataagcaatttagtaaaaactggtggtaatggtgggtgtgtgtgtgtgkgkggggtaataaaatacaatcttaccatttatcttttatgtaatgttttgagaaaactgtattttgggtaacttactaaaacttcttttagtcagtaaaactgcatctcatccattgcggatgttcttggtacaagatttctcctatgagggactacaaattattgggtctcttgaaactggaaacagactctcactcttccagtagtatataaacacactggagggctcctggtaagggccctaggagtgcttcagaagtacggtacatcaccaagtacaatatggggaagagcttcagagccatagaatcctttttcctgcatatttaaaattccaaatgccataattacccatttatgatgtcattttggaacatatagcaagactactgaatgcttaaatttacacattatcttgactagttcattgtttttctgggttttagaaacacgtggtgaagatatggctcaaatttcttttgaaccactgggtctgctttgctaaatgtaactttacaacaaaatggatgtttatactggtaaatatccacaagatatttgggaaggccggaatggaagtctgcctgattcggtgtataattttgtgggcaaagataacataacagaaagtrcatcttgatatttggaaaaaaaagatcattttgccaaagatgtttccttaaagtataggttgcaaactcttggacagaatctggcctggggagacatgttttgcttggctttcatagtattcaaaaagaataaaaaggaaatgagtttggccccctaagtcagagactgtgttctctggttgtccacaccaccttccactgcttattaccttagttattcccattacttcttgaggtcatgagatatttgtttcgtgactcttgctaaatgaaagctctttgcagtctgtgatttgtgtacctcatcctttaagttgttgtcacactgggaagatgaacctccttttcttcctttttctttttattcttggcttcttttccaattcgggcaatagcaggcctcaagtggactttgggaaaggacaaatggaaggataggaggaaagcacgtccatgctctccagcagtggtccttggctgtcagaagggatggagacaaccaggggaaagcatcctcactgccagtctgtggccaggggaggagggggaaagaaaacttgttactcaacttgccttcctgtctgcttgcttcttgtccctgtatttttcagacatttgcagctgaggccaatttatccctactcattcactcagcaaatagttttgaggtctgctgaatgtggagcatcataccctgagagtggtaggcagtaggggaagataccacgagaatacacgaatccaccactatcatgggtcttcatttcacgagtgtggttttagcttacttatgagactttcacgtttcatctgtatcctttcttacccagccttattatctccctagaattattattcttatttcttaaaggttagctcttcggttgagagtacacagtggttgcttaacactttcttctggatgttaagyagattattcttagagacctgcttttcttttgagtgatcaggataattttcagcattttttttcagtaggctctattagctttagtctatgttttgcttcctttactaatctttgaatagggcagtatcagtttgtacaggctcatttgcccataaccagaaggtggggttcgctttgattctgctctcaatttgtttgctgtgggaatctcctcaggtttccacccaaagggtagagcgtgcagttcccatcttgatctctggtgtagaagctctgctgtacaggtaaggtcttctcctgtgctgccagctttccacttgtttttctgccactgagctagggtcacacactgaagggcctgcagagattagacagatgaaacaaaattagtgaagcagtatgcaacctatggtagctgtggaagggatttaaaggcagtatttctaaagtgcttygtccttttaagtggartttgcccatgaccaaatatggtatttgggtatttagtatgatgccctggctctaaaacagtgtttcttaaatttttctgaatttttttgaccgtggtaacacacaaacacacacgcacacacatatgactattttaaaccagaagtccagtattttacatcttttggagtcctctgagaatcaactctcagaactgagattccttatttcagggatttgaacatttagtagcttttggcaaatatattcccaaaatatttctcaaaagacttaatggcagtttacatggcctttggcaatgtaaggaagattttaactatattcctttgtcagaatttaaatttaaattactttgtgacattaatgggtgaaatgccactttgtccttacttttaaacttatttttaaaaattaatggagcaatagaacattttctttgtttagcagtggtattttctcttttataataactattttattcatagacaatatagcaaagtgatcaactttttatgatgaggtgagccaagcacaaaatcttcttggatcactccttaaaaaaataaaatactgtcattcacaacctaagctattgtaagtatatctcacttcttctggtataatagacagaaacatgttactgttatagtccttgtcaatgaaagcattgcagaataaagaattgtaaatcaaataggaatggattgttgatatttttgtgcattatgaggaaagaaaattactcagctctttccctgaacaaaaggatttaaacctagataaaaattgatttttaaatattaaattgtatttctggagaactattattattgtatcttctcactaatatcctattagcaataatgtaatttttgaccttaagatttttgtgcctctgttgtgccactgctctccattgggcgtgacagagcgagaccttgtctcaaaacaaacaaatgaataaaacacaataaatttctcctctgtattcctaccttctctattaagtaatcaatgaatatgttacggaaaaatagtactatttctgctaaagaattcttttcctgaatccatttgtcacattaataacttagatacataattaaaaccctcttatcttggttttaatgaaagcacgtaagttatatattttgtttttctctgtgccatcttagttatatacactamaaaagatatgtgtaatttttgctgaaatatcctttgagttttactccagcacttttttgagtcatacccaaaaacccaaaagattttaagccttgcccatgtattatgaactacacataatttttgcttcacaatgggccaaaaattcatttattccagcagaattggaccaagttttagaaaataggaccatttatccatggtgatacagaagtgtagcagtgtttatacttttgatcattccttagggaagcatgaccttggtagacaaccagctggcttcagggaaaattgtacccttgatacgtgcttaaaacagcagtgtaaaatgtaactggctgacaatcttggttttggttagggtcactttcttcttattcacggtatgctgggagtacaagggatgatgtcagtttctaccctttagaactsttatgatggccagacatagtatttccctctgttgtcaacacttgagaaaaatttgccaagtggggayttacgaattgaaaagcagaggatattagtaattgttgttttaagaagagaaaaattcatttttcaattttttttagaaaagaacaaaggagttgaaatttaaaattctagaaaaacttgtttctaacaaaaataaattgatttttaataccagtatcatgcctttccttgttacttatcacttaaaataatctttaaattaatttctttctttcttgggtatgctttgccctagggcattgtggcaacatatatagtacaaccctttagggacctgagttaactcgtctttgcttccccagtattagcacatgtggttcaagaaattgttttaatatgaactgatgacctttggaatttatacaacattaaaagttaattgagagattgtatgtaataaataagatgatgaaagtgatttcctggtttgtactaatataatgttcaaattttcttatttggcattatttatctcctaattactggcacaatatggagcaaagctatgaggctcagmggttttctagtgtgtaacttgtctcttttgtttctgtagcagtgaattataggtgctgttaccatgtataagttttctctaagattctggttagctgatttaccgttgmagatttttcaggagaggagtgctgtcatggataagcagtctggcagaggatgtgtgacattgatgatgtcaggaaaatttttccctgtgtctctttcagaatggaggatggtgaggaaaccagaacgtgatgctttttaagaaaagaggacatggtaaacaattgagatttgattatatatttttccatatggaatatcatattctgaaaagattttctttccaatcctcaaagggaccagtttaagaaattagatgtattaagcacctttgaaacactatatcaacaacaaaacataaaacagggggattaaaaaatggagaaaggactcaaatagacatttgtccaagaaagatatgccagtggccattaagcacctggaaattgcttaacaccactaattattagggaaatacaaatcacaatcacaatgagataccacctcgttcccattgggatggctactgtcaaaactacagaaaataagtgttggtacagatgtggagaaattgcatctcttgtgcactgttggtgggaatgtaaaatggtatagcctctgtggaaattactatgactatttctgaaaatattaaacaattatggcatgacccagcaattccacttctgggtatatatacaaaagaagtgaaagcagggactcaaacagatatttgtacacctatgctcattgcagcagtactcacagtagccagaaggtaaaaggaacttaagcatccattgatagatgaatgtataaacaaaatgtgatatatacatacagtgggatattactgtttcaaaggagggaaattttgacacatgatacagcatagatgaaccttgaaaacattatgcaacgtgaaataaggcagtcacaagatgacaaatattgtatgaacccatttatataaggttcctaaaccagtcagattcatagagacagaaagtagaatgacaccaagggcttggaagaagagggaatgaggagttattgtttaatggctacagagttttgctagggaagatagataaggactagagacggatggtcgtgatggttgtgtaataatgtgaatgtacttaatgccacagaactgtacaattaaaaatgattaaaaggggaaaacaaaactatctttatggaatttttcagtcagcttgtaattataacctgaatgctaaacttggaacaatataataggtattaacaccatggtaacaacacttgaatgaaggtaaactgctggaattaataaatgataaatatagtggaatgataatgacagtggtctttatggttggttcaggttctaaatttgccaaatactgtgcagtaactcttgaactctcacttttttatttattagaagagcataagcatatttacagtaaggctttagttatgtggtacttccaaatgcctcctgccattgccaactccaaagaaaaakcctggaagagccaggaagggtcttctaaggacagaaggtgtggaagatgcagcaccctgattgtgtctcaaaagtacaacttggcttygtagtagaccttttcaacagttttctaaaattctrtgacatggaagtcaacagtattaatagccaaatcacatgttacaatttcttttcttcatagaaacagattgagttgagatggagattaggaataagtttatgaaaatgtttttaaaaactgatggaaaagagtgaagatacaaaaacaacctgacaagcagctacttcaatctttgaaatattgttttggcagaaataattatgttgctacctacaggtggttatgctttgtttgatgtttaagctgacagggaaatgggscaaaaaacttttgaaagcatttatttactatttacccatgtttaactacatctctaataaatgtcctctagtccagtacaatacctttgccgccattgtgaccttttttcagtaggaacgggaagcttgtgttcagtactaactcagtgtttgtgtatttgttaccatcatgcatgtttaaaaaggtacacagaagcatgtattgtactgcgaactcgttattctaaaacaagtctggaataggaaaaaataggtggagagagttggcccagggcagtcctctattacaattagaacgattagagcttaggttataggacttctctttcagcatcctaataacattactggtcccctctaagatatgaaagacatcagagacttccagtcttgaagagttattcatgtaaattactgtgtctgtgtgctttttggggggatcaatataagcaacatttattgagcggccacatatacaatgtattaggtattctagttaggtacagaatatttgttagttctgaattccatgctcttgaatgatttggagtgctgaaggagatagtatagagaccaccaccaccccccgcccatgaaaaaaaattcctcaaaacaaagaaacaaagatacttaggtccttttctaagctgtttatcttttactaatatacaaagggcataatttgctcaatgtaatatctatttgccatgtgctgtgttcttcagtaggcattgtaagtaagagtttctgtcttcaaacttgtaatttagagtgaggttggaggattagacatatctatacagtgctgtgctatgaggtaaattgtgtgtcttcctaagagagagagttgaagcagagtgtgctgccttcaccttattactgtacttgattcttgcccttgtaacctggttttaggtttcatataatattttgcattgtcagctccctgaaattctactgggaaatggttacgagtacatagacaatctgacaagaaaaaggaggaaaggtaccatggggtttaatataagggaaagcccagctggttgcggggaccagggagaaagagttgtatgagatgggtcttgagggagggatagaatgtctgccagtgtggggaaggaagtctgaggtggaaaaccatcaatcacattcagagttgtgaggggactgacatgcctggagcatagagggactattagaaagcaagttggaaaggtaaggtcgattaactgacaggaacatgtttatctgaaatattttgaagtagctttcagaaagatgtccacttttaattttgcaaaagcagttttcttaggttcttcagtatttcagttctgattatacaaatcattgaggaaaaaatgaaccagtgaggatgtacaaaaatttcccaaatgttttatttctttgtcaacattatttgcttatttttcagctcttcatgtaattgtctttgtgctctgcttgttcccttttgtactttttccacacgggtgataaagccctgacaatttagtttttcttggtttacactttcctacaatactaaaatatgtgtaaccccctcactaacatctttgccaaaatggagttttcaagacattctctgaakctcaggactgtttttttgttgttgtttagcattggcatttctccagcggaatactagccagtggtccagtcatgtgtggaggaggtcatgctgattaacaaattactaggcatatattaatatgtttgctaacctgtgattaattgtgaggtttttctggctaacttgttacatgcacttggctacaaaacaagaaaacgtctcaaaaaatgtatctaattcagttgcgttgatatttgaagttcatcaaaattctatccttaatgattctaaattgtataaataatatgttcttgattaatgaagtatacgtgctatgattttaccattagttgtacttatatgtatgcattacatatatgaggttctcttgatttcagaaggaactgatacagaccagctttggtgtttcttttgctttttattagctttatattcggatagaaaatattaaaagggctataaattgcctatccaaaatattgcttttttttaaccttatcagcaggcagaatagttgctgtacttggtgtaggtaaggttcagttgtctgtaagaaaacaatcttgctatagattttgaggaagaaataaaataaaaaatayagatagatgataaatgttttgcttttcaaatgtcgatgttgtactttcaggaatatggaagctttatggtttgcctatctgtatcagttctcctagaataacaacttaacagttttcctggttggattgtgttaaaatctttaaaggctatattcactaaaacatatgtctaatgtttgggcagccaaagtctgtgcaatcattttaacagagtataacttagcagctctcttattaccacaaatatcttattgttaaaactacattaaaataccatcaatttggaacatgctacttcataattaaatcattctgggatgtgatcaagtatatacttctgaactaccttaaaaatggattgtgctaagaatgcaatagcataaataaattwaaagagaacatgcataataaagttaaacgatttgttttaatggagtttttatctagttaacttttcttgagtgtctacaatgttcagagcactgtgctagacattctgcattggttaatttatggtcattcataaagacgtttgggtagaaagaaaatgggtaatggggaaaagtcatagagtggccaaacmagaaacaagtttagrgttccagcagaacagggatgccttgatatatctgcctttggcaatgccgtgtgtacggagctgggattctgattgctcctattgtgatagtatgccactaatgctctgtyggacggaatgactaactgaagtggtgagaaaactgcgagcctttcaggactgtttttaatgcttttttgacaaatcttttagaacaaatcttttgttcctttgcagggaacaaagtccttttgttttatggtagaggagttattcagggtcctgatcttcaattggcttagctttccctgatgccatttgtcacccgtaactcattggtgctccatctgccatagcccggaatccaggaacagtactcggtggtaaaaagttggagaagtagatacttgcaaatccagccttacgtgatctttcctggctttgataggttcagctttcatcctgaaaagttgtttaaacacttttaatttgtttcaagtgatgaaatgaatttatctcagaagaaaatttaaaaactttaaaatttattttatttggaagaaaatattttttaaatgattattagcattgtatctacaattatttatcttaaaaaggtaaatggccatctccattgaaacatactgcattaatttttactaaggacatcaaaatgctaaatatggttaggggaatttcttgacagttacatattattttgcctagatatgtgaacattaaaagcctattaaaggggacaaaaatatgtactttaatcagaatatctaattaaaatagacagaatagaaagaaataacattctcttgttttgtagatttataatgatctcattttcactatactaacattgttaataatttccaaagtagtatagaaaagcagtcttcaggaattttatcaagttaaaattgtgaatgataaaaagcatataacaaatttctactatacctcacaaaatgattgaactgttttcagacagttcagtatatgctaattgagtgtgactgaaagtatcagtcttctaaatttttgcattttcagaattttgacataatacattttaatacttttagacattggcaatgatttttaagaagcaaaaatgaatcataaktgctttccaaattaagtgaagtaattgtaaaatactcagctcagagcctagcacatagcaatttttgtgacaatcattgtttatgattgtgattgttacttctgactcctctcttcttgctgcactatttttgttccatttgtttgtagacaagtggcaatttccacaaactcaaagtgtgattacttttattgtatttttcctctagttcttggtgttttagaaatttctggaattatttccatatctgtcagcctaactcctcatctgagagcacacaatttttgtaatgcacatacagaggtgttgaagaacttgaacttgtctgatgccagtagtttattgctcattttgtcaagtatctaacggctttgagggccaagtgatgagctggatatggtcctgacctggagcagatcacacagagtgggatgggaagactggctccctgcgttgttagtgtgcctgtttgctgctggagtttggatctcaggattcctttgtttctgaagctagtcctaagatatcacaaaaacattattatgttttttgagaagattataactacaaaataacatgtatttttaaatstttggcactaattcaagggctttccctttatttttatttattttagacttactagaatactttcagtgatctaaacatacataaagcaaaaagtaaaagtctctttcctacacttccttcactgcattgctcgggagaaactatttttgatattttggartgaaagtttctggactgtttatacatgttggctcgatgtacatgttgaaaagatamgttgcttggtgtgctcactgctgtggtggttgttttttacaaaatataagattatatcgtcctgcaacttactcattttaccagttaatttgtcatggctgtctttacatgtccttagtctttttcatggctgcataatactctactatgttgatgcatattggtctatttagtcattcctctgctgaggagtgctcagaagggctccaaattttatctgcttacaaatcatgttgaatcaacctcaaatgttggaagcttttgtccttggtcatctgtgcttgatttcaccatccactctgtggccatctgcataggctataggatacataggccacctgccctggttgcttgtttgctttcagggattattctaaaggttgtcatttgattttggataggcctgagctcagacaaaaaggaacaatttggttgtgtagggttttagggtaccagcatttttatagaagtttcttatttctacctgctcaaaatttaagatgcaccagatagcttggatggattttggctgtcatccttagatacttttatgttggccaagttctgagtttcagagctataagagtggtctgattcggaggttgcagtgagccgacatggtgccactgcactccagcctgagcaacagagtgagactccatctcaaaaaaaaaacaaaaaaagaatgatctgattgtcaaatctttttttttttcattgtttattcttaaagtcaggacatcttttagaaaacactttgaaaatacatatgttgttttgtgattgtggaatatttttgtctttttatatttttgtacaggtacattgaaatttaatttgtgactcttacaaatggcataattaatcacagtcatagaaagccaaatacaaatatcctaaggttagcgtttcactggggtttgagtggtattcattaaggtgttcataaaattttatgttctaaagtcactatttacctagtagatatggtaacttatttttgtcatggctactggcyatatctgagagtttaacatatgctagctgaaactgytgcatactttttaaattctgaactataattgcctagaatgaatgaaatcttttatttcaatagatatttttgcttgaaagatttcattttatatttatgaaatagtaacagattttattaaaggtgatgttaaattgttagaaatctaaagacaaaactgccatttctctttggtactatgataatttttcarcatattttaagcaataacctgctgttgattttaatagttttacctgccaacacagctggcatcctgctatgatatcattgctatacttttttatttaatattttacagagtgtatcatgcacagtgtggacaaccacattgaacaactattgagaatacgtactcattgtttgtgacattttacccttaaaatagagtgtggtcatcaaccagattttagagcacattaacgaaggaggtttacttttgcagggatttcttactgccaaatttttcctttgctatagctttcacayactgtttttgtgttttccttttccataaaacagtatttcttaaggccattgttatttatgtgcaaacaaatgaataaaaaaaactttcgctctttaacatgaagaaaaatattaacattgaaatatgaaatacagcaattcagtttataacacaaacgtatcttacawtaatgggtatgcatttttaattgcatatatggaattacaaatctcatttttcttttctactgggattacaaaccatattgaaaaaaattttacagttcaaaaatcagatgactgacctgtcgaaagcragttgtaacttattggcatacaattgaattactgatttttacactatttattgaatgtatataatttacttttattactgatttaaaactaccatcatatatataaaatagatattctttttaacatcaggtttttcttttctctttcagtctgtgatcaaaacagggcgactgctaatcagtcacgaggctcccttgacaggcggctttgcatcggaaatcagctctacagttcaggtagagtaatttttggaactgatttcaatgcttgtgcaattccacatgccaattccagaagaaaataaattacttatcacaatatgtgaaagcatacactttatggaaatgtagtgcatgctttcatatactgtgataagtaaattttttttcattttttattctgaccacactttctgtttgttagttaatgatctaattaattttctagaacagatatcttaaaatattgaaagctgaaaaattttttatgggaagaaagtttggaatgagwctactaaattaactttgcttgtatttgctacgttaacagaaagaaaaatctttttaatttgaatctgttcccattccctgtttatatgacttgaggttatggaattggttgattgtggaattgatcttagattttcacagcattcacgttctaaaaatgaatctctcaaaagtcaataatttaaatttaataagtaattttgaaaattatttattttagttattcaaattatgctatggtattggaaatgctttagaattgtttaaaaacctatgtttttttaaaaaaaatgctcattaagatgccacatatcaggaaaaaattttatacacctctttctggcaagttttacctaaaacctgtattcaaatttatatcatagacatatataagataatttaaggtagtttcattcttcctaatttttaaattgaaaattaagtagccatattttaaatggaaggtgcatgtcttttaaattcagaatatcttcgcagtttgcaaacactttacttctctttactggtgtgaagatgctttaattgttaaaatatatgaatagggaattcctttaagagtatatggcttactacattgttatagaattatgatatatggataatggtaagtttttatttttagatgtttaattagtaaacaatgatttttaccaatgaaatatcttaagtgctaattgcaaaattaaaatatttgtaaattagatgaacccaatttaaacataaatgttttaaaaactagatcaaagtaatccataattatagtcaaaaacgaaattatttttacaatttatatgtagtcactgatagtaagaaaagcaaatatttgagttttgtagatttattgttttcctagttactatatcaattaaaatttaaaatgtactgattattattatataacatgagtacctagtatttattgtgtattttatacattgagtagcataatacaaagattagggcaatcatttcaagccagaggcaaaactggaaaaagaaactggattttctgacttatagttaatatatagtctactaaaccatttgaaaggatagtgactgttgctaattgaaactttgacagccttgttgtgttttgttcactgcttattgatatctcaaaagtttcaattgcatataattaaaaaaggaaaacaagtagaacatagttggaattagatactataactcctcttgtgaagtttgctttctgtaagtgtgcttttaaagtttgatctctgtaagttattggtagactgcaatttaatacaacatttttttagattggaatrgaattagaaagataatctaatccagtgtctcttggtcttaaataatatgtggtcttatgttaatggaaaaatgtctctcaggccccaagaatacattagtgaatcctagtttgagaagtagtatattaagaattaaacatagtcactataactaacataaaatatcataaacataatatcaaaataagatcctgaaattatgtgataattgtcagttgcaaaaattgtcaatgagagtatcagaatataatcgtatttatataataatatgaagacaccaaaacaaagcatcttgtagcactctcagactcccaggaatgtgttcatagatcctcaggtgtccctagtctatattttgagaaatattgatctaaaccaactgcattctttttacagatgagtgtcatccagagtgtttgtgacttacccattttataaagacagtggaatatctgggattagacaggagtcttgaataaatgtaaagtgtgtgcacatgcactcttaattcaaaatcccctgccttccacgaggaagataatagaagttttggacccgttatacaatgttctgttgttcatggcaaaattattcaccagctaaccacagaatgacttgagacaatagtgtaatatttgatggaggaattatatttaatattttggataatttgagtttggatttattaatatgagaaatttgaaaggtacacagtgtttttgcttaattcagattttatttgcacaaatagaaagtatagaaaatgaattttagtaaaatttagtgagcatgatatccataaatgtttgcctgttatggcttttatctactgataaagaagattagaaaaaaaactagacacttgaaaaattttttttcattgataattttcccatataattttgagtaatctgagtaataaaatatacctttcagtaactctttcatgcagatattcaactatgcaatatcctgtattgagcttcctctctatggaaagccttgttccatattrtaagtgaaacctgtatcaaattaccagtgccttgggttgtttaaactgagatcacctaagtttgaggtacaactgctttcaccacttagcatgattcatatttctctatttcttttttggggtatattttttaaggttaaaaaagataaaacagggttaagatattgaaagccaactttctgggacagcagagaaaatgtacacggacaactctttcattgttatctgggaaaagatgttttaaatcgtggatgagaatgatgtataaatttgagtacttttgattaaaatatgaagttattgttggttcaacaaatgcaagttttatgtcaaaggaaatgaaaamaatgtttgctccacaggcgatttttgatagaagatatctggtagctttttaaaagctcatggttaatcctacaaaattgcttttaaaatattttaagagaatgagtattaatagtaaagttattgtttttaaatacattaaaatctgaaaacacctgaaaatatgaactatgctgttttattcaaaagtttaagttactacctatattaaaataaaaaatattgaagagaatacagcactatggagagtattcttttaagtttataaytggtatttttagatagaaaaattatgctatataaaattaaatatcaaataaaggaacatttttataagaagtggtattggcattactatttaaagcttattttagtatacagatcaaatatgaaagaaatgaatataagayggagtcataatttatttacaaaactctagtttatagcagatggctctttcatcgtgcaaggaattcagtgcccacatcttaggtttgtttcattcctgctacttttttttttataagcctatttattttaccattttacagaaatttattgttaacagtcttagtttgaaataatggtaaactcacagaagtgattagaagactattttatattgattagacataatttttaaacttatttatttaaagtttcttcataaaacatatatatagagagaaataaatgattacaaaaataaaaaacagtgcatctaatttacgaagtgctttatatttctattggatttaatttggaaattaactggaaggcagagcaagctgaggtctggtatatttggccccactctggggaagatttcttggtcagttatttaaagcttcactctctcttcttatcttacattcccatctgttctcactttagggtatgggaactttttcattcttttcttttacttgacacatactataacttaaaatgcttcttttagggagtcatgaattgtgcaccgtaatttgtggaaaagtgcaatgactatagagtttagataattcattgttctttttattgtgtattttaagcaaagattttattgtttcagaaaattatatgaatgaattttatttgatgcttgtatgcttcagctttatgtaaccccaggtttttttaagaaagcctttagtgtgtaaaagtgttaacctcatctattttaatatcacccaaattaatttatatattctagaatgtaatgttcaacatagctattatttatttaaatattaagaccaaatagtttatggtattttggctggtttaaatagagtaaatttttttaaggattgtaaatcagcctttattattaatttccaacacacctgcataatgaaaaaacaaatcctgagtctgataagagttgtgtgataattttttttaaagttattgtttatttctcctgctttggattcagtgcttaaaaagagtgccagaaattttagggatgtggttggcttaagatttgagttttttttttttttttttaaatcacatggaagcaataagtctgcaataaagagtccaattggagaggatggtaagtttccataccattgttacatcctttctgtgcggtctcttttcttagcataagaactcagaaactgtggataccaacatatattttttaagattatcagattctaatagttcaaaggatttttatagggcctatacaagtcattatgtaaaagaaaacttttaataactttcaagttaaaggaatttttgcttttttcagtgtttcatgttagaatagtttatggagaaggattttttcttataaacttattactactaaatttccaagcactttgtttaaagatatcaatctgaaaagaggggaaaagrtcctatagggtcttgaatttttaccattctggaaaacatgtttcattaaaattgccgtgctggtaaattgtcatcagagaaaactatcagattagtaatttgatgagtagtttactgcaattttataatctcagttaacaaaaaatttaccagtgatacaaaacctttcctaatagcaacagataaaacaatcaggagaagyatacttctgtactaaaagatggagccagagcatcagaaaaacagtttaatgtggagtgtttggatataggatggcattttaaaactgtagtttcttcctgaagcctgtttagtattctgtaaacagcttctgtgaccacagataggaaccaaagtctaaatcactctggggatatattgtggattgggctgcttcattactgtttgtagttaaatccatgttatactctgttggttcttctccttgccctaaccacacctggtctgcttccatgtcatcttctcctttgcttgtttagtttccacctccaaccctttccccattcttttttttgagagggagtctcgctctgtcgcccaggctggagtgcagtggcgcaatctcrgctcactgcaacctccgcctgccgggttcaagcaattccctgcctcagcctcctgagtagctgggattacaggcacctgccaccctgcccagctaatgtttgtatttttagtaggcacgaggtttcaccatcttggccaggctggtcttgaactcctgaccttgtgatccaccgacctcggcctcccaaagtgcctttccccattctttcctgggacgtctcaaccatttgcatggttactcttgaaaccttcaaatttgaaactttcaaggtttgacctgttgagctttagacccaaaattccaacattatgcttattttggtagagataaaacatttgtgtaataaaatgattatctggaaaaatttgaatgtgaaacaatgagaaaaggtaggcatatgcacatggttatttgctagtttatggaaatcagcttatataaaaatgaactctatttctcttcaactttttctggaccttttaaactgtctcctttttgtttgtttgtttgttttttgttttgttttgtttttttgagacagagtcttgctctggctccatcacccaggctggagtgcagtggtgcgatctcggctcactgcaacctctgcctcccgggttcaagtgattctcctgcctcagcctcccaagtagctgtaattacaggtacctgctgccacgcccatctaattttttgtatttctagtagagacaggggtttcaccatgttggtcaggctggtctcgaactcctgacctcaagtgatcctcctgcctcttccttccaaagtgctgggattacaggcgtgagccgccagacccatcctaaactgtctccttatctttgtctccagctgttcacctctcgtctaattactatgtattattttcttaaaacacacatcaaatttcgtccattgtctgtttgaaagcatccaatggatcctcattgggtctagcaaaaaaatctttatgtcggcattcaagatcctgatctactcaaaccagtcttccagtgttatttctcacatccctttttgactccagtatgcagatcacactggcctactggctatttcctgaatgataagtatttcttataaccatcctttattaagtattctggggatagccttaatatgggcatttcatccaagaattggtgtccttgttttagagacacttagagtttattagaagtcgatgataaacaggtagttatagtacatgttagaatggaatattcagagaactataggattataaaatacktgctcatttaacccatatgtggcagctaagttaactcatgaaggataagtatgaacttggtagtgaaggtaggtgggtatttcaggcagaatgaactatatgaataaggaattaggcaaaggatttgctatkgaaggaattaaagtggttttgtgtgtttaaagactagcatgtgaggctgtagcgtaaggtaagcgttgacaagtaggtaagaattagatcctgaagaatcttaaatattaaggaatttgtttttatgtggaggaaatagatatgacagagtaaagccagctcacatagatgtaacttccagttttctcatgtaatatatataaaatatactttatggagttcttggcaaatagaaagtagtaggagctgaaaatattactataattatttaaggcaaaagaatataagtgaagaattttaagcaggagattaatatagatttaaaagttagaaaaactcctaggtagttgtgtagaggrtacactggggaggagtgagagaggaagtgatggagaattgctaaaaagctagtcacagactgcaaaacaacattttggtcaacaatggaccacatagaagatgttggtcccatgagatcatagtggagcataaatagaaacctaataatatggtgcttgatgtgggcattgcagatcaagtatgggaaatgattgatatttaatgctgcttctgggatatttggttttccatgtgaaaaaatatgtatataaataaaaatatatatcatctaggtttgtgaaagtatagtctgtgatgtttgcacaaccacaaaattgcttaatgcgtttctcaaaatgtattcctgtccttgtgactcattactgtatgtgattaaactaggtgagatttgacggtcttctaaaccaaggacatgggagtaggttagagaaaggtgaatttttcagatagtaggagagagaatctgaatgaaagacttgctgactcacaggagtggggtggggattgaagtggatgagggagaggcagacagaagtcaagaataaagcatagcttggtttctaggttggatgatttttgaatagaggtgcagtttcactgagatggggaatatcattgaagaacaggtgtatgcgtgtgtgtgtgtgtgtgtgtgkataaggtaatgagtrcattttagatttgtatctgaaatggggatgaaaatgtgtttctggagctcaggagagaatctaaggtgtaggaaatgggtaaggattcattctcttatactgatatactggtggctgagttcatgggtatagatagggtcacataggaagagataatcttaagaagggaaagtttctgaagaagaagctgcctgggttgaagaagaagccacaccaacatttaagagaaagaaaggaagttatgaagcagagtgagagggagtggcttcagaaaaggaagggagtaggagagagccattacatgagacaagtgcagaagagtttgacaatagcatatatggccaagaatattaaatgcttccagaatttaagacagctaaagactaatggtcctaccttgcatgtagcaactggaagacactggtgactgatgaaaacagaagggtggccaggaagccagacaacatttagactggtgagtgagtaagtagtgaagacttgaaccgatgaatatagactaccatttcaagaaacttgactttcaaggaaaggagaggaatgaagtagttagagctaggtttgatctcttaatgctattcacttggcatagaatgccatttatttcctcaatttgcagtcctccctggcagcctgcctgtcttctccctctcctccctgcccctctccctgtcctcattctctcccttcccctccaaaccatctagcagtcggtttttaaacatctatcaaacctgacctcttttttccattttcctaataaactctaaatgaacttagaaaaaaaaaagaaaaccactaaatctaaaaggaaaaggtagaaaatagctwatattgggatgggcaagacatttttaatcagaaaattaaaaggcagcagactcaatcatactgttacagagaaatatatttgcataaaatggaaatttttgtatggcaaaaacaagcatgattttaaaaacaatgacaaatgagaatatgttgtaacacatgacagagaactaacgtgtactctgttaagcattcttaaatgtcaatacggaaattaatagggcctttatttaaagggtcagaaacagattagttttataactatagccagcaaacatgaaaaaatatgccacttactattgataaaatgctaattttaaaaatgtaatatcgtttgttacttataagagtgggactgcttaaaaatgaattttattttctgctgagatgatgtagaatgtgaatgtattaatagaaattgattcacgtttccaggatatcakattgagaatgtgtatcragactcttcaaagtgtagatttcctttgattcaagaattctaggaatcctcacttaggagttaaacacaaaaatatgtattcatctcagtgttgttcgttcgataggaaaatatcggacacattattaatgacaacaacaggaatatattttaataagttatgatttgtccacttgatgaatgttatggatttatcaaaatcattaaaagagtagttgataacattgtaatatttgcatgaataaaatagtaaatgaaaactcacctgtatgcaaacctacaggtactttacttgctcaatgttgtgaaaagaaaaaagaaaaaaactttatatatacatacatctaggcataggaaaagaaacttgcactataagtcttttattgatttgtattttctaattgtttcttcatttttatgtacatacatgtcacttttttaataattaaaagctttattatatgtagatgtttctctcacatgacatggttattcttttaaatcttcctagttgttttaaattaaaaaacccattttgcttataaagttgttttgcaaagatttcatattacttattttgacataattcctttatcatgtacatttgagttttgggatttaccattcatagtgatggtggttacttactcagaattgtcatgtgggatgattttaaaaccaatgccacctcaccgcataagatttggtttttctgcaggttagtgtctgtcttctacakgtatggcatattttgattcattgctcttattacagaagtgaaagcagcattgtattggggtattcagattatttaatttttctgtattaatcagtaatgatactgaaactgacattactagcatgtaattgatactaacattgggttcactgcttattttccatccctctttttggtattgaatttatcatgaattgtcatcattctttttgaagtctttctggatttaagccagtcagaaaaaagatcatatttcatctccctgagtaataagtgccccagtttctctcatgcaattcttggtatttctgtagtcataagtagtcccccttgaattcaaaggtgcattcataccaagctcctctactctttctctgttgtcaccccagtaagctaaggaagacatttatatttacatatttaccaatgaagtttcgtagactgaatggactattaattagtaaaatagattctctgaaggaaagcattactttatttaaaaagttaatggtgatttctatgacttggtccctttttgttgttttttaataccttaaaagttgtagtttccattcattgcattgatccttgaaaatatggctgtatcttcaaagaaaattatagtggatttaaaatattttcttatttggtatgaaatgattgtatttcagtatgtatattttaaaatgtacagccttatcttcaaaattttctaactacaataaggttatttaaaattttatacatgaaagacagcagataatgtatccataacctggctgattctcttggccaccttgtacaacattttaggcaaaaatgaagacacatattcaatttgccaagaaatgttagccatgttttgtcagcattgtattcacaatcagtaacaggatgggtctgcctcctggagacagaactaaatttctcattttgtcatgccctttgtaggcaataatgttggtgatgttgatagctcattttggtttggtaatttagggtaattaaacttacagatcaactcagtttgtgttttgttatgagggccattatctattttcatgaatgagttcacagctcactaaaatatagtcgagtttaaaatagacattaaaatagagattcactactgctgatgcattttctcctcaatttgaagttaaacacttgtgaaaattaagacaagttaaaatcagcacttactgcaaaaacaagaatttgaaaatgaaggttaaaagcagaaatcatctagttgataattgttttgatttttcaaatctatcaatattaatgtgagtctttaagatatctgaaaatttccatttgattggaaaatgttggatgtttgatcattttctttcaagttaacttaaagaagtgactttatttttgcttcttgattcatttgaagagacataacttttttgttttaatcctttagaggatcagataatgacatttgctgtttaagacagtttatatttcagatggcacaaagagtctatttgtctttatcaaaattattagctgaaaaggatataattcatgactgttctttaaaggggatctaaatatttatgtttttaaaaatgccttaaggtgactaacatttctaaacctatatttgtatcatccacatttgtaattgtgccattgcttaaaacaagtcctcattgtgtcctgtcttttgacaggattagtttgctctcttaattgtaacacattttcatttcttttctggattgatttaaattctgggcttcaaaaagcartagcataaaatagtcaccatgcctgtattattagctgctttcagaaccactcagacaatgttttctctgagatggcttgtatttttaagtgttgcatttttcttcttgttctgctagtcttttttctaatagcaatggttaactctaatttatattagcagttaaaaaaactgaaacttaatcttgccttttcagctcattactgaagaatctcctgcctctgcactctgacacaaaatttatrctttattttttaaccatgaacttttctgggcatagagttctacctaagtgtacatagctgaacaacttgagtgtattttgtgagtaatattccaacatcgcacaattctaaattttattraaaccagcttttctgtggcagtcccaatacacagttcaagtacattaaaataatgaagtactgcataaatgttgataaaatagtcttctaatatgatggaatgcctaattatgtattctgttatcaatttacctaataaattaaatgcagtttcaattttaataaaacccgtrtactttataaaaataggacctttactaacctatatctatactgagtcatgggagcmacagtagcatgggtaaatccttctggtagtaagcatggatactcatatctgttcagagaaccacagtatcttttctcctttctgcctgccctcttgctgctctttctgcctttaaaaaacaaacaaacaaacaactttccgggcagtgtcctccatgccagtcttgtgaacatgtggacctttgcagcaaaactataatattttttgtcaccatgggtaaactaagcattattttgggtagtttgtgcttatgaaggctttctccatcctagtagactaaaayagaagtatcctgtaatattagatgaaagtaagggaatgaggtttgatgtaggcawatctttttttcctcccttggggttgatcaaagatgatactcattaaaaatactatgaaattgcttaataccwttcgaaaagcatttgtaaagtggatcttctgtcagtataagggataagtgtgtctctgtgtgtgtgtgtatatgtgtgtgtgtagtaagagatgttgattctccctacattaacttttcaacctgaagaatatatgaattaactttttaaattgatacttttttaaacagtgtaattaaatgaggtgtgatatatgaattttctgcttatgctgttaattttctccaaggatatcatagctaactgtagctttactgttgctactagaagatatttgggcgatcagcacaatacataattaagaaagagattcttcaaatataaactaaggaaaaaaacaagtgggaattaggaaaaacatttaaaaacaatttctccttagagtaaacccaattttaatttttctttttagaacaaatgtcttattttgaaatgctggttaggctatttgaagagatttgctaartacttaaacattcatttgtatgacttttcttactacttgccttgttactcaaaattgggacaaaatattttgtttattgatgaagacacatttagttaataatataaagcagcattatctttaacatcaacttcacattatatgttaaaagatttctttagaaccagaggcttggctcactgactaccagctattgaattattttccttagggacaaactcttagccttaagttaatgtcttctgagagggtagaattccttattatacacatatggataattgctttgagttaayggggaggatagatgggcttctcaggtactggttcattgaaagttttttgcctttcaactatgaaaccagcagtacagcatttttaaattgataagtgtttcatagacagagtctgaagccctgtgttattaatgaaggttttcattagtaaaagtttatttttttgtgtcacagaagtagagtatgattacttatatttatctttttatgacatatacaaggcaagcatttaagggtgattttattacatttgcattgktgttcatcagtctttggtcatctgtctatcaagyagagctggcatctatattacaataattttctttcaaraagaaatgttcagaaatatacagtaagtgaccatagtttcagcttctatgtcasgccaaagggaggtgaactggtggggagtgagtagattagacccacttgttgttgatccaactgttaaaaacattgttctctttcccaccaagytcctaaattcttatttacttgcctaaacaggaagcttgcatagagtcagagagatcccaagctggtaatggaataatgatgaccatatactttgtcttctgtagtgggacaacagacataaagtgaggttgtttgatgtaaaccaggatgttcacttacatagttttcatgctacttaatgggaatatgtcagccaccatagtatgcaattaaaatttaagagattagtgataatggagttaggactrtatagcaatttttctaaatcaaatttaggcctcttaatgtctgagaactttaaaaagatcaagaayataaatgctattccttggttcagtgattttttttttttaatgtaatgttgatacaggatttttgctcttttagctcagctaggtccaggttcttgtctcccaaccaggaaaaattaggcgtgcagacaccagagagtgagtggaacagaatttattaagcaaaaggaaagttctcagcaaagakaygggtcctgtaaagcaggttcctggttgttcccttccagttttgaatacaagggcttttatataaaagcttgatggagctggattccctgtttgtataaggtgggaattcctggtggctccaccccattccccctggacgcatgtgggcacttagtctgctgagggcatgtttagacaagccccctgtgcacgttcccttatctgcacaaaacatgggtcagaggtttgcctgggacccttcccttactttctgcctaaagcaagctggttaactcctttcaatgtcaaagaaaaatttgaggtttcttygccagtagctactgcttcttgttcacttctataatttattcttagttagtgacaaactactcgagaatcattgaatgacttacaatttgttgtgttggaaattaaataatcctcagtagttcgataatatcaatgattcctaaataacttaaaagctttttttttccaaattgggtgttagtagttagtattacgcacaaaatgaagataaaatataattatatgatttagtatgccttttactttttagctgctcgagtaagtgaaaaaatgatcctttctattaataacaacttttaaagttttacaagcatggtgttttcaaataattgctaaaggggcaaattacactgttatttaatagtgaattaaggatctagggagaattgttaagcatttcattttattatttcagtaaacttcactttcattaaatcatattgttaaaggcctgaaattctataaaaatttgtttaatggcatactgacatgttgttattcatcaaccttagggtctacgtttttgaaaaatatgatgagaaaagcccatttggcaagatcaggatctcatagaaaacagggatttagaagcaaataaatatgacattaaatatacttgaaatgtatatttaaaataaggacatgacttcctaaagaaactggaataatgagtatttgccaactgtgtagatacccctcccctgagtgatcttctgttcataaaataatgctgcaatrtgtgattgcctaagccgactgtactttgtcttaaggtttttaaactaacttgtattataatwaaagttagtcatatatgtatatataaatatataccatatatatgtgtatttttttytcttaaatactgtgaaaatgcccagccttttcagatattactctgagagttaagggttgattttcattgcctggtctttgttcatgtgtggaatggctgagtaagtaacacatagyattgggaagcttaggggcagggatggaggggtagggagcattaatggttaagtgagcattttgtttaaggggacagarcatatctgtgtgtatataaatagatgtcacattttaaaattctagtaaacacagagctgttttctcaaaacatagatttgctaagccctcattgagggattattgaatggccaattcatgtatatctagaacttactcatatatttcctygctttttgtgaggaaagagtagttcttctaattgttctttttatggttctggtaaggcattttagacagtatggttgcatataaaatttcattgcagaatctaaaattcgagctaaaaatagccattttaaaattgattccatgagtactttacgggttatacatagtacattgttgaacttctcccttctttgaaatagtgagactgccaagtatatcaggagatgaagtgattatcaaactgcactgattaatagcaaaaagatcaaaggagacataaggttaagatggctgactagatgcagccaggaagtgcagctcccactgagagagaccaaattttagagtaaaccactgtaatctgggcagatcttcggagagaaaaygctcagattgggttgagaggcaatgttaaawtgaagggtgaagagtaaggaagctggcagccctgtgctgggtacctgaataccagggctagttcccagccccgaatggctcttgrgaaaggggtgaatgaggaactgagggaargctcactctcaccgccagcctctgggatcctagatcctagttacagaactcygtgtctcccmtggatgtgtgagctgrcaggggcatctccctggggagcaggcagagacaggccgttggacagcatggagcccaaaagttttcrtgcactggggagctccagcagagagcagccatagagctgctctgtggggagggctcttcatccctttctgggaggtgtggaccccagctgaccttcaagctaggagagagtgaaaccagcttccctgtgggactagagcacatctattctgcaaggcttcctgcctgctggccccacccagggtcacgcttagccaccctgtaggagtgagtgcacagcacagcccctgcagcacagcctgagtatgttgctctacctgagtactttcctagtgacttggaagcacattggatcctcccagtacagctggaatgccaacctaatccacaggctgtcccagtgcccccagggctgcttcatgcagcattttgggagtargtagccaagatctgtggccagcactcaagtcaggtagaagggggcaagatcttcaggttactgggctggggtgggaggggagcagggtatgcctacctccacagagttgatccagagatagtgaggcatatcttcctcctgcagcccctgatcaagaaggccccagagcctgaaacacctaacaaaagaaacatgggcacagcatcagtgactggaaggaggctcccccaaggcccaggagcagacctggtgagggggccatgtctctcccccgcccactgcggagcatgcctgggaacatgaggaagaacraaagagcctcatggtggggtattaacttacctaattaatggccattactcctaagcaccatctaatggattgcattgagactacagcaccaaaaatttatcccactactatatgctcctttgaaatccagcacaagaatttgttaccagaaagtggtcccaattcagaccccaagagagggtttttggatctcttgcaagaaagaattcaagatgagtccataaattgaaaaagcaagtttattaagaaagtaaaggaataaaagaataaaagaatggctactccatagacagagcagccccaagggctggtggttgcccatttttatagttatttcttgattatatgctaaacaagggatggattatttatgcctcccctttttagaacacataggggtaacttgttgacattgtatggcacttgtaaactgtcatggtgctggtgagagtgtagcagtcaggatgacctgaggtcactctcattgccatcttggttttggtgggtcttagccagcttctttactgcagcctgtataatcagcaaggtctttataatctgtaccttgtgccaacctcctatctcatcctgtgaattggaatgcctaaccgtctgggaatgcattccagtaggtctcagccttattttacccagcctttattcaagatggagttgctctggttcaaacgcctttgacatttcccccctcccttaaaagaacccttaatcttaagggttacagagggatgaagatcaatcttctgtaacttcttgatgctgaaaagaagcgatgacattcctccctaattgtcagggtgtcttgcattcagggtagagaggagctcagtcagaaatcatcggtatgtcaagggccatttataattcttgagttctgacagaatgtgatatctggaatattaataagtatttaagaaaacattcagtaagactattctgcattcctgcacaaagagtacaacagcaatatatttcacaatggtaaagcaagatcagcaaaattatcccaagtaaactaaataagaaggttttccatgaactcggcaactgctggaaccaagctgatatggggttactagctgattccactatgtgtccagaattagaatattgatctaatttctacattatccatcccttttgtttttttttctgagtagcagccagagatcactggttggttcacaggagtaagcagggttagtctaaattgtaggaaaaacctcaaaaayaactgatgagactagaatttaataacaagtgtaccacagttcttgaaacataatttttttcgtctcttcagttttatatttttactaaagacatagtggtaagaccaagttgttttattatacttggcctatttgtataaagtgcagcaagaataattatttttcacataagctgtttttaaattggctytgatggaactctgttccatgaaaggaatcttagataagacttcttaaaagctgagccctgccatgggtttgtaccctcaaggacctaggagttgggtaaattccyctccttttatggtctgaagataacttrgggctcctgggcctgtcatacagtgacattttgttacttaccacaggtcaggaaccctgtacaggaactgtgtagacaaggtatgaggccagttttcccaagggtcttttattggctctataagttaagtttgattcctcaaaggaaagcacaccatttcagttaaagccttggtgtattagtctattctcacactgctgataaagacatacctgatattgggtaatttataaaggaaaggggtttagttgactcacagttccacatggctggagagacctcacaatcatgatggaagagcaggggaggtcttacaaggcagcaagcaaaagagaacatgtgtagggaaactcctctttataaaaccatcagatcgcgtgagacttattcactgtcacgtgaacagcctggggaagacccayccccatgattcagttacctcccaccgggtccctcccatgacgtgggaattatggaacctacaattcaagatgagatttgagtgggggcacagccaaaccatatcattccaccccagcccctcccaaataccatgtcctcacatttcaaaaccaatcatcccttcccagcagccccccaaagtcttaactcatttcagcattaactaaaaagtccacagtccaaagtctcatccaagacaaggcaagtcccttacacctgtgagcctgtaaaatcaaaagcaagttagttacttcctagatacagtggagctacaggcattgagtaaatacactcgttccaaacagaagttggccaaaacagaagggctacaatgcccatacaagactgaaatctagcgaggcagtcaaatcttaaagctccaaaatgatcttctttgactccatgtctcacatccaggtcaggctaatgcaagaggtgggttcccatggtcttgggcagagctgcccctgtggctttgcagggtacagcccctctcctggccactttctcaggctggcattgagtgtctgtggcttttccaggtgcacagtggaagctgtcagtatatctaccattttggggtcgagaggacggtggccctcttcgcacgctccactagggagcaccccagtggggactctgtatggggactcccatgttacattttccttccacactgacctagcacagtttctcccggagggttctacctctgcagcacacctctgcctggacatccagatatttccacacatcctctgaaatctaagcctaggttcccaaactgcaattcttgatgtttctgcacctgcaggcttaacactacgtggaagctgccatggcttgaggcttgcaccctctaaagccacagcccaagctgtgccttggccccttttagccacagctggagtggctagaatgcagggcatcaagtccctagactgcacacagcaggggctggcctggcccaggaaaccattttttgctcctaggcctctaggcctgtgatggaaggggccaccgtgaaggtctctgacatgccctggagacattttcccattgtcttggtgrttaacattgggctccttattattcaaatttctgcagctggcttgaatttctccccaggaaatgggtttttcttttctattgcattgtcagtctgcaaattttccaaacttttatgctctgtttcccttttaaaactgaatgcttttaacagcacccaagtcacctcttgaatgctttgctgcttagaaatttcttccaccagataccctaaatcatctccctcatgttcaaaattccacaaatctctagggcaggagcaaaataccaccagtctccttgtataacaagagtaacgtttacaccatttcccaacaagttcttcatctctatctgagaccacctcagcctggaccttattgtccatatcactatccgcattttggtcaaagccattcaacaagtctctaggaagtttcaaactttcccacattttcctgtcttcttctgagccctccaaactgttccaacctctgcctattacccaattccaaagtcagttccacattttcacatagcatctcactttactggtgttacaggaagtcagggaccccgaatggagggaccggctggakctgcggcagaggaacataaattgtgaagatttcatggacatttatcggttctcaaataatacttttataatttcttatgcctatctttactttaatctcttaatcctgttatcttcataagctgaggatatacttcacctcaggaccatggtgataattgtgttaactgtacaaattgattgtaaaacatgtgtttgaacaatatgaaatcagtgcaccttgaaaaagaacagaataacagtgacttttagggaacaagggaagacaaccgttaggtctgaccgcctgtggggttggacaaaaagagccatatttttcttcttgcagagagcctataaaccgatgtgcaagtaggagacatatcgctaaattattttcctagcaaggaatatttatatcaatgccctgggaaaggaatgcattcctgggggaggtctataaacggccactctgggagtgtctgtcttatgtgcttgagataaggactgagatacaccctggtctcctgcagtaccctcagacttattagggtggggaagaactccgctctggtaaatttgtggtcagaccggttctctgctctcaaaccctgttttctgttgtttaagatgtttatcaagacaacacatgcatcactgaacatagacccttatcagtagttctccttttgccctttggcttgtgacctttattggacccttatcagtggttctgctttttccttttgtcctgttccctcagaagcatgtgatctttgttctgctttttgccttttaaagcctgtgatctttgtacctactcccagttttacaccccctccccttttgaaacccttaataaaacacttgctggtttgaggctcaggtgggcatcacagtcctaccgatatgtgatgtcacccccagcagcccagctgtaaaattcctctctttatactgtctctctttatttctcagctggccagaacttatggaaaatagaaagaactacattgatatattgggggtgggttccctcgatatactggtatcaatttactgtattagtgtgttctcatacttccgataaagacatacctgaaactgggtaatttataaggataaaggatataatggacttacacttccacatggctggggaggcctcataatcatggcagaagacaaaggaggagcaaagtcacatctcgtgtggtggcagacaagagagagtgtgtgcaggggatctcccctttataaaaccgtcagatctcatgatacttactcactatcacagaacagcatggaaaagacatgcccccatgattcacttacctcccaccggatctctcccatgacatatgggaattatgggagctacagttcaagatgagatttgagtggtgacacagccaaatcgtattacttggtaaaataaccagtttctccaattgtgtcctgttaccagaaaaaaaaaaaaaaagattcttattgcacttacactaataagtatattgtcataagttaagaatactcacaactagtttgcaaatttggagaaagtaggtagaaacaaatacgctccaaattttgttcaggggaactcctctttataaaaccatcagatcttgtgagacttattcactatcatgtgaatggtccggggaagacccacccccatgattcagttacctcccaccggatccctcctatgacacgtgggaattatggaacctacagttcaagatgagatttgagtgggggcacagccaaaccagtaatgtaaaatacaggagtatactttactcaattgttaaaagctattaatacctcaaaagtttccttgatgctgcaaaacaaaacaaaggatcagcaatgtttgaagcaaagtcaacaagattactttagtgttctattagttcagttcatgcagttaactcctgttctgcttgatatttatgaacatttcacctgtctatgagagtcctgaaagttttttacctctattctaatgttacaatcaccatagttatcagaaacctgcatttaagtgcacctgtcaaagtcttatagctgattataaaccaccttttgaagaggattaaaacaagacaacaattgtctgtgaatgataaaatgtcttaggaaaaaaccacagtcaaaaacacaattgacaaggaaatttggttacctctgtggcatacagtgattttatgtagccattataattattaataacatacagttattcatattggaattgtaggagtttcccataagtttggaacacatatgaaacatatttatacaaatacagtccaaagacaacatcactcctgtatgattttaatatatcaaataagccaaattttacctttacattagtgtgctattattgataaaccaaatttttaataaaaccttataaacaaatctgtttaaccttaattaatttgaccataaggtaatagtctcataaaccttttataaccctttacatttttttttaatgagcagatcagtgctatgaaaaacctgttgtgcttttattccaatgtttaatttatggaaaaactgaatgatgcccttttaactttagccaatatgttcacacacagaatctcttttacaattaatttttcacaaaccttccacaactggcttaaaccttcagctttattttatctaacttaaaacaattatttaaccttttaatcttagggaaaaaaatcctcattcccctgccttcttataatcttttaccaaaaaacacatttcactttctttacacagcttgcatgtaaaactgtttttagtagtctcaattatgtgttatagcgttaactcttagtgacttttacttttgatgaaaaccttggtaagagattttaattaggtactaggtgtggagtctaggacaatggasagaagtgcagataagggcgactgtttccagcatagcaagggggcatggctttccacatgtcccaggtcttatgtaatacacaatgatccaatgtaggtaaattgaacagttttccaaagtcaaagaagcagtttatgaccctaaactacttagaaaacctaatatctgacctgcctaatttggaccaaatgtttaaattttgaagatatctttattttgtcaataatttttgaaactgccttcatttccaaaagattactaaagtcatatgaagtaaatgacattacacattttacttttctgacaaactatttgatttaagcacttactatttttaaactartcaaagttttttcatatataaacatcgcacacacacacaccatgtacaaatacatagagagacagaaggtccagtagttgtaagatttttcatttccagtttttaagtttctctttaaagcatgccttttccagggtctaataagcagacacagctggaaagcaaaactgatttccaaaaattaagggtcccatttttattaccagatcctggatctcaaaaagatggaattaaccagcctcccatgggaatcttacctctcagtggagagtgaggacatttccataacttgtaggtggccaagaccatgtttctctgatccatacttgcagagatgagtatctcccataactgccattagctagccccaaaagtatatttcctacctagttattacataccaaagctctctcataatgtgaagcaatttctgatgcccccagtgtcaaaaatgtcacacaatgcagtgcaaaacagaacagagccttaaattttgagagggatttatccacttccaattcctgggcttttatgagaaaaacagaggatttttttttycccccaaaatagggtctgtgctgcctcctctgtttttttcaaggagtcccaggctgttagagcttgaatatatgcttttaattaagctgatgtttaactatagcactctttaaaaaatgcccttttaaatttctttctttttttttcctagacagagtctcactctgtcaccctggctggagtgcagtgacacaatctctgctcactgcaacctctgcctcctgtgttcaagtgattctcataccttagcctctcaagtagctgggattacatgcatgtaccaccatgcctggctaactttagtatttgtggtagagacagggttttgccatgttggccaggctggtcacacctggcctcaagtgatccacttgcctcggcctcccaaaatgctgggattacaggcattagccaccatgcctgccccttttaaatttcttattacctgattttagccataccaagtggccaatatgtctggcttttgggctttaccaaatgtaacctccaagtgctcagagaatggaaaaattcaagttttgtggaggagaggagaattaacaaatggtaaaggtagaacagatatcaaatcagaaaggactcattccctaagccaggccaccattgtgatgatggagaccaaaagaaagtactgccacatggttacaggttcatgttcccaaggacatttctcaatgtgtggtctctgggcaagatggtcaccctaagtaacagagaagattggaaaaggaaaggagagagaggaaagcgttgcctgtggcagggtggggaagatgaagagttcagtgaggccaaagaaagacccactcattgcagccaacgctgaatcagaagttcagtctgctgtttgttggtcatgaaaggatcttttctggcagtcccatcagctcttaagtttccccctttagggagagaaaaagcgccccatgtcctatggtcccgtatatgcctaattctgtcacccatagccgtcaacaaagattgcaaggcagattaatccaaagagaataccagttaacatcccatagtgccaaacccattcttaactgagaggtactttactgaaagggtcttctaactccctaaattttaggaaggactctaaccttcctaagttgagcctcaaaccaagtttgctcaagcatccttgccttttattaagaggggcctttaacccactctgtcttaggagagactcttaattcccctaaattgagtctttaacccaatcccattctttacccaggcaaatgcaccccacttacccaaaagtcagccagttggtgtgtgtgtgcagatgattttcctttgggtcggagggtctcctcaatatggtcccttctgtgtttggccagaaagatgttaccagacgccaccacttacctcaagttagcctttggttcgggggtttcctcagtatttttccatctgggtcaccagaaagatgttactggaagggggtcccaatccagaccccaagagaggggttcttggatctcgtgcaagaaagaatttgaggtgagtccataaagtgaaagcaagtttattaagaaagtaaactttatagaaaagaaattccaaccaagaatttcatatcctgccaaactaagctttataagtgaaggagaaacaaaatcttcctcagacaagcaattgttgagggaatacatttcatctagaccagtcttaaagacatccttaaagagtgctaaacacggaatcaaaagaacaaaacctgctacaacgaaaacatataagtatataacccacagccactataaatcaactacacaatcaattttacataacagatagctaacaacatggggaaaaggttaaaataatacataccaaccttgaatgtaaatgggctaaattccacacttaaaagagacacagtggcaggcttgatataaagacaagacgaaagcatctgttgtcttcagtagacccatatcacatgtaatgacatagacagactcaaagaaaaggatggagaaagacctatcatgcaaacggaaaacaaaagaggaacaagagccactagtcttttttttttttttaaagacaggaccatattcccactgcccagactggagcgtagcgctatgatctcagcccactgcatccttgacttccagagcccaggtgatcctcccacctcagcctcccaaatagctgggaccacaggccgtgccaccatgcccagctaattttagttgtttttagtagagtcagggcttcaccatgttgcccaggcttgtctcaaaatcctgggctcaagcgatccacacatctcagcctctcaaagtgctgggattacagatgtgaaccaccatacctgggcaggagccactattcttatatcagtaaaacagactttaagtcaataaaaggaaggacaatgaagggcattacataatgataaagggtacaatccaataaaaagccataactgtcctaaatgtatacatacccaacattgaagcagccagtttcataaaacagtttcttcttggcctatgaaaagacttcgacaaccacacagtaatagtaggagacttcaacaagccactgacagtgttagaaatatcactgaggcagaaaactaataaactctggatgttaactcaacatgtgaccaactggaccaaatggacatctacagaacactccatccaactactgcagaatatatattattttcatgtgcatgtgggacatagattctaagagcaaccacatgctcagtcataaggcaaatcttaataaatttaaaaacaaatgaaatcataccaagcatattctcagaccacagtgcaataaaaatataaatcaatatcaagaagagctctcaaagctacacaaatacaattaaacaatttgctcctgaataactacacaaaataaattaaacaatttgctcctgaataactcctgggtgaacatagaaattgtcagaaataaaaaaaattagaaattaatgaaaatagggacacaatttaccaaaatctctaggatgcagccaaagcagtgttaagagaaaagtttatagccctaaaaggctttcattaagaagttagaaaggtttcgaattaacartctaacttttcacctaaaggaactaggaagaaaaaaaaagaacaaccctaaagctagcagaggaaaataaataacaaaaattagagaacttaatgagattgagatgcaaaaatccatacaaaagatcaatgaaaccaagaggtcgttcttcaaaaaaacaataagattgacagaacactagctagattaacaaagaataaaatcagagaagatccaaataagtacaattcgagtttataaagatgacataacagctgatcccacagagatcctcatagaatactgtggacaattctgtgcacacaaactagaaaatctacaggaaattgtcaaatccctggaaacatacaacctccaaagattgaaccaagaagagagtgaacacttggaacagaccaataacaagttaggaaattgaatcattaagcgccatgaaccagatagattcacagtcaaattctaccagacatacaaagaactggtaccaatcctactgaaactctgcttaaaaatcaaggagaaggggcttctccctaactaattctacaaagacagcatcagcctgataccaaaatctcgcagagacacaacaacaaaagaacacttcaagccaatgaacatagatgcaaaaatcctcaacagaatactagcaaaccgaattcagtagcacatcaaaaagttaatacactatgatcaaataggctttattcctgggatacaaggctggttcaatgtaagcaaatcaataaatgtcattcaccacacaaacagaactaaaagaattactgggataatctactgattacctcagtagatgcaaaaaaaacttttgataaaattcatatctctttatgataaccctcaataggctaggcattgaaggaacatacctcaaaacaataaaagccatctatgacaaacccacagctaacatcatactgaatgagcaaaagctggaaccattccacttgagaaccggaacaagacaaggatacccactctcaccaatcctattcaagatagtactggaagtcctggccagagcaatcaggcaagagaaagaaataaaaggcattcaaataagaaatgaagaaatcaaactggctctcttcattaaaaatatgattttatacttagaaaaccctacagactctgccaaaaggctactagaactgataaacaattttagcaaggtttcaggatacaaaatcaatgtacaaaaatcagtagcatttctatatacagtaatgtctaattgaaatatatactaaattatttttaaaacaacttttagattttttcttacaaatttttgcaatgatgttgtgaggatgctttccttttgcaaaaggcttattmcataccttttccttttgcaaaatgtttagttctgtaatcatgacataatcaacatgagacatgttagaggattggatgttcaaaatgctgactttcctggcaaaacctatgttgtcaagtaggtgataaaagtgttttctaataaaacaagcacagtgcttatttgttatatgtcagtgcaaaccaaatgagcttgagttttctagctggtcgaattttaaacacaacaaccagttatttctatcgattgcacttatccatttgtttagctttaaaccatattctggatttgttgttttgtcccattacactgttaaaggaaaaagagaaaatattccatgaagttttgctgagacaaaattttggaataaaatgaaatatgagctatgctgtaaaacaaacattgcaatatgaacatatgkaatgaagcagctttattggaaaactcagatctgtggaggtggcagcactcatgtttgagattcacaaatgttagtgttagcttaagtgggataatgatgcttaaaaaaagagcagaatttccagtgtgcacagagaaaaatactgataagacttgatttattaaaagtaggaagtaaagtcaagtcatatacagaaaagtcctcacctattacctgaactcaaagggtaattcttttgtattgtatggcttcagttagttggatttacgtaatcttttattttttaatttagcattaaatgctttatatatatatatttattatgccttaagttctaggaagcggatttgcataatcttatgtcagtatccactggcatcgaggtggagccactctaataaatcctgcaggctagatggagaaagaaagttttttaatttatttaacgagttaagttcacttacatattgtaactgaataagtctggcaaaaatagatgacagacaaaagaaccttagagaacatccaacacagtttcccatctcatctgctttgatctctcctgatctcctttcaacttcttcaaatgcctgggaacatgcccacaccaacctaaacatggatggacacaagcttctgcataagagccagaaaggatactgacacaattgaaattgagcatttggcgttcatctatgtcaagcagaaatagattataaatccgtgtgaaattaaaaatagataagtacataaaatccatgcgtgtgtgtgtgtgtgtgatctgcttcagcaactcatcatttcttcctttaaacttctgtaaagagaggtagggcacagcaaatagacctaaggaacttgagttaaaaatttacaaagcatcactttatgacacctctaattaactccctctcctttgaaagaatggagaccactagagaagtggtctgttaccttaaatgagtcatttcaattctgagtgaggcatgaatttacttaatgtcatagctttaggaaatttgatcaccatattcctttaagttattagtaatttaatagggaaaaagtaagacatggaatgaaatgaaagattattttatgtgaatttttgtgaacagaggaatattagaaagaaatagggtttaggaaatagtctataatttgctgaagataagtctatggtagtaagtgattaattcagaagtagttacatcctgataaaatcaaatactttatgcttgtgaaaattygaacacagtataagaaagtagacatgtgagcaatactgtggtatttttgtacattcttcagttggaagattcttcacttgtagtaggcttttggcagatctgggtcattgttatcctaggcagagttggggtggggtagagattggttaataccttttgccattgctacattttggattttgaatttctgaatctggctaagtttgcaatacatttttattctctaatgtttcctaaaaattctgactttcctagcaaagtgaaaactgttaaaggtgactcaagaagaaaaagaaaactcaaatcttcctatagcatgagagaaactgaaccattagcttatttttccttaatgatagcactaggctcaattgattttattggtaagttttactggagctcaatgttttatacacagtgttctagaagattgatgagaaaacctagcccatctcattttataaattttgtgtaacttcaaaaccagacaaggataattaaagaacacaaaactgtaaatcaatctcactcagaaacataggtgcaaagtttttatagcaaactgaatccagaagttttccagaccaagttgggtttattccaggaatggcagattgacctaacattagacattgtattaatataatttattacattgattgactaaaaagaaaactataccatttcagtgcatgcagaaagagcatttagtaacattaagtaccagcttatcattaaaagaagaaattagaaacttcctttacctgataaaggttatctaccaaaaacctgtaacaaccactatatttaatggtaaaatattggaagcattagctttaatatcagaaaccatgaaacctactgaaactaattatatttattgttgtactcgatgtcctaggacaggaggtaaaagaaataaaaatgccgttcattgacagaatatgattttctacatagaaaatctaatttaggccatatatactgcttattagaattaattggagtttaacaatgttgctatagataaacatcaatacaaattgaaaataaaaactttaaaaaacatcagtatctatggtagtgactataggtatctggggataatctttaaaaaatcatttgagacctttatggaaaaattatgacttaaaataattaacattttttaaaaaagactatgttcacagatagattcattgcaatataagttgttgcttaatggatctctagagtcagtccaatttctaagaaaaccaagtgggtttttttttgaaaaattatgacttaattaaaaaaaatttaaaaatgttttttaaaagactgtattcatagctagagacatttattgcaatttaagttgttatttaatggctctctagggtctgtccaagttataacaaaatcaagctctctttttttcttgaaatgtgacaaattgattctaaaatgttgtagatgagtaagagcccaaaataaccaagatactccaaagaagaactgagtgagggctgatttctgctacatgttgaagcaaaggagccccccacatgtagatgwtgtggacatcacttgtctctgtcccttaagagamcccaaaacacacagcactgatgacacctgttctgcctctcacctaccatgggaccagatgaggttgatttaacttgacttgtcctcctaggatgttcctcctatcttactgaactgctcttggggattaaatgacaaggaatataataatgcctaatacagggaggactttgacagtgattcagcagtgaatctagagccagcctgcctgaattcaaatctcagcactacttcttatttgctgggtggttaatctttctctgcttcagttttctcatctggaaaatggaaaaaatagcagtacttcttccatatggctatcgtgaagattaagtgaattaatacatgtaaaactggaacatcacctggcacatagtgctcagcaagtattagctcttcttttcattttgtttacacctttattcttttcatcaaaatgctttcatccttgtgttactmtttgacaatactttgcattaagtttaatttaatgttaaattgtattcaaatagtacataccttaagtgataaagacaataacatatttatttaacatgtgaatagtgaacacctggtataggctgaggtttaaagtgtctaggaggtcaaataactatcagtttattagggagatatttttcaatgaacagcatgattactgagatccactacaatggggatatgtaaatagtacagtctaaacataaaaaaagggtgcctgagtgaacctaagcaaatcagtccagaagacttcataaagaatataggattttctctgagattgatgaatgagtaagtgtcctggacacataaacatataagccagccattcacagaaatcagttaattaaaaacctttgcaaggtgtggcaacagtgtgtgttgatagacaccaacaaatcagatcaataatttcatttccttaatggcaaatgatacagaaaattatggaaacagataaatcagatgatgacacagcatactgtcacatggagatatatcttttcattttttcatggagtcttacagctgtggattcatagcaggcttgagtactctcatttcctttatcctgaccccagcttccttgtggaagttggcttgatgcctcctggaggctcttcttctggagacttgatatgaggctacctggtaactgaaagcaagtgactggtacatgtaaagaacaatacagtcctagatggtggttacagtgaggtcagagtcagtttccagaagtattcattggaccaacctccagcatatcccagatatgttcctcatattgagccggggtcctcaagcctctctcatcatttaagttacataactagtagctaagtctgagactcgctccctagtccttcaacttgtcttcaccaccaacttttctttcccaagaggcataatggccttgaagaaacagctttatttaatcatacagactgcagttagaacctactacttattaatagctgtgttttcttaagaaacttattttcatgtataaatataaatctcaattccttatttgtaaactgaggatgattatagctaacatatagggttccatgagctaacatatacaaagtggcttgtgcattgacagatatttaataggaatgtaataaattgtttatattcttttttccatattctaaaattgaactgtatccaatattaaatccacctgccccctctgtcaatattctgtgcttcacagtgctaatgattttctattacatttttttcagatatacccccatgaaagaacctctgttaaattttcagtaaattaaaacttaaacgtctccagatgggtccatgaatgactaaaaaaaatcttctagtgaaaaataacaagatcgtcaacagaaaaagtgacaaacataaagtatatctagccattatagaaaatgtaaaaaaatttatttgtattcacattaggcctattttaacacagaacactgtgtaaatgtccagattgacttttgttagaccatattgtcagatttattttagtagaagatgaagcacacacttcataatggagtataaaatttaccaaagttgtagataatccattcaaatggaatgtgtctatatgtgttttggactacttaacactgcaaatgcaacttcaaataattaaattaaaaacataaaaattattcccaaaagtaatatcatgggctactttacattttattcaatttaatctagcaaaaaattttgaatgccagatactgcaaagaattctacaatcacaactaaggggatggtcactgaccttggaagagctgatagtctagtgagaaataaaacaaatatatgaattaattataatataaaataaaataagatgaacaaaattggaagactaagctataaggtccactaagcagtggctattttttttcatttcccccctatgtatacaagtgtttatttgtattatttttacaatttggggattgtgctgtgtgttttgattccagcttattttcatttttcattgtatcatggacattgtttcatattcttaacttgttcaaaagtcgtgtttaatggccataaggtattccatcatatgatagtaatttaaatattcctctatttttgaccatttagattgtttactcactgctacaagcctcagaagaaataaaagagcaaaaatacccctaaacatttattattaatgtaaagtgtgttcaaacatgttttctactacatacattaagcaaagttactatcagatcttatattattgtatataattttgtagatataattaaacagtactactcagattaaatggggaaaaaaaacccaacacaggtagattttcttcttcttcttcttctttttttttttttttgagacggagtctcgctctgtcgcccaggctggagtgcagtggcgtgatcccggctcacygcaagctccgcctcccaggttcacgccattctcctgcctcagcctcccgagtagctgggactacaggcgcccgccaccacgcccggctaatttttttgtatttttagtagagacggagtttcaccgtgtctcgatctcctgatctcgtcatctgcccgccttggcctcccaaagagctgggttacaggtgtcagccaccgcacccggccgtagattttcttcttaacttggcttgccattcacatgtatatacctaccacacatagattttcataattgtacccaaatgctatagtttattgtgtacttgctattatttgctataaaatatttctttataataaacctattgtgttttggggtggtctactattaaaagtatagtttttttgttttttgtttttttttttagacggagtctcgcttttgccaaccacgctggagtgcagtagcatgatctcggctcactgcaacctccgcctcccaggttcaagtgattctcctgcctcagcctcccgaatagctgggattacaggcacttgccaccacacctggctaatttttgtatttttagtagagacaggggtttcaccatgttggccaggctggtcttggactcctgacctcaggtgatctgcccaccttggcctcccaaagtattgggattacaggagtgagccaccatgcccagccaaaagtatagattatcaacaataaattttaatattgggagctattcaaagtgcattctgtgtactttttctgtctcatactttctacagtctcatcctttctatagtctcatcattaattttataaaaatatttatctttgaaatatttacttgtgtaatratgactttgttattttaacaaaagagtaagtattcatgtattttggcctgtggttttttttgtttgtttstttgtttgtttgtttgttttactgaatagcttgtggcttgccatctttatttaaccatctggtgaaatgtttctcttccatactaaaatggctttattctttaccattttacttgttaaaacttttattttagtatyggggtacatgtgtaggtttgttatataggttgtgtgtcacggggatttggtgtacagattattggccacacaggtaataagcatagtaactgataggtagcttttccatcttcaccctcctgccaacctcagccctcaagtaggcctcagtggtttgctgccttctttatgttcatgtgtactcaatgtttaactcccatttataagtgagaacatgtattcagttttctgttcctgaaataattagcttaggctaatggcctccagctccatccatgttgatgcaaggacatgatctcattcctttttatgactacatgatattgcatggtgtatatatacaayattttctttttttttttttaatttccaacttttaagttcagggtacatgtgcagaatgtgcaggtttgttacataggtaaacatctgtcctggtggtttgctacacagatcatcccatcacccaagtattaagcccagcatctattagctattcttcttgatgctcttcctcctccaacccaaagccctgcatcaggctggtgtgtgtcattgtccccagtgtgtccatgtgttctcatcatttagctcccacttataagtgagaacatgtggtatttagttttctgttcctgcattagtttgctaaggataatcgcttccagctccatccatgtccctgcaaaggacatgatcttgttctgttttatgactgcatagtattccatggtttatatgtaccacattttatttgtccagtctatcattgacaggcatttaggttgattccatgtgtttgctattgtgaatagtactgcattgaatatatgtgtgcatgtatctttataacagaaccatttatattcctttgggtatgtaatcagtaatgggatcgctgggtcaaatggtatttctgtgtctaggtctttaaggaattgccacatcatcttccacagtggttgaatttacactcccaccaacaatgtaaaagtgttcccttttctccacaacctcaccagcatctgttgttttttgatgttttagtagtagccattctgactggtgtcagatggtatttcattggggttttgatttgcatttctctaatgataacagtaatgttgcacttttttcatgtttgatggccacatgtatgtcttcttttgagatgtgtccttctgttcatgtcctttgcccactttttaatgaggttctttttttcttgtaaatttgtttaagttccttataaatgctggatattagacttttttcagatggtgatatggtttggctgtgaccccacccaatctcacattgtgggtgggacccagtgagaggtaattgaatcatgggggcagatctttcccgtgctgttctcatgatagtgaataagtctcatgagatctgatggttttaaaaaggggagtttccctacacaagctctctctttttgtctgccatcatctatgtaagatgacttgttcctccttgccttcccccatgattgtgagccctctccaaccacatggaactgcaagtccattaaacctctttgttttgtaaattgcccagtctcgggtatgcctttatgagcaatgggaaaacggactaatacagatggatagattgcaaaaattttctcccattctgtaggttgcctgtttactctgttgatggttccttttgctgtgaagaagctcttaattagattcatttgtcaatttttgcttttgttgcaattgcttttggcatcttcgtcaagaaatctttgcctgtgcttatgtcctattgcctaggttttcttctagggtttttatagttttgggttttacatgtaactctttaatccatcttgagttgatttttgtatattgtgtaaagaaggggtccagcttcagttttctgcatacgattagccagttctcccagcaccatataaaacagggaattttttctccattgcttgtttttgtcaggttcatcaaagatcaaattgttataggtgtgtggttctatttctgggttctctattgtgtttcattgttctgtgtgtctgtttttctaccagtagcatgctgtgttgtttactgtagccttgtagtatagtttgaagtcgagtaacattgatgcctccagccttgttctttttgtttaggattgtcttggctatttgggctcttttcaggtttcatatgaatttcaaaatagtattttctaattctgtgaagattgtcaatagtaagttaatgggaatagcattgaatctataaactgctttgggcagaatggccattttaatgatatcagttcttattaatgagtctggaatgttttccatgtctttgtgtcatctctggatttctttgagcagtggtttgtagttctcattgaagaggtccttcacttcccttattagctgtattcctaagtgttttattctttttatggcaattgtgaatgggagttcacattcataatttggctcttggcttgcctgttgttagtgtataggaatgctagtaatttttgcgcattgattctgtatcctgagactttgatgaagctgcttatcagcttaagaatctttggggccaagatgatggattttctaaatataagattatgtcatctgcaaacaaagatagtttgacttcctctctctttatttgaatatgctttatttctttgtcttgcctgattgccctagccagaacttccaggactatgttgaatcagagtgatgagagagggcaaccttgtcttgtgctggttttcaaggggaaggcttccagcttttgcccattcagtatgatattggctgtgggtctgtcatacatatatggctcttagtagctagaggtatgttccttcagtaccttgtttattgagcatttttaacatgaagggatgttgaattttattgaaggctttttctgaatctattgagataatcatgtggtttttgttgttagttctgtttttgccctgaatcacatatattgatttgcatatgttgaaccaaccttgcatcccacgggtgaagccagcttgattatgatcgataagctttgtgatgtgctgctggacttggtttgccagcattttattgaggatgtttgcattgatgttcattaaggatattggcctaaagttttttgttgttgtatctcttccaggttttggtatcaggatgatgctggcctcatagaatgagttagagaggagtccatcctttttgattttttggaatagtttcagtaggaatggtaccaagctcttctttgtagcactggtagaaatcagctgtgaatccatctggtcctgggctttttttgtggttaggctatttattactgcctcaatttcagaactcgttattagtctattcagggattcagtttcttcctggytcagtcttgggagggtgtatgtgtccagaaatttatccatttcttctgtattttctagttaacgtgcatagaagtgttcatagtattctctaatggttgtttgtatttctggcatcagtggtaatatcctgattatttaatatcccagtatttctgattgtgtttatttgaatcttctctctttttttctttattagtgtagctagtggttttgttttgttttgtttttctttgagatggagtctcgctttgtcacccaggctggagtgcagtggcgcgatctcagctcactgcaacctctgcctcctgggttcaagcgattctcctgcctcagcctcccgagtagctgggattacaggcatccgccaccatgcctggctaatttttgtatttttagtagagacgtggtttcaccttgttsgccaggctggtctcaaactcctgacctcaggtgatctgcccacctcagcctcccaaagtgctggaattacaggtgtgagccaccacacctggcctgagccaccgcrcctgacctattttattaattttttcaaaaaaccagatcctagrtttgttgatgttttgaagggttttttgtgttgctgcgtttttcagttcatctttgatcttggttattttttgtcttctcctagctttggggtttgttttctcttggttttctggttcttttgatgttctagttcttgtgatgttagcttgttaacctgagatctttcctagcttttttacgtgggcatttagtgctataaatttcctcctcaacactgctttagctgcatcccagagattgtggtgctttgtatctttgttctcattagtttcaaagaacttcttgatttctgccttaatttcattatttacccaaaagtcattcagagcaggttgttcaatttccatttagttgtatggttttgagtgattttcttaatcttgagttctaatttgattgcactgtttattatgatttcagtacttttgcatttactgaggagtgttttacttcagattatgtgatccattttagagtatatgctgtgtgacaatgagaagaatgtatatgctcttctatttgggtagagagttctgtagatacctatcaggtctgcttgagctgtcactcagtcaggagaactgggatcagggtcccacttaaaggagtaatctggctgygttttggtggagcagctgtactttactgaggaccccttttgtccctgatccatttgggctgcccaaggtccacaggctggaccagctgagaaacccaaacagcaaaggtggtggcctgctccacccaccatgccygctgtcttagagagaaattagaactcttgtcagctgtagtacacagagggaggtggctggagaccccaagtgggaggacccaccctcgagggggatttgtaactcggggtctcatttaaagaagcagtctggcaatgcctcaacaaaacagctgtgccatgctgtggaaccacttttgccctggtcagcttggactcttcaaagcccgcaggctggaaccgctgagtcgtcaaaacaaccaaggtggtggcctgcccctcccgcaaggcactctgtccgagggagagaccagacctctgtccatagaatatgggctggtagggggagctcaggcctctggtgggaggtcccacttagcgagaaggaatagatcggggtcctgcttgaggaagcagtctggccacattctggcaaagcagctgtgctgtgcggcgggactcgctgctcatccagaccgtttgtactctgcaaagcccacgggctggaatggctgagttgtttaaactgcagagatggcagcccacctctccccactggggttccatcccctctcaggcagcctccacactgtttccagctgcctggaattccaagccactgggtcttatcttgtgaggaaatggggcctgtagaactgacactgctcagctccctagatttagccgccttcctaggggtatgtatgaacctcctgccttgctggggatcccggggccagagtatgtaaagctctgggtctctgtgctgcctgagcaaccgctctgttgagactccacagagttctgtgtgttggacccaaggccctggtggcatgggctcatgaggggatctccagatctgagggttgcaaagatccgtggtttcttagggttgtacattcgttcactgcttcccttaactgggggtgggggttcccttgactacatgtcactcccagttgggccatcacctcaccatacttttcttcattctccctgggttgagttgttttcctgatcagtcccagtgcaagtacctggatatttcagtagaaggtgctgtatttactcacccsccttttgttgctctctgtgagtgccacgcactacagytgcttctgttccaccgtcttggcccccgatcccttgttttttttttttaagttatttatttttatttatttttagagacaggatcttgccatatctcccaggtttgaatgcagtggcacaatcatagttcactgtatcttcgaactcctgggctcaaggaatccttccacgtcggcctgccaaagtgctgggactacatgcatgagccaccgcaactggcctgtttccttcgtctagaaaatgaggctcttagtagttcactggcatggtgtaaggagtraattatggaaaatatgtaaagcacctaccacaatatgtggcatatagtaagcacagaataagtaaccaattccttctcttttcttcctgtttacaccgcaatttagagtattaactggcctgtaaaagattctgtaaagaaaaatgctgtatcagttagagccttttaaaaagtgaaaayatctttcggggatcttcctcccatcaggcaagttgttggactagggtcacttctaaggtttcattcctatgctgtgattttaggattccgaaacagtgaaaataactggtatgcttcattaggcagtacagtgtcaagtgtaggataatttactttgacagatcataaaacagatgttaaaacatttataaacctcaatgaattattttttaattcacagtccaattatcttaagattttaagccatgcttgttttagatttccttgaatcataatgattttgtttgcgtatgaaaagtaattccaattctgtatcattatgagacaaaatattcagtgaaactcaaactgcttttttttttatttttcaaagcctttttttccttttgcatcgactttatttcagttcttcataagaatataaaatatactccttttcatcagaacttttcttccacagccactaagttcatatcatatgactatttggtgggtaacaatattagcaaatatgtttatgatatccattctttatttaaccttactcttaataaatggagaaaattatgaaatcaaggtacttcccacaaggaattcttaaagggctttataccaataacttttgtcttgtgacttctgttttctttgcctagaaggaatggaagaaatgagaggaaactgatctcatttgttttactctctcagtggctagytattatttccctgcagcctgaacattggttttgttacagagctttgtggactgccttcttgtttcatgcatagactatgccaaccttggatcgcagtggagggcagaagctatttagaagcacccaacagtgtggcttttattctgattgttttcaaatgtgcttagttggctcaaatcaggcttcccagaacagaatcttagggtggggtttagaattagagcagcatttctccagaaagatttacgctgtcaaccttttataaattaggactctcactgggcttgctctaattctttaaaacatttgtattccaattgctttcatctttggttgagctgtctggatcagatgtggccgttctctctgattttgcttctgatacacacttagggcctgtgcagtttctctcctttacccttaaggggcagacttgactaaaattcaragatatctgtgttttctattgctgccaaaatacccaaataccgttccaaaatacccaaaacttaaagggtacacccccaacttaaagcaacacagatttaatgtcttacagttctgtaggtttagagtccaacacacatatcaatggtctaaaatcaaggtgtcaacagagccgcattcctttctggagaattctctaggggactatctgtttcctagccccatctaacttcttgcggcctctcacattttttggttcatggctcttcttctgtcttcaaagccacagaaattgcatctcgcgcatctcgctgacccttcttctatagtcacagcatctgctcaatgaccacagctaggggaagttcaccaattttaaaggcatgtgattaggttgggcccatctgggtaatccaggctactattcccatctcaaggtttttaattacacctgcaaagtcccttttgccatgtaaggtaacatattcrtagttcgaaggattaggacatggacattttggggacaattattctgcatatcacaatccctttctcttttccttagtagaccacactagtctggtgacttgaaggaacctagccatttctcttctacctcaccacagtgggcccaggatatagtcattttaaaaacataaaacccagtgtatcaggctccaggccagggcttctcagctgactgtttctattggtgtaacagactggattttggctgtctctccctctactttcctccagcagtctttggtcttgttttgagatgttttccctcctgtggtcctcagtctgccagtgttcttcctataactttatctctgtgtgtcaggatatacactgtactctatagaaatggcagtggaaccccaacaattgtgggtgtttgggtaataatccacaaccttatcattcccaacacccttcccattgtagctttcctctataaagagaagtttggagctcctaaaaccagatctgaaatttatttattcaattaatcattcaaatgtgcaagatgtggggagaattggatatagagatatggctcctgccctcaagaaattaatagtcaaacagggagaaggacatgaaatacaagcattgctgtatgtgggatggatgtctgtatatacagttggtcctctgtatgtatccctgtgttcttcatctgtgggttcaaccaaccacagatcaaaaaaattgggggctagrcgtggtggctcatgtctgtaatcctagcactttgggaggccaaggcaagtggatcacctgaggtcaggagttcgagaccagtctgaccaatacggtgaaaccccatctactaaaaatataaaaattagccgggcatggcagcatgcacctgtagtcccagctactcaggaggctgaggcaggagaattgcttgaacccgggaggtggaggttgcagtgagccaagattgtgccactgcactccagcctgggtgacagagtgagactctctctcttaaaaaaaaaaaaaaaaaagaaaagaaattrgaaaaaaaaattgtactgaacatgtacagactttttttttattgtcattgtttcctaggcaacacagtgtaacaatcatttacatcatattatgtattgtaaataatctagagatgacttaaagtatatgggaggatatacatagattatatgcaaatattacactattttataaaagggacttgagcatcttcagattttggtatctatggaaggttctcaagccaatcctttatggataccaagggttgacatatgtgtatatttatatatgtgtgttagttatctgttataatgggagcacaggaaagataagcccttaaatttccctcagggattcagggaaagttgtccagaggcagctagggttgagcagcagatgtcatgacactactaaccagataagtcttctcctttcactcaggccttatggaataagctatgcttgtggaattttttatgtggaaaagaattacatgaaacaatctgcattgctcttctcactgtttttagagggaatcagtaggaatcagaatactggctgactctttaggtatgtgggcttatatgaattttttagctctttaatccttagtttttccattagtagtacccaacttgctgaattgtgaggtttgaatgaattattaargttaagcttttagaatgggacctactacccagaaaatatttaacaatattattgtaatgtatcactgtcaccatttattactacaatctctcttgaattactcatcacttttctgacatcatcatatgaaacaagttttttaattcatgccagcttctccctcttacttacggtttaggagttgcctctaatgcctaaggaaacgtgtagccctctggttgtactgcaaaagtggttgcattttgaaggcaggtgtatacaacttccagagtaagaatatgtgtattcaggtgtaggcgttgtcagtttccaataagataatttataatgcttaatttatattaggaagatctcacattgttctcttctgtaaattatgcatgtatttgtaaatctaaaagraactttgatttttctctctgattaaggtgtataattataatcttaaataaaagtgaagttcaaagtagcttcatttaaaatattaatagacaaaacataagatcagttcttttagggattggtttgtcagccacatgttagatctgcttagaaatcttcagtgaaataggaaacattgtataaatgttacctaatgtaaatactgctaaatttaagatatactaaaatttgagtattttccctttagtctcaaataagcaaaaggaaatctgagttatatgaaaatgaaagcatgtattcagcttttataaaaccattataaataagttatttttcctaccaagttaaataggatatgtttacatgttttaaattttagttttattagttacagtatcatattgtgaatagtagcaaatatgtccttatatagttctgggttcttgctttataatgtacatagacaaatatctttttaaaaaaatttttgtgttccacagacgcaacaggttttgataatttcttatttcacctgttggttacagtcacaataatatgttctttcttctaccttatgattgaccatttctgacataaaagttaagaatttgtatcatctaaacagccttttatgtcctttctcttttttcatacatcttgataattgtagtgtttttcatgtttgcttctattttctatctttccgagtttgcaaaacattattaaaacttcatttctagttcttcactaataggacccaaatctaagtctctcaacttcaggctctacttaagtatccagagttcacaattcagcgaccgtttccagggtggaggcctgtagaagaatcagtcctatttttacaaaaacagagaaatttgtgctcctaatatttgcatagtcataaaattgcaaaagttatattggttttacaattttaaattgataggcaattatgatttttgyaaatgacattctaataaaaattatcaacatttggttatggtagcgatggtgaagaaacacagtgaaagcaaatattttcttatgtcacttatacatgtacaacaatggccatatttctgaaatgtaaatgaaagtataatgccttcttcgatttttattttgaccacygagtaaattaaaccttcaataatctcataaaaatgagatattttcttgctatacctctgatatcccctgtcccctgaaaaaatatgaaattagtacagagccagtaaaaaataccaagaacayccaggatagattctatcctaacctaaacaagcttatattatgaaagtggtgttattttttaacagatcataaattagacaatatagktcatctagggccgataacttctccccatgcagctgttgtcactcttgggaggtgcttcctagaatgtgtgctgagaaggatgctataattagtgatgtctgccttgggtrcagaatatcagtagtggttaggagcagtacacattttccatccttaagtatctggatgggaagagatctagagaacagaatatcatatgtctcctgactcataacttgggatctttcctcaattctactgaataacctgtagtggaaaaccatgtttctatagtcctatccctcgtccaggtggattatctgaacaggactcctgtggaatggttgtggtaatgtaattcatgtggacattgacaagttgccatcatgtggtcatgaggatggtgttggattccttatgtgtgaggctgataagggccctatgttcaattcttagtggtccttttaaacctacacctgtttatattttttatcaacatgcccataacttatttttcgtgaatccactgaaacttccagagacttgaactttgcctaaagtttaaaacaggaattttttaaatcccttaaatgaaaaatagttttaagtgtatcccaactaatatgaaacaggaaactaatgtctaatatccttgggaactataaaatattcaatagtaatcaaaacataaaatgattctcttctgtctttccgttatwctctacttcmaattacattttgtaaaatgtaaacaattgcacctgcaattgatggaaaaataccatcatgaaatcaaatgtgttttctgacttcatatatgtattgtagtatttaatattaagtaagctcagaagatacttacatggaatctactgccttttctgagcacaagagaagcaatgattaatagaatgtggtacttgctccaaggagcattcatttaagaggagggatgctcctatttgggtcttcactgtataaagcatttatatgtatattacttaacaactaaaagstatgtacttatgcagaatactgccatcattgctcttttctttactgtaatggtaccattcatsaggtccatggaagccagcttctcacacattctctcttagacataggcgttttctttctttcttttctttttttttttttttttggtgacggagtcgcactttgttgcccaggctggagtgcartggcacaatctcggctcactgcaacctctacctcccaggttcaagtgattctcctgcctcagcctcccgagtagctgggattacaggcgcgcaccactacgcctggctaatttttgtatttttagtagagacagggtttcaccatgttggtcaggctggtctcgaactcctgacctcgtgatccacccgcctcggcctcccaaagtgctgggattacaggcatgagcccccacacctggcagacgtgtgttttctaaagtggatttattagaaattgggatccccttaaccatctttacttagaggagactttggcttagtgacctacagttgtgtgtaaatgaaaagcaaaattaatgggaagtatactcacaaaagaaggactttaaagttgcaaaaatagcatgcatcaagaatagtataaaattttaattcctccatcgtcaccaataaacatttatggagaatccccagagtgactgactctggattttacatcttatgttaaactaactcttgcattctgttcttgctgttttataattaccccaaatgttctctgttacttctcctaatgattcttctttttttttcttttttctttttttttttttttttgcatacagcagagaatgcctgtgggtttaaaaattttttaactaatcttgatgaatcaattataatttataaaagtggagcataacagttaagagctcatgctatggaattggacagagctgatttcagatactgttctgccacatgcaaagtgcataactggactagtcacttacctttctgaacctcagtttcctcatctctgaaggggatgatgaaggttcagccctctcatagggctcatgacaattaatgagataatgtcacatgcttaataccagcatcttgtatgctccataggtgttagctgtctgtttgtaataatatttttgtgtttggttacacaaacccactttcttcatttgttttctgctattaatgccttttgaagtattgtgttgtttgtgaacacatagtacaaattgacttttgtttttttaattatcaattttgtttctgtaactgcrcagaaaagtgataaattgtgagcttatattttcttttaatacatagatatcgcctcccaacatacatgaattttaagacactaaaaaccccttaaagatcttttcttaatcagtgtttagtaaatgggcttacattctagcgtatagaccaattcaaactgttctacagtagagaggaatttgtatgttggccagtttttcatacagtgatttctaactctttccccttcagtatttccctaacatacactttctcatccagtatttcttttagaattctcacacttttgccctcataactcactttcatattcctagagctcttttcttcacactgattgtgctgctccttttcaatttttccaaccttatggaattattagtgagaaaaagcaaaattattattatttgagacggaatctcgctctgttgcccaggctggcgtgcagtggcgccatcttggctcactgcaagctccgccccccgggttcacgccattctcctgtctcagcctccggagtagctgggactacaggcgcccgccactacggccggctaattttttgtatttttagtagagacggggtttcaccgtgttagccagggtggtctcgatctcctgacctcgtgatccacctgcctcggcctcccaaagtgctgggattacaggcgtgagccaccgtgcctggcccaaaattattttttatatatggtgactttcccccaccctttcatcttacagtagaggcagctcagaaaaaaatcactgaattaagtcattcagaggtcgtttataatagctattcagcagtgagctggttctcagtcctggttatccattacaatttcccagcatttaaaattctgataccgtgaccatacccaagaataattaaataagactttctgtaggtgggacctaggcatctgtttttaaagcccttcaggtgatcttaatgggcagctaagtatgagagctactataggacagtgttgtatggcctgattaggtaggaatgagagggagaggaagaaatcaggacaggagatgtagacttattttgataagttttggtagtgaaaggcagaaaagagatgggactgtaacttaaggaattagcaggaaacacaacatacctgagaaagaacattctagcatatatatatatwttagcatatatagtagtgagtctcagctactcccctagggcagtgtatcagcaatttaggaaccagggatgaacatgcatttggcaaaacttcctaattttgatacacctttccctttctcactaccctcccttctctcttctctccccagcccctgtctacaatactgctatcctgctccctctgctcctcgtccttttctttcttaaactgggtgacagagcatctcaaagttgacttccctcatggtggccatatggctccagcagttctcagcaagagttctgaattcaccctgattagaccattaaggtcrtatttcaactagtaactgaggctgggggaatggaatatgctcatttgtgaagtcaatcaagaaagtacataggaagatgggaaaggatgctggtagacagccagtactacccactatatatgtaaaagtcacagtgattcaatgcartcagttattttacatgtgcaaattatgagtggtcttgtatggggacrgttttgaataacatatagaaagtactatrtagtactgatatttttctgagcatcaaatatttagagaaaaaaatctgtggtgttttagaatataatataataaacatcaaataatttactagatcaaacatggtttattaacttaaacactgtagcatatagcagtctgtagcacatcttactgactgatccttttttgaaaaaatcattacttcacattgttgatgttgtggcagaatctaggacttctataattacatttctggagattatcaggcaaatgtgtggcttttaccttttctggttactattttatagaaaaatrtaattgctaggtatgtcatttaagaccctgcaatctatttgtctgaaaaatggaacaaatgctagtaagarttttaaatgactctcaaagcctcctgcaaaatgacattagcagttgaaataaaatagttaacagtctaaaaactgtttaagataaagcccataactattaattttaggactgttttgtatacaatgtaaatgacacatgtttgagttaatccatttgatggtggtgatcacattcttaagaaatgatttggtatctcaaagcagtttcttaactagacaatgagcagaaaacctgttgctagttttggaagtttaaattgtcaaacttcaattacttctgtttaatttgggattaaagtttgggattaaaaacacatgagcaaaaatctcataaccccagttcagtcatgagagaaacaccagacaaatttcarttgagggatattctacagaatatatgtccagtactcctcaaaactgtccaagtcatcaaaaaacaacaaaagtctgagaaactgtcgcagccaagggatactaaggaaacaagaggactgaatgtaatttggattctggatgggatcccagagtggaaaaaggacattagagcaaaaccgaggaaatctaaatacaggttgggctttagttaatgtgtcaatactgkttcattaattgtgacaaatacactatattagtgtaggatgttaataatattaacaatggtggaaaccggttgtgggatatatgggaaaactgtgtactgttttcatagtttttatctaaattttaaaatacctcaaaataaaacgttatttttaaagatgtggggatacatttttcaggaaagagtctccgccataagcttactatagcagagcctgaatgctactgtttgatgaatgaaagaagtccggtattcttggagatcttctctgtaatcctccaggctgaggcatcacttagatttggcatttgagacctttattgttgacctatgaaattctgttttatgtctgyctctcactttgtttcaccatagtatagtataggttataggagcaagaaaactgatttttctttcaagatccactgtatgccaatcatgtactggatttcactaaaattaacacatccaatttttagaaactttgtaggatagaggactaccctttctacaaaagaggaaaacagactaagaagagtaagttacttggccaggcacagtggctcacacctgtaatcccagcactttgggaggccgaggtaggtagatcacttgaggtcagtagttcgagaccagcctgggcaatatggtgaaactccatctctactaaaaatacaaaagttagcagggcattgtggcttgtgtctgtaatcccagagaattgcttgaacccaggaggcagaagttgctgtgagctgagatcgcaccactggactccagcttgggcaacagagcgagactcagtctcaaaagaaaagaaaaaaaaagagtaagtaacttgcccagagtcacacagatgtttactgacagactacatgagagccttgtttattacttgactccaatttccagcctttctaccttctcatatatatgccttctttgttatcgtaagattcagattagcaagrtactctttttaacctgtgcctatgttttaaaaaaaaattgtttaagtttgacataagtataagccagcaggaagttgcaaaaacagtacagatgctccccaacttatgatggggttaccttccagtagactcattattgaaagtatcgtaggtcaaaaatacatttaatacacctaacctgtaacttagccttgtatgctttaagtgtggtcattagcctacagttgggcaaaatcatctaacacaaagcctattttataatgaagtgttgaatatttcatgtaatttattgaatactggaagtgaaaaacagaatggttgtatgagtaaagtacggtttctactgaatacattttgcttttgcaccattgtaaaatcaaaaaawttttaagttgaacatttcttaatttggggactgtattagttcattctcacaatgttataacaacatacctgagactgggtaatttataaaggaaagaggtttaattgactcacaatcccacaaggctgggaaggtctcaggaaacttgcagtcttttgcatttcaccatgaaagagttcgtccaactttttaggtttttattacaaaataaatagtgttttctctgccctctctgtacctcgtatttgaggaattctcatacttctctttcaggatgtctttccccacccattttgtttatggtggtaatattataccaatatggccagcttttatgtactttgtgatctcgctactatgaagttagcccccttcagcatttattcagaataatgcctcttaaaaaagtgtttaatgatttcataaggtccttggtgtttcttaatgtcttcctttctcttttttccctccccttttcccctccccttttctcccctcccttctcccctcccctccctcccttccttccttcctttcattttttctctgtgaccatctgtatgttcttttctttttgtctgccttttagtattaaaatggtcacctgacgaccatctgagttgagctttgtcaagaaccaagggctgaagttctttttgttcagactatgtttctgttaccagtattgagggactaaggactttcaagcccttctcattctcccagcctgagagatattaagataagggaaaactagattttgcaggtaaactttgatttgttgaatgcctgctttgtgccagacattgcatgctacgatatattctattaaaaggattcaggaaggrcatttactcttttagctactggagtttgattttctttattatcatgctgatcagtgtacactggcagtgtggctgattgagtggaaaagggagagctacactgtcttgtcactcacctagttgataacagattcaggacaaggactctcgtctcctttctaatacaatattagccctaaacccaaagaagttgagatgttttgtcattctttagtttttcccaaagggaacatttttcacaacataaaaagttagctgattggaattaacttatactttataagagatcagtgcatatctagaggcgacatagtagaattttcaaacaatcagaaatctcataaatcggaatctaagggaaaacaaatataccctcctgaacgttgtataattgggtatacagaaaactttctaattttattttgccttcattyttagactaacttgcaattaccccaagttgctaggtagcaaaattattatggtactagctcagaatttgctgtattttaatcagccttagtgactgaaaacacagagagaatgtcaatgagggagaaaggttttcctttactgcccctagataaagcagatgaaaatctgtttctctccacggtagattcctactccttgccaaagatacaatagacaacatttataaaaatacaatctttgtgcatgttgctaggttgctcaattttgagcctttttctttacaatacataatcatttaaaaaatactgaaagaggtaagaaatagggagtggaaaccagtagtgtgagtaaatgggaaattgatatctttaaggcactagatatggtaataaatatattagattactagaagagaaaaaatacttgaatagtagccaagaaaggattccaattacttacaaactacagtgactaacttctttcaattctaaaatcccctattttaatktttctaagtttctgagaaatgggcattttagtattactccttaaaaacttttttactgaataaaataattttcatgaaattacaaaaacataggatctgctcatattgatagtgtgtttgacttaccactcactgtattgtgtctcacttagattaccagcaaaaatattactcacatctaatgatatttctgggtatcctataaatgaaccctgagaggtttcctggagagtcttgtaatgcttcctagctacccctgtatatattctataaaatatagccatgtaaagtatgaagacaatctgttactgtcttcctggcagggctggtcaactggccatcagacactgtggttgcatctggttgtcccctgcttcctactgctccattgtccccctttgggtgtctccccctcctccctgtgctggtgctgccctttcataggccttctctcaataactggatctcaccaggctcctttctgcattcctagctttgtacttgctgtgtgacctggcaggagtgcttctcctgggttctttgcagatctggtttctccttctcaaatgacaccaccttagaaagccctttcctgagcatactgtgcaactcagagctccctgttagtctctatcacagaccccttacttacttcctttttagcactcctcaaacaccttcccccaactaaaacataaaactctatgaggatagggacattgtggacactcacatattaataagtgattgaaacatgaatgcatttttaaaaagatcagtaccaacatcctaaaggctcgtggagaagggcatttgagctgactttgaaaagtagaatgtgaagatagcagggtgtaggaaaacaagagtttgagaagagagaggcttgtgtcaaggtgatcttataaaaaaaaaaagctttggtatgaaggcaggcatgtgcatgtctttactgggctttgtggagaaaatagagataaagaataaactttggggaaccaggaaaaccttttatctaggaaagggacatgatcaaaatggcaccagtgtggcatctagtggatgagttgaaggttcaggaattgctaagaagtaaaagcatccacaccctacttcctgtcttgctgacatatatatatatttggcctcatcagtagcaaagctcattaatactccaggatgaaacagaatagaaatacaaackggaattgtttgtttaatctatatttatgcattcacaaatatttactgatccctgctccatgtcagtcattgtacctctgatccatttgggcttgtaaatctgtgtatgtgatacttggagatgtttttgcatacctaaaatgagacaccacttaagagatttagctgttgatactygaaccagtgaagacaaagctgkcaaatacctccctaaataggaaggatatgtatttaatttggaaaatgtcaatttatttgttaccctacacagtaagaattagatatctagaaacaactacaggtatgaaatataacttgaaatgtgtgcttcttttaagaaactccaagagctacgtggaagcatgtgttgttttcttgtcagttttcsttctcatatgmcatttgctcctaaawtacccaattttttttctgcccagacctacacacccaacccactttagctgtaccatccttagattactatgtcacaaattttaccttgttttgaaactgaagtacagtggctgattttgctatttttgcatttatttgcaaagctgaattctagtaattaccagcaaagataatcgttttgcacaaaaagaggtatatttctatcttgaaactaggttatattgttaatgccacagaaaaggaaatggctttttcagaatattagcgtttgtagctcttgcttattgatagggaaaagttagttgccatagtgatctaacagcctytggagggaatgcagtcatggccttaagcatccggcaacccacccagttgagagagcccctctgaaaaggatttccttccatggaaattgagtttctaaaataaaaagagtttattttagcttagatttgcttataggtttgttttgcacttttacctactggaattaaaggaaaaacatttataataaagacagcatatatttcttcagggatgacattaaataatagatttttgtgttaaccattccataaatgtgytctcagacacacaaaatgacctttatacttttattcttgtgagctatggagcttaaaagcaaaccacttcaaccagatgttgatccaataaatttatcaatatttggggtttttagagtttcagtatatattcttaggtagagggaactttcatggcccatcaaaatctgctcaagctgtgctgggtgaaacagcactcatctataatactcatgtaacatgagccaatctgcagtcggttgttctgaattctacatcactcacagcgcaggttgatgtgtgaacactgtatttacaggaccaaaactgcacatttgctytgcagctgtgtttaacagttatcagtttggcacacagcatgactgctttggagggagaatagacacttctcatcccttttggcatttatgaagtaaccaaagtacctactgctgaagtgattcacttgagcttaattagrtttgctacataattagcatttgaagaaacctaaagaaaatccttgggggttggttatttgttatgtcaattgtaagcatgctcatttgggggggactaggaattgaaaatgatgaaatttaatgcaccataaacccagatgtattatatgcatatataattttttraagagtttttaaaagctgtgcttygcagggrtgactgaaatgcttgtctcagacaactgagacctgtgcaaggggattgatccatcagcatgtgcccatgtctgcttgatggcgcttatgtgtgtacarctagctttacacctctcatgagagcccacagctctttaataaacaccccagtgccagccgtgagggctgtgccaataaccaccacttgaagctggagagtgcagtctgagacagtgagatcctatactgcacttgtatttacattttaaggttaatttaattgcaatggcttgttctggtatgtgttgctttaattgcaaagaaaaaaaatgaatttaattttatactcgagacatttctttaaatactcctgaagtttgttctttagtattagagttctacaaagtgaattaactgtggagaatagctgtaaaatactgagaggagaggttaaattttatattccagtttaagttaaggctgggataaaacttgtaaactatgtttaygtaaaatattttctaatctgtcaaaaagttgtcacattttaatcaaattacttagttacctaaatttgtctagccataaataaggaaataaatgagagggaacaagtttaatttattgatgaagcactctgatgattttttttacccttatagtaaaaaaaaaaaaaaaaaacaccttcaaacttacaycctaccatakgttcaycatcaaatctcaagtcagaatcaggttcaaatcagaattcaaaaccagttttagaactcaagtggcagctcatgccctgcatgcaggcaaacggctaggaattaatcagaaagttccacccrtgtccatccttcctcttayttgctcatcttcccagcaagcactaaaaagaaaaaaaaaaagtacaaattcgtacggaacctactgtaactctgattaaagagatcctgtattccccaatgaccgaccccctagctccyccaaaaaggaattaaacggctaagctttttataaatgtttttaaaatccttattggacttgacataaacatgcagataattctactagtctccttttcataggtacaataatagcactaagtacagaattscccttgtatccaagcaagacttttacgaaaacttaaacctgaagtcttatgcagtgcacctaaaattaaccaggagmcttggtgcatataccagcaaatgttgtatacctgtgtgatagtggtcacctcacttaacctctcccagcttcagtttcttgtctttactactacataaagttgttgaaaggattaaaggagactatataaacagctatttttatttatgattaaataatatctgtgtggttactatttagtctgsgtaactaaatagctgggtttttttgttctttgwacacatgcacatattccttttttaaaacaggcatatgggcaaatacattttttttctatatgcctccatgttgtttctctggatttcygccaggatgggatgtgccaattatgcacggaattgtttgcgtgtccatgggtgcttatataagtcattatctttggtgtatgacaaatacacaaactcctgtatctctagtagcctgtaattcctaattgagggacatgattgaatttatgtagtttagccccaagtaagtagataaaaattattaagtaaatgccctggttcatctaaacaaaatatgtgactaatagctttttatatgaactatatacatttagtttacctaagtttattaataaatagtatctctgrgcatttttaattttatattttatacttaactatgaaagtatccagaaccagattccagtcactaactacctcttcattaatggatcaatggttttatcagatttattagaaatttgtctatactgagcatgtaataygtactttgtgaaaataggtataaaactgggctcatcttatcagcataccatttacccaattatgggagtaaaaaaggaggcatgtgtatttttcccctaattctgaaatgtctcccagttcttgaaatttgaatgtgaaaatgtgtgcatgcaaattaagacattcaatctgaaagacttctttgtataaaatactaaccaaatttaaagttgaaccatagggtaaatatagtagaaaagtatattttgaattctgaattttatttccattggatacaaacaataattacaattgctagatgtgttttaatgaatagtttgaactcatcatgctagcaaaaatcatctgcatataaataatagrgcaatttcaagcaattttttcttacttaggtcagatattcctgccagaaacttgtttgctttgttaatttgttcaattattaaactttgagagtacaaagataaatttactaatggggttcaattaacaaatttctgattacatttccctaatgatgatagtatagaacatttatttctgctgtgctttattagtaaaattgcagtgatctggtgactggaattaaactgctgaaaaatgacttggtctgatttattcactgagcaaaaccaagctttaaaggctgtgttgctatggcacccaagattaactgttaaaaaaaaaaaagtttaattttagtaaaaacattggtacatctcttttggcattgtgtarataaaaatagattcccccctcccccttttcttgtcttttttatgtttagcaagtcctttgcattcttttaaacatacactaaaagaaatttagcatatttaaagagaagggaaaaagcagtaaaataaaactgttttatcaaaagattacaatttgtaaaatagcaaatatttcagtcatcattttttatatgtatatatatatactttttattttgtctaatttaatcctttcaaaaactgtctggcttctcatactttttagaaagatggtgccagagagggagaaatcactctattctrgtagtttcgttttgtaattagtcttcaaacttaaaaacaggttgcaaaattgggacagtaacaagttttaggagaaatcttaatgtagctctaatctttcaaattctaaaagaatatgttttctgtttcgtgagacaaaagaattgtctggttgctttagccaggattgatttctgtcttcagaacaccatttggtggtgttagactgctagatgaagaattttgtgggaaaaaaaaaaaaaaaaaagargaagaaaaattgaatgctttgtatgatcatcaaaagccacttttcaggagtattttacatttcttggtgccaagcaaatcagaaatcctaccttacagagagcgatttgttcatgagatgacccagtgctgcaagtcgcttatgtttatcattatgcttccacattctaaggaaattccactttcaaacgttgccgtcagtgctttcttctataggaagaatttgaactataaaatttgagaagcttcagcgtctgtggaaatttgagagcattgccttttttcctctttattgaatgtaaagtgttttaacaaaagcatggtagcccagtacattttaaatgtcaaaacttgcacatagtgtatctcataaagaatttaaattttagacttkgaacttttaaagcctcaaacatctttagaggctgactacagcaaataaacagaatgttttgcagagagatttagtgaagaaaatttttttttgcygttgtttctcacagtgctctgcaggtgaaaatggtgaggaaactttgatagttcaagactatgcaggggagaatttgaaagcagaaacaagcttttacagattttacctggaaaaacaaagtggtttatatgaggtgctagttcttacctttatgattgctaatttagattttataaaaattgaaatgagttaatattttaaaatatttaagtatggtctctggacaacaataagcacagtgtacttttttaaaaagtgactttatgtaagattataaattacagaaatgagttgtcacttccytgttgttacttatttctgattttaaaatagcaaaatttataaagctatagttttgagaaaatagtaattcatattcttaaaattgttataatctctaaattaatacataaattattgatttaatgttaaattttgattttaaaatttatttcagtttctayaggtaatatattgaggttctgacaattttatattaatgtatgattttattctgacacagctgttgaatttgaacyactaattatttctaagaatttgttaataccattctccaactttgttttaggcagctagattgtatccagggaaacccatttagatcagaaataacatttckttctaacttcaaaaaataagcatccactttaaaaatggaatctgaatttaaataaaaatcctaatttaggattcagttccattctttaactagcggaaagaaatcttagcaaaaaaaaaaaccmaaaaaaacaaaaaaaaacaaatttaccagattgccagtaatttgcattaaggaggaagagatggatttttttttaagtcagcagrcattgaagatagttcagtgaagttaagtaatagagatctcagattttaatttagtcaagattatgattttacatagaagcactgttgaaataggcttgataataatrttttaagtgttatacaaatctggatgaaattatattatttactgtcttactcattggttcaactgtgttttaaaagtgagagaccttatatcaatgagtgtttgttctgtgcatctcatgtgcatggtgttaacaaaataaaataagcatacttctaacatttgggggagcatcctattagtttgggggtaggttagggactctgctttccaaataattaatttgatagatccatgctcttgaaaaattgggtacatactatttttaaactttatttttcaaacatgatatgtattgtttaaagcattagcttaaatgaaaaataatattttacattcgtaaagttctgtttatttaattcagtaatgaaattaattyggagttgttggcatactgccttcacaggtttctgtgactcatttgctgagaaagtgtgattcaagagaccagaatcatttttttctcatttgctaaaactcatgttttgactatgggcaaatgttcatggcagatttaaaacaaatttaaagtaaatattctgtgataatatttggaagctgagtgatgtctagccttacataactaggacaaatataaatctgtgagttcacggacttyaaaagtatcaactatacatcattttagaatactggttttgtttttctcatattcttagagtttaactcttatactactaattatgacctctagaaggtaattgcatttagaagcaraatatctgctgttttattaatttaataattaaggactaaatggtgttccaatttaggtttaaaagtaagcrcattcacacagcatttaaaactatttcttaatgtttttttcctagagaagaaatgatagctccatgatcgctatatgttctgttcaatactcattatatttataatttatattacatatatatttatccattatatttataatttagtcctgtccaaataaaatatattctcatagttaagtgtgttgtggtagtataatgattacatgaaataacctggaccttgctgtttgcaaagtaatttaaatgttyattttctgagttgctacttggaaattaagttgtggagtgatgtttctcattggtccaaggagcaacataaaatcctgatttatcagataatcctayaggaaacgtatgcctgttttgacttatgatatgtttcttagtacaatgtcctgcttttctggctttccattaaatgtttagaaaaattagttaatagttttgcaggaaaagaaaggaaatttatcagtctataccagctatataagaagtaggaacatatataaaagacctataattttccgatctcactttgaacttttcttcacagttttccaactcaagatggtatatagtcttgcacaatgggctgtagccaactttccgtcagaagaactgagtaaaaattattccaaaattgttcttagaaataaatctgagcctggaattgtcttgcattaaaaaacaaaaagcaaatgattgctttaaaagcacaccaaatgatattggatggtctttattcttgactctgttttttaaagtgtgtatacgttcattacatccagttgtctattgggcttttttactctaacttttcggaagttgactgacaggccacttttctatagtgggaaataggcrccttgtgtgcgcggagggatttccagcccccsacyccggaaccagcaattagcgtttrggcgtcctgcaccccaccagggggcagcaccggacactgcctttcctagaggcctgagtgcatttaaggctttctggcagtgctctccacccctcttcctcatacagsccttacrtatttttggtattttcttacacattttaggcttagtragtgtttaataaatgttagctgtttaggcattgtgctatacggatgctacttttcaggtttgaccgttctgtgtacctgaattttgtctttaatgataatttgttctattatttaaaataccttgtgcktattataaatatgggattcctttaacttgtaaaatctagcaattattgagcactatgacatgtcaggcatgaaaccaggtactttttatatgctactgcagaatctaagtagacatagaggcaagataacaatagagtcataaaacaatatgaaactgcaataatggggaattgtaatacttctattttgatgttgaataaacagtataaacctcggggaggttaagtcacaatrgaacaaagatcccttcagatagaattccaaattccgtgctgtatcaattatattatgaaaccttgccataaaaaaaaaaaattgttgaggatgagcgaagccacgatgtgtaatgcctgagacagaggtttcagtgatgtaactccagtgacactgtgacaaggagaattagggattgacatacttaaaacttgaatggagaaatagggttagatattgagagatcccaaggaaacctgtgaaaaccttaatatatgtgtttttatgkacacrtaatatgtaacatattacattmatcaaaacatgggaataaattgacgtactcttaatttttaaaagccccataaatatattttacttaaaaccgtaatggatcttattcttttaatttgtgcttgtcctctcttacctgctagaaaatttaaaggttgtctgtccttcctaattttaacaagatacttcattttccaaaaatgaaacaagacaaaaaggtaaatttgttttgttttgttacagaaaatagtcaaatgaagatattttgcctgtgtctgtgaytttaatgatttggaattgttatttcacattgtttgctttcttttctggctataatgtgcatagcaatccagatggctaatatataaacaattggagttatgcttattggaatcatttagtgtggcttaggaggttcccactacccaggaccatctgttcattgctctgtgtattaccttcatgatcaagtttgtgttttcagctccttcacatatcttagcctacacctttctttatatgtgaaagaggcttctaagactgaacttaactcatatggccctcaaggctatattgtcaaaccttgataatccaagcctgccttccacattaccattcttctttattcctaattcaattttttcccttatcattgctattctcaatagtagggtcttaaaatttgcagaagagtgactaagaaaatgggctttgtagtcaggttcgaatcttacttggctgtgtatgtagcgatttgatcttgggcaacctcctttatcttggtttcctcacctgtgaaatggagtataatactgacttcatggatttgttaaratggttaaattagataaaatataactcatttagcccatgcctggtttattattaacataatttagaatgaaaattctcctgttgcaaaaaggcatattcagaagtaaattcaaatactatattctaaaatttcacagcgtcttttggaagaaatagctacttttctttaagcacctgtcatatgtgctttcacattgccaacagaatatakgtaggcggtactaaattgttgttttggggttcattttcagtccttcttactggatcctgggtgcaactttagaccccaagtagctagagaaaagtttctctaggtgcctgtcgtctctggttacatgttacactataatctgctttggagcctcacagccacatatgttattgttccacgtgaactgagccagcttacatacacagctctgtggggagaaagaccataaacgaacactccccgtttctagcccatattctgcataatacatgtaagtctctcaacagccctgtaggctatgccattacttaattcccartttatgtggcttactttttctgaatgaaaagtcatcaaatatggtttttaagttatggaacagaagaatatgattaatctgaattgtcatgaaaattcagggcacatggttgctatggttatggcrtcatgtatttataatggagagatactttgtcttcattaatctacaaacttgccagtgggattcggtatttttttctgtgtgtgtgtgtgtgtttgtgtgtgtgtgtacatacgtacgtacgtacatgtatacagcttctgcatgaaaacactgaggctgaacaaggtgttctgttttggtggtagtgcagagaaacatactcacacataaattatttatatgtgaaccaattcagtgagaagtaagtacagctgcttaattgacctaagggtcttatttccagctgcttaaaaataagtgtaaagtgaagttcatggaagaaataacttaaggctctttaatatacttttgttggtgaagagaatttcaagctgtttcagtcagttagcatatattcttwaaaaractgatatcctattcgtagtcttctcttatatatccttgaattatcttccatgatttttatattttatatacttataatagcrtattataacaacttaatgctacataatttacartaatcgtttccaaattaaggaagccctatgtgtaaaatcacaaatttatgtaacataacacaggaacttttattcatataagaaaatcattattcactttactgttttcctttatttcagcatcatttattacaaaattaatactgttttcraaaaaccaaaacaatatattataaagcacaacgtggagtcttctctcacctccttgtcattcccagcctcaaagggtaaccactgtttacagttcaagtgtgtcttcacagcagatgtttttctatgctcgtgcagacrtatagatgtattcctggraagagtgatgcttgcattcttgaggagttaggagcattgctatttgaaaaaataaaaatccagtttgatgatgttagtcattatgctgaaaggagtgattttaacaaataccaacagawcttcttgtggtaggccagctttccaagttactggttcaagagaacagtcattttataacaggtataaaatcaaagacgtttagtaaaatattttgcccttaattytccatggatagcttgtttatgaagagttcagtattcagggaagatggaaaaacagcccwgtgtcagctaaagtaataaaaccgacttaatcccaaattgacaatttaaagccctttaaaattacttgttgcaaacaagaaayaatccacccagtctgtcatctcttttcagcttattagtagtrgaatctcttaggtggctctttaaaccgtgtgtattaaaagtcctaaagtygttcgtggagatttccagttgctagggaataccaacacttatttggtgtttgatattgtaaatcatgatagttattggggccaaagggaggtctgtaaatgtccagtaggttctctttggagctaatttgtgctgtttgcattttctttctgccccaatacacttgtcactggaagaaatcacacagggggtagggataaagcatgaggtatcatgattccttcatgtaaaaattttgctcaaattaaaatgtgaacatagtataatatgtaaaaaaaactggacctccttaaatcctttataaagcaaggcaatgtgtaaacacatgaataaatatgaaggttttattttaagtaatagctgtgaatgttaaaagtaatattattttccttagaatagtttaatcacatatcccttttaaattttttaagcctttaaacgtattattttcagtctgggcttggggactcacacctgtaatcctagcagtttgggaggctgaggctaggggatcacttgagcccaggagtttgagaccagcctgggcaacataagaagacctcatttytgaaaaaaaaaaaaaaaaaaaaaaaraaarggaagaaaggggaaggaagggaaggaaagggaagaaaaaaacgaaaagaaaaggaacaaaggaaggcgtcggtgatgtgcacaagtggtcacagctacttggtagtctgaggtgggattgcttgagtctggaagatcgaggttgcagtgagccgtgtttgcaccactgcacttcagcctgggcgagagagtgagaccctatttcaaaataaattcaaatttgaatattttacttgagtaacattttttttctcctgaaaataattttctacagtgttctactgtggttgaggttttcatgtttaaaycagatctctagcctcatgggactcatagtctctcatggaagacagataattgggcaactacaatggattatgccgagttcggtgctttgggagctcagagcacaagccccttcctcatctgccctgtagggctggggaggtgctgtcaaggaaggcttcccagcgggagtgagtcctcaggtaataacctgggatttgtacacacatcagtcaggcaaagagctgtggacttggggtgtgagtggccagagacccagcattatctgcaaaagcyagactatgagagagatgagaacacagttaagtaactgatagaagttcagtctggctggggcatggaggaattacaaacatttattatgaaagtaatacatgtgcattgtataaaatgtgagaaaaacagaaaatgagaaggtatatattattgccagtttcatgctgcagagttaactactgtgaacatttgttgcatttttataattctttccatttatattcrtagaacagcgtatttgatattatcccagtttggcttagacaatagatatatatacaggtataaaatgcatatgcatacatgaaaacacataataaaactgggatcatgckaacatgctgttacctgcttttttcatattacagtatacttaaatatttttaatgtccttagatgcaattgtatttttagtaagtgaaatattttaagttgcactatttcatttctgtgagtaaaaaaaattcttgaagttaagcatcctgactctgtctgcaggaggaatgtttcttgaacctagaggctcctatatcaagagtatgtggttatgacacaccatttcctcacatttttkaaccattctacatcccagacaaatggaagtgttatgatgcccttcgaaaaatgatcaactattgaccatataggtaggtatgcatcttgagaaagctactatgtgcccctgacattaacgtactgttaaccaagacacagcaatcatcagtgttttgatggtaacaaactttgatggtaaagttgrtaaaaggcaactttcagaagaaaataatgtgctttagaaaaaaaattcaaatttatagtagtatatttacatttttgttgttgttgttctgagatggagtctcactctgtcgcccaggctagactgcagtggtgcaatctcagctcactgcaacctcccccctacccccgagttcaagcaattctcctgcctcagcctgctgagtagttgggattacaggtgcccaccaccatgcccagctaatttttgtgtttttattggaggtggggtttcactatgttggctcagctgatttcaaattcctgacctcaagtgatccacctgccttagcctcccaaagtgctgggattacaggcatgagccactgcacctggctatatttacatttaatagaaacatatctagcatatgtatatgtgattttttttttttttgagaccgagtctcactctgtcaccaggctggagtgcagtggtgcgatcttggctcatggcaacctccgcctcccaggttcaagcgattgtcctgcctcagtctcctgagtagctgggactacaggtgtgcaccaacatgcccagctaattttttatatttttagtagagacggggtttcaccatgttggccaggatggtctcgatctcttgaccttgtgttccacccgycttggcctcccaaagygctggaattacaggcatgagccaccgcgcctggcctgtatatgtgatttctaaaaaatagatgcatgcatatgttaacattgaatagtcaatcactagatgaagatgctctctaccatggtttagattgcaagtgtactttataccattgtttcaacttcaacctttatttttgtatatattttttcarctacttaaactgttcatgaataggcgtactttctgtatttaaaaatggcccctcaagcaccgttaatttacattccagttatttacatgataattcatgacattctgaaacttgcctgtatattatctgaaaaatggatttcttgagsaaaagatctgtttattgtatgtaaggaaaaattttacctgaaaacaaacaaacaaaccctaaaactcagcaccactaccatttccagaagcttttttarcaagtgaatattttttacataatggataataaatggtatttattcatcatgattttctaagtaatgcttatcagccccttcagtggtgttattctaacaaaatgaatacattacaaattattaagttagcttttcagagttttaatatagaagttactagcactgacacactgattttgaaatgtttcaaaatgagtagataygattagatcctttaccttttaatatctagtttttccaaaaatgatagtaatatcttttgaagaactatgctttttcaaaagcaaaatcaactctgtataatagcacattctctactttttaaagatcagaaatgctagaattcttgacttttgtgtatgggtagtaaatctagctcactgaaaatcagagtgaaacgcctttacatttgtgcggatagagaagttaactctccctcatatgtcactgtgctaccataatccctacattttctgtctgttctagtctaagaatattgttatagatggaagttaggaccattagcccacagatgcgtgtattctctcagacataccggtgtagatgccatatttctgatgtcttcttaatgtctgtgaaagcaactggcatctacaataaatcacacttagaactggttagaggactccctcacttttgttgtccatgtggttcccttccgtggaccagccgtaataaagagccaaggtagtgatggtggccacgtgcctcgttgctatttttaaagtaatattcagatgtggttttaaatttagattatgtattccttttgaaacataagaaaaacatttaaacctatgctgaaaatacgataaaagaaaaacaactccaatatgctaaaagttaaatatggtatttaagaaaatagtcatgtatgcaattgagaaagtctataatttattttacagaaaagctggaagattatgactagatatggaaatattttttctgaatttttttttatatttcctccgacttacctctttttgaaaagagagtttttattaartgaaccatcaygatattggctgaaaagttctacattctattattgtattgtaacacacatgtattgatgattttcattaagagtttcagwttaactttgaaaaatattccacatggtaatcttataaattctgtttaattacatctgtaaatattatgtgtgtgatagtattcaataaagtaaaatcaaattgtctttgggttgtatgtgttctttttttttcctttagtaaaaagtttttgtttcagagtaatagcttgtgaattggttaattaaatctgaattaaagtacagtattcactatagaaatggtgacttctcaactttattgtatttggttcagttctttatgaccaggatggttatatgttgacagaacttctagaatgtttcccctcattcttccctcttgcctgaacaaggtgtcgtaatgaatgtactcacctccccagtgtgtggtgggtggtgaggcagaatttttcctactgcctctcttccgtgagatggacagcctaagcctgtccattacaaaactgccaagttttagctgtagctgtagtgtttgtcgtgatgttgcaaagcaatttttgcccatgttctttatattattacttggataaaaagaaaaaacaacagtagcaacaacagatgactctgacaggaggaaacctccttattggggacattgtccagtcctcttgtttcttactctgcctcttctgcccttcaccacattttagacaagccttagcctttctaaataacgaatcctccagcagaacccctcatccctgacacacctcccctcccatagttccagaagatttcctctcatgggttctaggaaaaaggtctctacccccataaagcaaagaatgagggttgtcatgttttcctttctctagaaacactggaaaaaagcaaaaagaaaaaaaaaaagaacacttttctataactacaattgtatgtgtccctttaaaactgtaatttcacaagttgtgtcctatctatttttaccagcaatttgaaggaggatacagaaggtcacttctgtagattaccagaaacttggaggcaaagtaaaggcacttgatcacagagtctgaatagctatgatctgaaataatgaacccaatcatttgtaaaaataaaaccctgtccttggattaaaaatagaaaaacttgtacagcataggaagggaaaagatgtagtttgtcagcaacaagtttggaaaagatttagggagttcagttggcttaccatacagaacattctgagtttaagatgccaaaactcagtatggactttggctttggtctttgttctccactaatggctcaaagcatcctacagggaactctgcactgacatggtcagtccagcagaacaggacatgtgcggtggtctgccaccttggcctacagtgggttgtagttaaacatactgattttagtggaattaatttgttatggctgttgtatctttctaatgctatattttctattcatttggtattttaaggattttctcttagctattttaattttactgtctttaactctatttttgaaatagcaagtgtgagaataactctgaggatgatctatgtactaaatgcctgtatttgaaagcctcttttcacctctagttagccctgcagtccccacaagtaaacactcccttttcttccaataaacctttacagttaacactaaactcaatctatggcataagacatacatacacatttaatttattgccaaaatacatttttgcatgaaagaaagagtccatattatgaaaataagaaaatagtggcaagaaggcacttgagagattttaaatgaatgccaggtccaaaatcctccactgctcccagcctcacataataatgtctgcttcttgtgacaacatggatctataaactaatttaatttctgtggtttaatgtgtctgattctttcaggaaaaaatataataactgcattctatgcaactaatggaatagctaactaaaagacctgtgtacattttaaaaaaaaatgaataagattcagaacttctagaatgttttccctcattcttccctcttgcctgaacaaggtgttatatagctaactaaaagttctgtgtatatttaaaaaaaaatgaggaacaagattcagaaaattatctcaattccttaggtttaaatctcatcatctaaaaattcttggtcaaaatgtttagaagacccacttagaaggtccacatttggtttcatgtaatccctttctcatcagcttgcctagagtggatacatgtggtttctggctgcctagcatcccggcctccaacttctagaaacagcactgctgtttgtttagagaactccctctccccaccacatgtggttctggagaggctgccaatcccaacactgtgcagtgttagccacagagatggccctgatccagacccagccaggtacctcagaatagaaagtgaggatacccatgcagaaacaaaaagtattagactcagccttgtcgatgacactgcagtctaaaagactgtgtctcaaattttcacctgctccaagtacacctgaatctacaactgatagctgctaaccagctaggcacacagactatgttacttttagcagaaatctttggcctgatggatgaggaacatgaccccaaaaaagtcacattggaacctccagggcaacatgagatttagagatcctgatatactttaaacttgggccatcaggtttggaaagcaatagaaaatattcatatatggttaaagatttagaaaccctggcacctctctgaatatactaattagagatatttaccagaaaagttggaaataaaacagtaacaagaatgaggacatcataactggaaggactggaactgaaaatagaaacaagtaaaaaggtgtatatctaaataattgtcttaaatacacttttatgtgaagtgatggctccatattgcaaaaataagaaaatagtgatgatcataaatatgacttaagttgacaaagactggagtagtagatttgccaaaaggagttcaaaacttctaaactcttcatctttaggaaagaagagtgtaactgcattattctgctgttaaccttgaaagtttaataatggcttttaaatgcttcaaaaacttaaccactaatagaactaaaagcagcatatgtgtcttccacatcattgcacaaatggtctatactaattacacaaacatttagtgagtgcctgttgcgggccgggcaccgggctagattcttaggtacaaagttaactaagaaatagcccctgcaacacaaatgaggggtgggtagtggggggacagcaaggaaagaaaaataggataaagcaaagtcaaacataagacataaatgtaatcaggtgaattccctaattaataagaaagaacttagattgggttaaaaaacaaaatccaattaaaagctgttcaccaggaagtcttgaaataaattgacctagaaaggtgaaaatttgaaaatggaaaaatatgttaggcaaaaatgaaaatgaaaacaaatatggcataattcatatcagacaaaatagaagaaaatatgcattcgaaattgacaaaaggaatacatcatagtgaaggaaagtatgacagttaaatcctttatgttacaaatgtgtagtattaaaatacaagtgaaaactttacagttacaaaagatatggagagaacagttgtagaagatgactttatcactttacttgcaatttgatagatgaagtagactagagtaaaagaatataggatattttggttatatacatagtagaatagaatcaatagaaatatgttttaaacttttttatttccacaaacagaaactatatcaccttttaaagtatacataagtagttaaaactactgatcatgaataaagaaaaataacagtaaatttcccaaggaaaagaatattgtaaaagcaccatgttttctgaccacatcctagatcaatagtaaatattcgaactacatggaaataaaaaagtaccccacttagaaactgtggagccaagaaggaaatgtaaaagcaatgacaaaatatttagaatatgagatcactgatgtgcttcagctaagattctactcagaggtaaattcacagacattaaatattttaaagaagaaaaccgaagatataagaatgcgagaacaaagaaggaaaaagtgcaagaaaaacgaaaaataaaagtagtaagttccaaatgagaaaaaactaaaattgaagttttttaaaataaaaatagtgggttttttttttccattttactgtatatgtctgtatcctgtgaaggttaagctatgtttttatgtaatcatggtatctgcaaatacagaccatgtatggttgtgtttgcattggttaatactgcaaagctcctttctttgagggagaagaagtgattttgcaaaacctaatagttggcccacagtgttgataaacaaaagtcttcattattaggatattttattccaccatttatataaaataattatcagggtcttgatttgctaaaagtccttttgtttcttgctgagccctatttggctgttgtaagtattttatttactatgaaccctcataagattcagtggctataaagaattagaataattatttcaagaatgttttcttgatcatttggaacatttatctacttatttatcatgggtttttgttgttgttgtttacttatttatttttgccttccatcctcaatgttttattggttccaggacaaggaccattagtccattttgtttacaacaaattccacagaacctagagtaacgcttggtctacagaaggctctcaatatgttgctgaatggacagaagaaaggaagcaaaggcttatccctaagttatactttgtacctgagaaacactttgttagaggcctgtttggttaatgtgcacatttaaaatgatattatgtacatttaaccttgtatactagttcttatttattacatcagactcatggggttgtacttcatttcttaaagaattccagaaacagaaagagtccttcatatagggctaaattccaaggatctccaatagataagctttgtttctgaatttttaggcctatagtcttcagatagatttcaaaaccatctctttgttaagtagctctaggacaatattgtgctttaaggtgtctatgtgtgtgtgtatatatatagacaaagtagaatactcattcaaaactcagtttaagggtgatgagggcaacttttcttcatttctttcatcttttctgttcttgtagttacaaatggagagttggcctgggtccaagttaattcttcccatggccctgtctgtattgtccccttttttcagtggttaaagtctgcagacttcagactgggcagtcgtaggacaccatctccttggccactgtgactggtgaaggaataggtgaccaaaattgggccaatcagagcccttcttaaagatttttcatatcaatagatctggaatttttttttttcttttttttttttttttgagacagggtgtcactctgtcacccaggctggagtgcagtggtatgatctcggctcacttcagcctcgacctcatgggctcaagcaattctcccacctcagcctcctgagtaactgggactacaaacgtgtgctaccacacccagctaattttttctttctttcttttttttttttttgagacggagtttcgctcttgttgcccaggctggagtgcaatggcgcgatctcagctcaccacaacctctgccttccgggttcaagcgattctcctgcctccgcctcccaagtagctgggattacaggcatgtgccaccacgcccgactaattttgtatttttagtagagacggggtttctccatgttaatcaggctggtctcgaactcccgacctcaggtgatctgcccgcctcggcctcccaaagtggtgttgggattacaggcgttagccactgcgcccggctttttgttttcttctttttgttgttgttgttttttttttggagatagggtttggccatgttgcccaggctggtcttaaactcctgggctcaagccatctgcctgtctctgtgtccaaaatgctgggactacaggtgtgagccaccacactc
